United States Patent Application Publication US 2023/0272434 A1 - sequence listing, part 7

SEQ ID NO: 10541 - protein, 1205 aa, Amphipyra berbera
MLTRSRAKALTETTRPRSSAPSLSSASQPPDSSIVSDVTPAAAVASSSSDEYFSPPTSPPPARRRGRGRPPDSLRPRGPLASDRVPAAGGSVQRMRWTPTMNENCMRAYFGATEGGTNLTAYRGRMLSLFQVLEPTVNVSAQRLSDQVRVIQRDHRLTDAALDRLRSEVQSNAIITLQSQTAAQPRTPTMVPPLPTHGNEESDDRVTNVSTQCNEQLRSALELAIQEYRFTPPNIRPRIPRLPMHRKNRALMCALDSLLSSYFDNSENLEDTHSILYCAAVAACRVAHAKFDNNDRATRPKPTVPAWQCRIERRINEARALIGKLICFREGNTRPRVMRFVRRAFSGTDINPRDYMSRVTERIDFLKQKVYAWANRIRRYKRRVERYTQNRMFHSDERRVYRTWERPDHDVSDTHLPDNDVMNTFWRNIWSMPVAHTEGDWMQEVQRACEPIEEMGDITIVPQDVTGAVRPMANWKSPGPDGLHNFWLKWLRSSHARLASQFQSSLESGSLPQFLTTGVTHLLHKSGSTAEPKNYRPITCLPTVYKLLTSILRSKISKHIANNSIMSVSQNGCKNGSRGTKELLLIDMAISQQVRRSRKDLSTCWIDYKKAYDSVPHTWLMRVLELYKVNTTLCAFLTSCMGQWRTVLHYPGCRQIQGRGEPIRIERGIFQGDSLSPLWFCLALNPLSTLLEGSGLGYRLRRGGQVISHLLYMDDLKLFAPNNLQLMKLLKVTETFSNSIRMEFGVDKCAVMHVKRAGIMESVGTQLSDSIHLRSLSSTETYKYLGMSEALGINETDMKQSLRERFYGRLKKVLKSLLSGGNKVRAFNGWVMPVLMYSFGILKWTQTELDALDRRVRTLLTAYRMHHPRSSVMRLYIPRKCGGRGFLNAKTLHNREVCSLREYFLQADVGMHRDVVAVDKGFTPLSLAEENWRKPVVLDTNGRREVWQSKELHGRFYRALYGPDVDFLASVAWLRFGDLFGETEGFVCAIMDEVMMTNNYRKYIVKDGTVDICRACHCPGESIRHIISGCSRLANGEYLHRHNLVARIIHQQLALKYNLVDAEVPYYKYVPDPVLENGHITLYWDRSIITDRTIVANKPDIVVIDRSERLAMIVDITVPHDENLVKAEKDKEIKYQDLAHEVVDMWEVDSAVIVPIVVTANGLIAKSLDQHLTRLALGSWVKGLIQKAVLLDTARIVRKFLSLRP

SEQ ID NO: 10542 - protein, 1205 aa, Amphipyra berbera
MLTRSRAKALTETTRPRSSAPSLSSASQPPDSSIVSDVTPAAAVASSSSDEYFSPPTSPPPARRRGRGRPPDSLRPRGPLASDRVPAAGGSVQRMRWTPTMNENCMRAYFGATEGGTNLTAYRGRMLSLFQVLEPTVNVSAQRLSDQVRVIQRDHRLTDAALDRLRSEVQSNAIISLQSQTVAQPRTPTVVPPLPTHGNEESDDRVTNVSTQCNEQLRSALELAIQEYRFTPPNIRPRIPRLPMHRKNRALMCALDSLLSSYFDNSENLEDTHSILYCAAVAACRVAHAKFDNSDKATRPKRAVPAWQCRIERRINEARALTGKLICFREGNTRPRVMRFVRRAFSGTDINPRDYMSRVTERIDFLKQKVYAWANRIRRYKRRVERYTQNRMFHSDERWVYRTWERPDHDVNDTHPPDNDVMNTFWRNIWSMPVTHTEGDWMQEVQRACEPIEEMGDITIVPQDVTSAVRPMANWKSPGPDGLHNFWIKWLRSSHARLASQFQSSLESGSLPEFLTTGVTHLLHKSGSTAEPKNYRPITCLPTVYKLLTSILRAKINSHIINNSIMSVSQNGCKNGSRGTKELLLIDMAISQQVRRSRKDLSTCWIDYKKAYDSVPHTWLMRVLELYKVNTTLCAFLTSCMGQWRTVLHYPGCRQIQGRGEPIRIERGIFQGDSLSPLWFCLALNPLSTLLEGSGLGYRLRRGGQVISHLLYMDDLKLFAPNNLQLMKLLKVTETFSNSIRMEFGVDKCAVMHVKRGGIMESVGTQLSDSIHLRSLSSTETYKYLGMSEALGINETDMKQSLRERFYGRLKKVLKSLLSGGNKVRAFNGWVMPVLMYSFGILKWTQTELDALDRRVRTLLTAYRMHHPRSSVMRLYIPRKCGGRGFLNAKTLHNREVCSLREYFLQADVGMHRDVVAVDKGFTPLSLAKENWRKPVVLDTNGRREVWQSKELHGRFYRALHGPDVDFLASVAWLRFGDLFGETEGFVCAIMDEVILTNNYRKYIVKDGTVDICRACHCPGESIRHIISGCSRLANGEYLHRHNLVARIIHQQLALKYNLVDAEVPYYKYVPDPVLENGHITLYWDRSIITDRTIVANKPDIVVIDRSERLAMIVDITVPHDENLVKAEKDKEIKYQDLAHEVVDMWEVDSAVIVPIVVTANGLIAKSLDQHLTRLALGSWIKGLMQKAVLLDTARIVRKFLSLRP

SEQ ID NO: 10543 - protein, 1205 aa, Amphipyra berbera
MLTRSRSKLQDPKTRPRPSASSLSSASQPPDSSIVSDVTPAAAVASSSSDEYFSPPSSPPPPRRRGRGRPPACMGPRGPPASDRVPAPGGSVQRMRWTQSMNENCMRAYFGATEGGTNLTAYRGRMLSLFQVLEPAVNVSAQRLSDQVRVIQRDHRLTDAALDRLRSEVQSNRIISPQSQTAAQPQAPTVVLPPPIHADEESDDRVTNVSTQCNERLRSALELAIQEYRFAPPNLRPRIPRLPMNKKNRALMCALDSLLSSYFDNSESLEDTHSILYCAAVAACRVAHAKFNNNDRATRPKPAVPAWQCRIERRINEARALIGKLICFRGGNTRPRVMRFMRRAFSGTDINPRDYLSRVTERIDFLKQKVYAWANRIRRYKRRVERYTQNRMFHSDERWVYRTWERPDHNVSDTHLPDNDVMNTFWRNIWSMPVTHTEGDWMQEVQRACEPIEEMGDITIVPQDVTSAVRPMANWKSPGPDGLHNFWLKWLRSSHARLASQFQSSLEFGSLPEFLTTGVTHLLHKSGSTAEPKNYRPITCLPTVYKLLTSILRAKINSHIINNSIMSVSQNGCKNGSRGTKELLLIDMAISQQVRRSRKDLSTCWIDYKKAYDSVPHTWLMRVLELYKVNTTLCAFLTSCMGQWRTVLHYPGCRQIQGRGEPIRIERGIFQGDSLSPLWFCLALNPLSTLLEGSGLGYRLRRGGQVISHLLYVDDLKLFVPNNLQLMNLLKVTETFSNSIRMEFGVDKCAVMHVKRGGIMESVGTQLSDSIHLRSLSSTETYKYLGMSEALGINETDMKQSLRERFYGRLKKVLKSLLSGGNKVRAFNGWVMPVLMYSFGILKWTQTELDALDRRVRTLLTAYRMHHPRSSVMRLYIPRKCGGRGFLNAKTLHNREVCSLREYFLQADVGMHRDVVAVDKGFTPLSLAKENWRKPVVLDTNGRREVWQSKELHGRFYRALHGPDVDFLASVAWLRFGDLFGETEGFVCAIMDEVMMTNNYRKYIVKDGTVDICRACHCPGESIRHIISGCSRLANGEYLHRHNLVARIIHQQLALKYNLVDAEVPYYKYVPDPVLENGHITLYWDRSIITDRTIVANKPDIVVIDRTERLTMIVDITVPHDENLVKAEKDKEIKYQDLAHEVVDMWEVDSAVIVPIVVTANGLIAKSLDHHLTRLSLGSWVKGLIQKAVLLDTARIVRKFLSLRP

SEQ ID NO: 10544 - protein, 1110 aa, Amphipyra berbera
MRWTQSINENVMRAYYGATEGGINLTAYRERMLFLFQVLEPAINVSAQRLSDQVRVVQRNRRLDDTVLERLRSEARNSQTVTFPVQAAVQMQPIAVPPRPIHVDGEGDGEAINVSNQCSEELRSALDDAILEFRTTPPEIRPRLPCLPMHGKNRALMCALDSLLSNYFDGSEDLADTHSILYCAAIAACRVAHVKFTENERATRPKPAVPAWQSRIERRIGGARVLIGKLICFREGNNRPRVMRFVRRAFSGTDISPRDYMSRVTERIDFLKQKVYAWANRIRRYKRRVERYTQNRIFQSDQRRVYRAWERPDPGGGDVRLPDDDALSSFWRSIWSVPIAHTEDGWMRDIEQVCEPIAEMEPITITPQDVADAARPLPNWKSPGPDGLHNFWLKWLRSSHARLASQFQSSLESGSLPQFLTTGVTHLLYKSGSTAEPKNYRPITCLPTVYKLLTSILRVKITTHIDNNCIMSASQNGCRKGSRGTKELLLIDMAISQQVRRSQKDLSTCWIDYKKAYDSVPHSWLMRVLELYKINTTLRTFLMSCMRHWRTVLRFPGCRRIRGSGEQIRIERGIFQGDSLSPLWFCLALNPLSTLLEGTGLGYQLRRGGQVISHLLYMDDLKLFAPTDLQLMELLKVTENFSNSIRMEFGVDKCAVMHVKRGRIAESEGTQLPNSVQLRSLSPTETYKYLGMSEALGISETDMRQSLRERFFGRLNKLLKSLLSGGNKVRAFNGWVMPVLMYSFGTLKWTQADLDALDRRVRALLTAHRMHHPRSSVMRLYIPRKCGGRGFLNAKTLHNREVYSLREYFLQAEGVMHRDVVAVDKGFTPLALARENWRKPAVLSTNDREVVWQSKELHGRYYRALHGPDVDFSASVSWLRSGNLFGETEGFVCAIMDEVMMTNNYRKYIVKDGTVDICRACHRPGESIRHIVSGCSRLANGEYLHRHNLVARIIHQQLALKYNLVESEVPYYRYVPDPVLENGHATLYWDRSIITDRTIVANKPDIVVIDRSERRTMIVDITVPHDENLVKAEKDKQIKYLDLAHEVVGMWDVDSAVIVPIVVTANGIIAKSLDIHLMRLSLGGWIKGLIQRAVLLDTARIVRRFLSLEP

SEQ ID NO: 10545 - protein, 962 aa, Amphipyra berbera
MNKKNRALMCALDSLLSSYFDNSESLEDTHSILYCAAVAACRVAHAKFDNNDRATRPKPAVPAWQCRIERRINEARALIGKLICFREGNTRPRVMRFVRRAFSGTDINPRDYLSRVTERIDFLKQKVYAWANRIRRYKRRVERYTQNRMFHSDERWVYRTWERPDHDVSDTHLPDNDVMNTFWRNIWSMPVTHIEGDWMQEVQRACEPIEEMGDITIIPQDVTSAVRPMANWKSPGPDGLHNFWLKWLRSSHARLASQFQSSLESGSFPEFLTTGVTHLLHKSGSTAEPKNYRPITCLPTVYKLLTSILRAKINSHIINNSIMSVSQNGCKNGSRGTKELLLIDMAISQQVRRSRKDLSTCWIDYKKAYDSVPHTWLMRVLELYKVNTTLCAFLTSCMGQWRTVLHYPGCRQIQGRGEPIRIERGIFQGDSLSPLWFCLALNPLSTLLEGSGLGYRLRRGGQVISHLLYMDDLKLFAPNNLQLVKLLKVTETFSNSIRMEFGVDKCAVMHVKRGGIMESVGTQLSDSIHLRSLSSTETYKYLGMSEALGINETDMKQSLRERFYGRLKKVLKSLLSGGNKVRAFNGWVMPVLMYSFGILKWTQTELDALDRRVRTLLTAYRMHHPRSSVMRLYIPRKCGGRGFLNAKTLHNREVCSLREYFLQADVGMHRDVVAVDKGFTPLSLAKENWRKPVVLDTNGRREVWQSKELHGRFYRALHGPDVDFLASVAWLRFGDLFGETEGFVCAIMDEVMMTNNYRKYIVKDGTVDICRACHCPGESIRHIISGCSRLANGEYLHRHNLVARIIHQQLALKYNLVDAEVPYYKYVPDPVLENGHITLYWDRSIITDRTIVANKPDIVVIDRSERLAMIVDITVSHDENLVKAEKDKEIKYQDLAHEVVDMWEVDSAVIVPIVVTANGLIAKSLDQHLTRLALGSWIKGLIQKAVLLDTARIVRKFLSLRP

SEQ ID NO: 10546 - protein, 1111 aa, Amphipyra berbera
MRWTPTMNENCMRAYFGATEGGTNLTAYRGRMLSLFQVLEPTVNVSAQRLSDQVRVIQRDHRLTDAALDRLRSEVQSNAIISLQSQTAAQPRTPTVVPPLPTHGNEESDDRVTNVSTQCNEQLRSALELAIQEYRFTPPNIRPRIPRLPMHRKNRALMCALDSLLSSYFDNSENLEDTHSILYCAAVAACRVAHAKFDNSDKATRPKRAVPAWQCRIERRINEARALIGKLICFREGNTRPRVMRFVRRAFSGTDINPRDYMSRVTERIDFLKQKVYAWANRIRRYKRRVERYTQNRMFHSDERWVYRTWERPDHDVNDTHPPDNDVMNTFWRNIWSMPVTHTEGDWMQEVQRACEPIEEMGDITIVPQDVTSAVRPMANWKSPGPDGLHNFWIKWLRSSHARLASQFQSSLESGSLPEFLTTGVTHLLHKSGSTAEPKNYRPITCLPTVYKLLTSILRAKINSHIINNSIMSVSQNGCKNGSRGTKELLLIDMAISQQVRRSRKDLSTCWIDYKKAYDSVPHTWLMRVLELYKVNTTLCAFLTSCMGQWRTVLHYPGCRQIQGRGEPIRIERGIFQGDSLSPLWFCLALNPLSTLLEGSGLGYRLRRGGQVISHLLYMDDLKLFAPNNLQLMKLLKVTETFSNSIRMEFGVDKCAVMHVKRGGIMESVGTQLSDSIHLRSLSSTETYKYLGMSEALGINETDMKQSLRERFYGRLKKVLKSLLSGGNKVRAFNGWVMPVLMYSFGILKWTQTELDALDRRVRTLLTAYRMHHPRSSVMRLYIPRKCGGRGFLNAKTLHNREVCSLREYFLQADVGMHRDVVAVDKGFTPLSLAKENWRKPVVLDTDGRREVWQSKELHGRFYRALHGPDVDFLASVAWLRFGDLFGETEGFVCAIMDEVILTNNYRKYIVKDGTVDICRACHCPGESIRHIISGCSRLANGEYLHRHNLVARIIHQQLALKYNLVDAEVPYYKYVPDPVLENGHITLYWDRSIITDRTIVANKPDIVVIDRSERLAMIVDITVPHDENLVKAEKDKEIKYQDLAHEVVDMWEVDSAVIVPIVVTANGLIAKSLDQHLTRLALGSWIKGLMQKAVLLDTARIVRKFLSLRP

SEQ ID NO: 10547 - protein, 1000 aa, Noctua janthe
MVTNVSTQCNEEMRCALEGAIREYRFMQPDLRPRVPRLPMHNKNKVLVAVLDSQLSNYFDNCENLTDAHSVLYCAAVAACRVAHVKFSDDRATRPKPAVPSWQYRIERRIGEARALIGKLICFREGNTRPRVMRFVRRAFSGTDISARDYMSRVTERIDFLKQKVYAWANRIRRYKRRVDRYTQNRTFQRDERWVYRAWERPDQGVSDTHLPDDDAMCSFWRSIWSVPVSHTEGEWTREVERACDLVPEMGAITISPQDVVRAVRPLPNWKSPGPDGLHNFWIKWFTRSHARLAILFQSALESGSLPEFLTTGITHLLHKSGSTAEPKNYRPIACLPTVYKVLTSILRAKINKHIDDNSVMSASQNGCRNGSRGTKELLLIDMAISQQVRRSRRDLSTCWIDYKKAYDSVPHTWLMRVLELYKVDSTLRIFLMSCMGQWRTVLRYPGCRQIQRNSEPIRIERGIFQGDSLSPLWFCLALNPLSTLLEDSGLGYRLRRGGQVISHLLYMDDLKLFAPNDLQLMELLKVTETFSSAIRMEFGVDKCAVMHVKRGEIVESVGTQLSDSINLRSLSATETYKYLGMSEALGINVADMKQSLKERFFGRLKKVFNSLLSGGNKVRAFNGWVMPVLMYSFGILKWTQTELDALDRRVRTLLTTYRMHHPRSSVMRLYIPRRCGGRGFLNAKTLHNREIYSLREYFLETDVGMHRDVVAVDKGLTPLSLAKENWRKPVVLDTNDRMEVWQSKELHGRFFRALHGPDVDLPASVAWLRSGDLFGETEGFVCAIMDEVMMTNNYRRFIVKDGTVDICRACHRPGESIRHIISGCSRLANGEYLHRHNLVARIIHQQLALKYNLVESEVPYYKYVPDPVLENGSITLYWDRSIVTDRTIVANKPDIVVVDRSERRAMIVDITVPHDGNLVKAEKDKQIKYLDLAHEVVDMWDVDSAIIVPIVVSAHGLIAKSLDQYLRRLSLGSWIKGLIQKAVLLDTARIVRRFLSLEP

SEQ ID NO: 10548 - protein, 1197 aa, Noctua janthe
MLTRSATRRARLSPPDPSLSSASPPPESSPIVSAVTPAVAVASSSSDEYFSPPTTPPPVRRRGGRRPPDGLGPRGPPASDRVPAPGGSVPRMRWTQSINANVMRAYYGATEGGNNLTAYRVRMLSLFQVLEPAVNVSAQRLSDQVRVIQRNGMLDDTVLDRLRTEMQSSHVIATPPQTVVPPQSTIIPTHDNNVSNDMVTNVSTQCNEEMRCALEGAIREYRFMQPDLRPRVPRLPMHNKNKVLVAVLDSQLSNYFDNCENLTDAHSVLYCAAVAACRVAHVKFSDDRATRPKPAVPSWQYRIERRIGEARALIGKLICFREGNTRPRVMRFVRRAFSGTDISARDYMSRVTERIDFLKQKVYAWANRIRRYKRRVDRYTQNRTFQRDERWAYRAWERPDQGVADTHLPDDDAMCSFWRSIWSVPVSHTEGEWTREVERACDLVPEMGAITISPQDVVRAVRPLPNWKSPGPDGLHNFWIKWFTRSHARLAILFQSALESGSLPEFLTTGITHLLHKSGSTAEPKNYRPIACLPTVYKVLTSILRAKINKHIDDNSVMSASQNGCRNGSRGTKELLLIDMAISQQVRRSRRDLSTCWIDYKKAYDSVPHTWLMRVLELYKVDSTLRIFLMSCMRQWRTVLRYPGCRQIQRNSEPIRIERGIFQGDSLSPLWFCLALNPLSTLLEDSGLGYRLRRGGQVISHLLYMDDLKLFAPNDLQLMELLKVTETFSSAIRMEFGVDKCAVMHVKRGEIVESVGTQLSDSINLRSLSATETYKYLGMSEALGINVADMKQSLKERFFGRLKKVFNSLLSGGNKVRAFNGWVMPVLMYSFGILKWTQTELDALDRRVRTLLTTYRMHHPRSSVMRLYIPRRCGGRGFLNAKTLHNREIYSLREYFLETDVGMHRDVVAVDKGLTPLSLAKENWRKPVVLDTNDRMEIWQSKELHGRFFRALHGPDVDLPASVAWLRSGDLFGETEGFVCAIMDEVMMTNNYRRFIVKDGTVDICRACHRPGESIRHIISGCSRLANGEYLHRHNLVARIIHQQLALKYNLVESEVPYYKYVPDPVLENGNITLYWDRSIVTDRTIVANKPDIVVVDRSERRAMIVDITVPHDGNLVKAEKDKQIKYLDLAHEVVDMWDVDSAIIVPIVVSAHGLIAKSLDQYLRRLSLGSWIKGLIQKAVLLDTARIVRRFLSLEP

SEQ ID NO: 10549 - protein, 1197 aa, Noctua janthe
MLTRSATRRARLSPPDPSLSSASPPPESSPIVSAVTPAVAVASSSSDEYFSPPTTPPPVRRRGGRRPPDGLGPRGPPASDRVPAPGGSVPRMRWTQSINANVMRAYYGATEGGNNLTAYRVRMLSLFQVLEPAVNVSAQRLSDQVRVIQRNGMLDDTVLDRLRTEMQSSHVIATPPQTVVPPQSTIIPTHDNNVSNDMVTNVSTQCNEEMRCALEGAIREYRFMQPDLRPRVPRLPMHNKNKVLVAVLDSQLSNYFDNCENLTDAHSVLYCAAVAACRVAHVKFSDDRATRPKPAVPSWQYRIERRIGEARALIGKLICFREGNTRPRVMRFVRRAFSGTDISARDYMSRVTERIDFLKQKVYAWANRIRRYERRVDRYTQNRTFQRDERWVYRAWERPDQGVADTHLPDDDAMCSFWRSIWSVPVSHTEGEWTREVERACDLVPEMGAITISPQDVVRAVRPLPNWKSPGPDGLHNFWIKWFTRSHARLAILFQSALESGSLPEFLTTGITHLLHKSGSTAEPKNYRPIACLPTVYKVLTSILRAKINKHIDDNSVMSASQNGCRNGSRGTKELLLIDMAISQQVRRSRRDLSTCWIDYKKAYDSVPHTWLMRVLELYKVDSTLRIFLMSCMGQWRTVLRYPGCRQIQRNSEPIRIERGIFQGDSLSPLWFCLALNPLSTLLEDSGLGYRLRRGGQVISHLLYMDDLKLFAPNDLQLMELLKVTETFSSAIRMEFGVDKCAVMHVKRGEIVESVGTQLSDSINLRSLSATETYKYLGMSEALGINVADMKQSLKERFFGRLKKVFNSLLSGGNKVRAFNGWVMPVLMYSFGILKWTQTELDALDRRVRTLLTTYRMHHPRSSVMRLYIPRRCGGRGFLNANALHNREICSLREYFLETDVGMHRDVVAVDKGLTPLSLAKENWRKPVVLDTNDRMEVWQSKELHGRFFRALHGPDVDLPASVAWLRSGDLFGETEGFVCAIMDEVMMTNNYRRFIVKDGTVDICRACHRPGESIRHIISGCSRLANGEYLHRHNLVARIIYQQLALKYNLVESEVPYYKYVPDPVLENGNITLYWDRSIVTDRTIVANKPDIVVVDRSERRAMIVDITVPHDGNLVKAEKDKQIKYLDLAHEVVDMWDVDSAIIVPIVVSAHGLIAKSLDQYLRRLSLGSWIKGLIQKAVLLDTARIVRRFLSLEP

SEQ ID NO: 10550 - protein, 1197 aa, Noctua janthe
MLTRSATRRARLSPPDPSLSSASPPPESSPIVSAVTPAVAVASSSSDEYFSPPTTPPPVRRRGGRRPPDGLGPRGPPASDRVPAPGGSVPRMRWTQSINANVMRAYYGATEGGNNLTAYRVRMLSLFQVLEPAVNVSAQRLSDQVRVIQRNGMLDDTVLDRLRTEMQSSHVIATPPQTVVPPQSTIIPTHDNNVSNDMVTNVSTQCNEEMRCALEGAIREYRFMQPDLRPRVPRLPMHNKNKVLVAVLDSQLSNYFDNCENLTDAHSVLYCAAVAACRVAHVKFSDDRATRPNPAVPSWQYRIELRIGEARALIGKLICFREGNTRPRVMRFVRRAFSGTDISARDYMSRVTERIDFLKQKVYAWANRIRRYKRRVDRYTQNRTFQRDERWVYRAWERPDQGVADTHLPDDDAMCSFWRSIWSVPVSHTEGEWTREVERACDLVPEMGAITISPQDVVRAVRPLPNWKSPGPDGLHNFWIKWFTRSHARLAILFQSALESGSLPEFLTTGITHLLHKSGSTAEPKNYRPIACLPTVYKVLTSILRAKINKHIDDNSVMSASQNGCRNGSRGTKELLLIDMAISQQVRRSRRDLSTCWIDYKKAYDSVPHTWLMRVLELYKVDSTLRIFLMSCMGQWRTVLRYPGCRQIQRNSEPIRIERGIFQGDSLSPLWFCLALNPLSTLLEDSGLGYRLRRGGQVISHLLYMDDLKLFAPNDLQLMELLKVTETFSSAIRMEFGVDKCAVMHVKRGEIVESVGTQLSDSINLRSLSATETYKYLGMSEALGINVADMKQSLRERFFGRLKKVFNSLLSGGNKVRAFNGWVMPVLMYSFGILKWTQTELDALDRRVRTLLTAYRMHHPRSSVMRLYIPRRCGGRGFLNAKTLHNREIYSLREYFLETDVGMHRDVVAVDKGLTPLSLAKENWRKPVVLDTNDRMEVWQSKELHGRFFRALHGPDVDLPASVAWLRSGDLFGETEGFVCAIMDEVMMTNNYRRFIVKDGTVDICRACHRPGESIRHIISGCSRLANGEYLHRHNLVARIIHQQLALKYNLVESEVPYYKYVPDPVLENGNITLYWDRSIVTDRTIVANKPDIVVVDRSERRAMIVDITVPHDGNLVKAEKDKQIKYLDLAHEVVDMWDVDSAIIVPIVVSAHGLIAKSLDQYLRRLSLGSWIKGLIQKAVLLDTARIVRRFLSLEP

SEQ ID NO: 10551 - protein, 1191 aa, Noctua janthe
MLTRRRAKLHETHPPSPGSSLSSASHSPGRATSVSAASPVAAVASSSSDEFFSPPSTPPPPRRRGRGRPPAGLGPRGQQATNRVPAAGGNVSRIRWTQSMNENVMRAYYGATEGGINLTPAVNVSAQRLSDQVRVILNNHRLDDATLDRLRSEMQISPASNPLPSQNLTHVPAVLPLRANHHAEEEDDRTISADNLCNVELRSALEGAIREYRFMSPDLRPRLPRLPMNKKNRALVCALDALLPNFIESSTNLCDTHSILYCTAVAACRVANVKFPNTDSPTRPKSAVPAWQCRIERRINEARALIGKLICFREGNTRPRVMRFVRRAFSGTDISPREYMSRVTERIDFLKQKVYAWANRIRRYRRRVDRYTQNRMFQSDERWVYRTWERPVTIQGVTDAHLPDNDAMNAFWRSIWSVPVGHTEGDWMRVVERACDSIPEMEAISISPLDVACAVRPLPNWKSPGPDGLHNFWIKWLQRSHACLASQFQSSLETGSLPPFFTTGVTHLLYKSGSTVEPKNYRPITCLPTVYKVLTSILRAKIVRHIDSNSIMSVSQNGCKNGSRGTKELLLIDMAISQQVRRSRRDLSTCWIDYKKAYDSVPHTWLMRVLELYKIDATLRTFLMSCMGQWRTVLLYPGCRQVLGNDEPIRIERGIFQGDSLSPLWFCLALNPLSTLLEDSGLGYRLRRGGQVISHLLYMDDLKIFAPSSLQLMELLKVTETFSSAIRMEFGLDKCAVMHVKRGEIMESVGTQLSDSIFLRSLSSTETYKYLGMSEALGINAADMKQSLKERFFGRLNKVLNSLLSGGNKVRAFNGWVMPVLMYSYGILKWTQTELDALDRKVRTLLTANRMHHPRSSVMRLYIPRKCGGRGFLNAKTLHNREVCSLREYFLETDVGMHRDVVSVDKSFTPLSLANQNWRKPVVLDTNNRREVWQSKELHGRFFRALHGPDVDFLASVSWLRFGDLFGETEGFVCAVMDEVIMTNNYRKYIIKDGTVDICRACHRPGESIRHIVSGCSRLANGEYLHRHNLVAKIIHQQLALQYNLVSSEVPYYKYVPDPVLENGHATLYWDRSIITDRTILANKPDIVVIDRRERRAMIVDITVPHDENLVKAENDKKIKYLDLAHEVVDMWDVDSAIIVPIVVTVNGLIAESLDQHFRRLSLRGWVKSLIQKAVLLDTARIVRRFLSLEP

SEQ ID NO: 10552 - protein, 1108 aa, Noctua janthe
MRWTQSINANVMRAYYGATEGGNNLTAYRVRMLSLFQVLEPAVNVSAQRLSDQVRVIQRNGMLDDTVLDRLRTEMQSSHVIATPPQTVVPPQSTIIPTHDNNVSNDMVTNVSTQCNEEMRCALEGAIREYRFMQPDLRPRLPRLPMHNKNKVLVAVLDSQLSNYFDNCEDLTDAHSILYCTAVTACRVAHVKFSDDRATRPKPAVPAWQYRIERRIGGARALIGKLICFREGNTRPRVMRFVRRAFSGTDISPRDYMSRVTERIDFLKQKVYAWANRIRRYKRRVDRYTQNRTFQRDERWVFRAWERLGQGVTDTRLPDDDVLIMCSFWRSIWSVPVSHTEGERTLRVERACDLVPEMGAINISPQDIVRAVRPLPNWKSPGPDGLHNFWIKWFTRSHARLAILFQSALESGSLPEFLTTGITHLLHKSGSTAEPKNYRPITCLPTVYKVLTSILRAKINKHIDDNSVMSASQNGCRNGSRGTKELLLIDMAISQQVRRSRKDLSTCWIDYKKAYDSVPHTWLMRVLEFYKIDATLRTFLMSCMGQWRTVLRYPGCRQIQRNSEPIRIERGIFQGDSLSPLWFCLALNPLSTLLEDSGLGYRLRRGGQVISHLLYMDDLKLFAPNDLQLMELLKVTETFSSAIRMEFGVDKCAVMHVKRGEIVESVGTQLSDSINLRSLSATETYKYLGMSEALGINVADMKQSLKERFFGRLKKVFNSLLSGGNKVRAFNGWVMPVLMYSFGILKWTQTELDALDRRVRTLLKAYRMHHPRSSVMRLYIPRRCGGRGFLNAKTLHNREICSLREYFLETDVGMHRDVVAVDKGLTPLSLAKENWRKPVVLDTNDRMEVWQSKELHGRFFRALHGPDVDLSASVAWLRSGDLFGETEGFVCAIMDEVMMTNNYRRFIVKDGTVDICRACHRPGESIRHIISGCSRLANGEYLHRHNLVARIIHQQLALKYNLVESEVPYYKYVPDPVLENGSITLYWDRSIITDRTIVANKPDIVVVDRSERRAMIVDITVPHDENLVKAEKDKQIKYLDLAREVVDMWDVDSAIIVPIVVSAHGLIAKSLDQYLRRFSLGSWIKGLIQKAVLLDTARIVRRFLSLEP

SEQ ID NO: 10553 - protein, 1048 aa, Mythimna ferrago
MLDDTVLDRLRTEMSDRVITPPSQPVVPVVVPPSSHISFHTDEVSTDTVTNVSTQCNNELRSALECAIREYRNMPLELRPRLPRLPMRNKNKALVAALDSQLSNYFDDCEDLTDTHSIMYCAAVAACRVAHVKFPNSDVATRPKPAVPAWQCRIERRIGGARALIGKLICFREGNTRPRVMRFVRRAFSGTDISPRDYMSRVTERIDFLKQKVYAWANRIRRYKRRVERYTQNSTFRSNERWVYRAWERPDQGVTDTRLPDDDAMTSFWRNIWSVPVSHTEGGWTREVERACESITEMGAIIISPQDVARAVRPLPNWKSPGPDGLHNFWIKWLQRSHARLASQYQAALESGSLPEFLTTGVTHLLHKSGSTAEPKNYRPITCLPTVYKVLTSILRAKINHHVDSNAIMSASQNACRNGSRGTKELLLIDMAISQQVRRSRKDLSTCWIDYKKAYDSVPHTWLMRVLELYKVDATLRTFLMSCMRQWRTVLRYPGCRNIHRNSEPVRIERGIFQGDSLSPLWFCLALNPLSTLLENSGLGYRLKRGGQVISHLLYMDDLKLFAPNNLQLMELLKVTETFSSAIRMEFGVDKCAVMHIKRGEIVESVGIQPSDSIHLRSLSPTETYKYLGMSEALGINASDMKQSLRERFFGRLKKVLNSLLSGGNKVRAFNGWVMPVLMYAFGVLKWTQTELDALDRRVRTLLTAYRMHHPRSSVMRLYIPRKCGGQGFLNAKTLHNREVCSLREYFLAADGGMHRDVVAVDKGLTPLSLANENWRKPVVLDTNVRKEVWQSKELHGRFFRVLHGPDVDQLASVAWLRSGDLFGETEGFVCAIMDEVIMTNNYRRFIVKDGTVDICRACHRPGESIRHIISGCSRLANGEYLHRHNLVARIIHQQLALKYSLVESEVPYYRYVPDPVLDSGDITLYWDRSIITDRTIVANKPDIVVVDRRERRAMIVDISVPHDENLVKAEKDKQIKYIDLAREVVDMWDVDSAIIVPIVVSANGLIAKSLDQHLRRLSLSGWIKGLIQKAVLLDTARIVRRFLSLEP

SEQ ID NO: 10554 - protein, 1200 aa, Mythimna ferrago
MLTRSRARSQIAQPTSSGSSLSSTSQPPGPAPAVSPEIPVAAVASSSSDEYFSPPTTPPPARRRGRGRPPACLGPRGPPASDRVLAAGGSVQRMRWTQSINENVMRSYFGATEGGTNLTAYRGRMLSLFQVLEPAVNVSAQRLSDQVRVIQRNRMLDDAVLDRLRLESRNGRVSPISPPAAVQRQPSVSPRPDHVGEDDDDEAISVSTQCNARLRSALEDAFREYRSIPPELRPRLPRLPMHRKNRALMCALDSQLSNCFDSSEDLSDTHSILYCAAAAACRVAHVKIPNNDRATRPAKPAWQCRIERRIGEARALIGKLICFREGNTRPRVMRFVRRAFSGTDISPRDYLPRITERIDFLKQKVYAWANRIRRYKRRVERYTQNHTFQSNERWVYRAWERPDQSVIDTRLPDDDAMYSFWRSIWSVPVNHTEGDWTREIERECELIPEMGAINISPQDVACAVRPLPNWKSPGPDGLHNFWLKWFQSSHARLASQFQSALESGSLPQFLTTGITHLLHKSGSTAEPKNYRPITCLPTVYKVLTSILRAKINNHIETNSIMSASQNGCRNGSRGTKELLLIDVAISQQVRRYRRDLSTCWIDYKKAYDSVPHTWLMRVLELYKVDATLRAFLMSCMGQWRTVLHYPGCRRVSENSEPLRIERGIFQGDSLSPLWFCLALNPLSTLLEGSGLGYRLRREGQVISHLLYMDDLKLFASNNLQLMELLKVTETFSSAIRMEFGLDKCAVMHVKRGEIMESVGTQLSDSIHLRSLCSTETYKYLGMSEALGINAADVKQSLRERFFGRLNKVLNSLLSGGNKVRAFNGWVMPVLMYSFGILKWTQTELDALDRRVRTLLTANRMHHPRSSVMRLYIPRKCGGRGFLNAKTLHNREVCSLREYFLETDVGMHRDVVAVDKGLTPLSLASENWRKPIVMDTNERKEVWKGKELHGRFYRALHGPDVDLLASVSWLRFGNLFGETEGFVFAIMDEVMMTNNYRKYIVKDGTVDICRACHRPGESIRHIISGCSHLANGDYLHRHNLVARIIHQQLALKYNLVESEVPYYRYVPDPVLENGSVTLYWDRSIITDRTIVANKPDIVVIDRLERRTMIVDIAVPHDENLVKAEKDKQTKYLDLAREVVDMWEVDRAIIVPIVVTANGLIAKSLDQHLRRLSLGSWIKGLIQKAVLLDTARIVRRFLSQEP

SEQ ID NO: 10555 - protein, 1200 aa, Mythimna ferrago
MLTRAAARRARPPPPASSLSSASPPSEPSLTESAVTPAVAAASSSSDEYYSPPTTPPPTRRRGGRRPPACLGPRGPPASDRVPAAGGSVPRMRWTQSTNENVMRAYYGATEGGNNLTAYRVRMLSLFQVLEPAVNVSAQRLSDQVRVIQRNHMLDDTVLDRLRTEMSDRVITAPSQPVVPVVAPPPSHISFHTDEVSTDTVTNVSTQCNNELRSALECAIREYRNMPLEFRPRLPRLPMRNKNKALVAALDSQLSNYFDDCEDLTDTHSIMYCAAVAACRVAHVKFPNSDVATRPKPAVPAWQCRIERRIGGARALIGKLICFREGNTRPRVMRFVRRAFSGTDINPRDYMSRVTERIDFLKQKVYAWANRIRRYKRRVERYTQNSTFRSNERWVYRAWERPDQGVTDTRLPDDDAMCLFWRNIWSVPVSHTEGGWTREVERACESITEMGAITISPQDVARAVRPLPNWKSPGPDGLHNFWIKWLQRSHARLASQYQAALESGSLPEFLTTGVTHLLHKSGSTAEPKNYRPITCLPTVYKVLTSILRAKINHHVDNNAIMSASQNGCRNGSRGTKELLLIDMAISQQVRRSRKDLSTCWIDYKKAYDSVPHTWLMRVLELYKVDATLRIFLMSCMRQWRTVLRYPGCRNIQRNSEPVRIERGIFQGDSLSPLWFCLALNPLSTLLENSGLGYRLKRGGQAISHLLYMDDLKLFAPNNLQLMELLKVTETFSSAIRMEFGVDKCAVMHIKRGEIVESVGIQLSDSIHLRSLSPTETYKYLGMSEALGINATDMKQSLKERFFGRLKKVLNSLLSGGNKVRAFNGWVMPVLMYAFGVLKWTQTELDALDRRVRTLLTAYRMHHPRSSVMRLYIPRKCGGRGFLNAKTLHNREVCSLREYFLAADGGMHRAVVAVDKGLTPLSLANENWRKPVVLDTNVRKEVWQSKELHGRFFRALHGPDVDQLASVAWLRVGDLFGETEGFVCAIMDEVIMTNNYRRFIVKDGTVDICRACHRPGESIRHIISGCSRLANGEYLHRHNLVARIIHQQLALKYSLVESEVPYYRYVPDPVLDSGDITLYWDRSIITDRTIVANKPDIVVVDRRERRAMIVDISVPHDENLVKAEIDKQIKYIDLARDVVDMWNVDSAIIVPIVVSANGLIAKSLDQHLRRLSLSGWIKGLIQKAVLLDTARIVRRFLSLEP

SEQ ID NO: 10556 - protein, 1200 aa, Mythimna ferrago
MLTRAAARRARPPPPASSLSSASPPPDPSPTVSAVTPAVAAASSSSDEYYSPPTTPPPARRRGGRRPPACFGPRGPPASDRVPATGGSVPRMRWTQSTNENVMRAYYGATEGGNNLTAYRVRMLSLFRVLEPAVNVSAQRLSDQVRVIQRNHMLDDTVLDRLRTEMSNHANAPSSQPVAPVMVPPSNHVANPADEESTDMVIEVSTQCTNELRSALECAIREYRNMPSVLRPRLPRLPMHNKNKALVAALDMQLSNYFDNCKDLTDTHSIMYCAAVAACRVAHVKFPNSDVATRPKPAVPAWQCRIERRIGGARALIGKLICFREGNTRPRVMRFVRRAFSGTDISPRDYMPRVTERIDFLKQKVYAWANRIRRYKRRVERYTQNRAFQSNERWVYRAWERPDQGVTDTRLPDDDAMCSFWRNIWSVPVSHTEGSWTGEVERACESITEMGAITISPQDVARAVRPLPNWKSPGPDGLHNFWIKWLQRSHARLASQYQAALESSSLPEFLTTGVTHLLHKSGSTAEPKNYRPITCLPTVYKVLTSILRDKINNHIDNNSIMSASQNGCRKGSRGTKELLLIDMAISQQVRRSRKDLSTCWIDYKKAYDSVPHTWLMRVLELYKVDATLRTFLMSCMRQWRTVLRYPGCRNIQRNSEPVRIERGIFQGDSLSPLWFCLALNPLSTLLENSGLGYRLKRGGQVISHLLYMDDLKLFAPNNLQLMELLKVTETFSSAIRMEFGVDKCAVMHIKRGEIVESAGTQLSDSIHLRSLSSTETYKYLGMSEALGINATVMKQSLKERFFGRLKKVLNSLLSGGNKVRAFNGWVMPVLMYAFGVLKWTQTELDALDRRVRTLLTAYRMHHPRSSVMRLYIPRKCGGRGFLNAKTLHNREVCSLREYFLAADVGMHRDVVAVDKGLTPLSLANENWRKPVVLDTNVRKEVWQSKELHGRFFRALHGPDVDKLASVAWLRVGDLFGETEGFVCAIMDEVIMTNNYRRFIVKDGTVDICRACHRPGESIRHIISGCSRLANGEYLHRHNLVARIIHQQLALKYSLVESEVPYYRYVPDPVLDNGDITLYWDRSIITDRTIVANKPDIVVVDRSERRAMIVDISVPHDENLVKAEKDKQIKYIDLAREVVDMWEVDSAIIVPIVVSANGLIAKSLDQHLRRLSLGDWIKGLIQKAVLLDTARIVRRFLSLEP

SEQ ID NO: 10557 - protein, 930 aa, Mythimna ferrago
MYCAAVAACRVAHVKFPNSDVATRPKPAVPAWQCRIERRIGGARALIGKLICFREGNTRPRVMRFVRRAFSGTDISPRDYMSRVTERIDFLKQKVYAWANRIRRYKRRVERYTQNSTFRSNERWVYRAWERPDQGVTDTRLPDDDAMTSFWRNIWSVPVSHTEGGWTREVERACESITEMGAIIISPQDVARAVRPLPNWKSPGPDGLHNFWIKWLQRSHARLASQYQAALESGSLPEFLTTGVTHLLYKSGSTAEPKNYRPITCLPTVYKVLTSILRAKINHHVDSNAIMSASQNGCRNGSRGTKELLLIDMAISQQVRRSRKDLSTCWIDYKKAYDSVPHTWLMRVLELYKVDATLRTFLMSCMRQWRTVLRYPGCRNIHRNSEPVRIERGIFQGDSLSPLWFCLALNPLSTLLENSGLGYRLKRGGQVISHLLYMDDLKLFAPNNLQLMELLKVKETFSSAIRMEFGVDKCAVMHIKRGEIVESVGIQLSDSIHLRSLSPTETYKYLGMSEALGINASDMKQSLRERFFGRLKKVLNSLLSGGNKVRAFNGWVMPVLMYAFGVLKWTQTELDALDRRVRTLLTAYRMHHPRSSVMRLYIPRKCGGRGFLNAKTLHNREVCSLREYFLAADGGMHRDVVAVDKGLTPLSLANENWRKPVVLDTNVRKEVWQSKELHGRFFRVLHGPDVDQLASVAWLRSGDLFGETEGFVCAIMDEVIMTNNYRRFIVKDGTVDICRACHRPGESIRHIISGCSRLANGEYLHRHNLVARIIHQQLALKYSLVESEVPYYRYVPDPVLDSGDITLYWDRSIITDRTIVANKPDIVVVDRRERRAMIVDISVPHDENLVKAEKDKQIKYIDLAREVVDMWDVDSAIIVPIVVSANGLIAKSLDQHLRRLSLSGWIKGLIQKAVLLDTARIVRRFLSLEP

SEQ ID NO: 10558 - protein, 1200 aa, Mythimna ferrago
MLTRSRAQQLNTQLTTSGPSLSSASQPPGPAPAVSPEIPVAAVASSSSDEYFSPPTTPPPARRRGRGRPPACLGPRGPPASDRVPAAGGSVQRMRWTQSINENVMRSYFGATEGGTNLTAYRGRMRSLFQVLEPAVNVSAQRLSDQVRVIQRNRMLDDAVLDRLRLESRNGRVSPVSPPAAVQRQPSVSPRPDHVGEDDDDGAISVSTQCNVRLRSALEDAFREYRSIPPELRPRLPRLPMHRKNRALVCALDSQLSNCFDSSEDLTDTHSILYCAAAAACRVAHVKIPNSDRATRPAKPAWQCRIERRIGEARALIGKLICFREGNTRPRVMRFVRRAFSGTDISPRDYLPRITERIDFLRQKVYAWANRIRRYKRRVERYTQNRAFQSNERWVYRAWERPDQSVIDTRLPDDDAMYSFWRSIWSVPVNHTEGDWTRKVERECELLPEMGAVTISPQDVARAVRPLPNWKSPGPDGLHNFWLKWFKSSHARLASQFQSALESGSLPQFLTTGITHLLHKSGSTVEPKNYRPITCLPTVYKVLTSILRAKINSHIETNSIMSASQNGCRNGSRGTKELLLIDVAISQQVRRSRRDLSTCWIDYKKAYDSVPHTWLMRVLELYKIDVTLRTFLMSCMGQWRTVLHYPGCRRVSENSEPLRIERGIFQGDSLSPLWFCLALNPLSTLLEGSGVGYRLRREGQVISHLLYMDDLKLFASNNLQLMELLKVTETFSSAIRMEFGLDKCAVMHVKRGEIMESVGTQLSDSIHLRSLCSTETYKYLGMSEALGINAADVKQSLRERFFGRLNKVLKSLLSGGNKVRVFNGWVMPVLMYSFGILKWTQTELDALDRRVRTLLTANRMHHPRSSVMRLYIPRKCGGRGFLNAKTLHNREVCSLREYFLETDVGMHRDVVAVDKGLTPLSLANENWRKPIVMDTNERKEVWKGKELHGRFYRALHGPDVDLLASVSWLRFGDLFGETEGFVFAIMDEVMMTNNYRKYIVKDGTVDICRACHRPGESIRHIISGCSHLANGDYLHRHNLVARIIHQQLALKYNLVESEVPYYRYVPDPVLENGSVTLYWDRSIITDRTIVANKPDIVVIDRLERRTMIVDIAVPHDENLVKAEKDKQTKYLDLAREVVDMWEVDRAIIVPIVVTANGLIAKSLDQHLRRLSLGSWIKGLIQKAVLLDTARIVRRFLSQEP

SEQ ID NO: 10559 - protein, 1200 aa, Mythimna ferrago
MLTRAAARRARPPPPASSLSSASPPSEPSLTESAVTPAVAAASSSSDEYYSPPTTPPPTRRRGGRRPPACLGPRGPPASDRVPAAGGSVPRMRWTQSTNENVMRAYYGATEGGNNLTAYRVRMLSLFQVLEPAVNVSAQRLSDQVRVIQRNHMLDDTVLDRLRTEMSDRVITAPSLPVVPVVAPPPSHISFHTDEVSTDTVTNVSTQCNNELRSALECAIREYRNMPLEFRPRLPRLPMRNKNKALVAALDSQLSNYFDDCEDLADTHSIMYCAAVAACRVAHVKFPNSDVATRPKPAVPAWQCRIERRIGGARALIGKLICFREGNTRPRVMRFVRRAFSGTDISPRDYMSRVTERIDFLKQKVYAWANRIRRYKRRVERYAQNSTFRSNERWVYRAWERPDQGVTDTRLPDDDAMCLFWRNIWSVPVSHTEGGWTREVERACESITEMGAITISPQDVARAVRPLPNWKSPGPDGLHNFWIKWLQRSHARLASQYQAALESGSLPEFLTTGVTHLLHKSGSTAEPKNYRPITCLPTVYKVLTSILRAKINHHVDNNAIMSASQNGCRNGSRGTKELLLIDMAISQQVRRSRKDLSTCWIDYKKAYDSVPHTWLMRVLELYKVDATLRTFLMSCMRQWRTVLRYPGCRNIQRNSEPVRIERGIFQGDSLSPLWFCLALNPLSTLLENSGLGYRLKRGGQAISHLLYMDDLKLFAPNNLQLMELLKVTETFSSAIRMEFGVDKCAVMHIKRGEIVESVGIQLSDSIHLRSLSPTETYKYLGMSEALGINATDMKQSLRERFFGRLKKVLNSLLSGGNKVRAFNGWVMPVLMYAFGVLKWTQTELDALDRRVRTLLTAYRMHHPRSSVMRLYIPRKCGGRGFLNAKTLHNREVCSLREYFLAADGGMHRAVVAVDKGLTPLSLANENWRKPVVPDTNVRKEVWQSKELHGRFFRALHGPDVDQLASVAWLRVGDLFGETEGFVCAIMDEVIMTNNYRRFIVKDGTVDICRACHRPGESIRHIISGCSRLANGEYLHRHNLVARIIHQQLALKYSLVESEVPYYRYVPDPVLDSGDITLYWDRSIITDRTIVANKPDIVVVDRRERRAMIVDISVPHDENLVKAEKDKQIKYIDLAREVVDMWNVDSAIIVPIVVSANGLIAKSLDQHLRRLSLSGWIKGLIQKAVLLDTARIVRRFLSLEP

SEQ ID NO: 10560 - protein, 1200 aa, Mythimna ferrago
MLTRSRARSQIAQPTSSGSSLSSALQPPGPAPAVSPEIPVAAVESSSSDEYFSPPTTPPPARRRGRGRPPACLGPRGPPASDRVLAAGGSVQRMRWTQSINENVMRSYFGATEGGTNLTAYRGRMLSLFQVLEPAVNVSAQRLSDQVRVIQRNRMLDDAVLDRLRLESRNGRVSPISPPAAVQRQPSVSPRPDHVGEDDDDEAISVSTQCNARLRSALEDAFREYRSIPPELRPRLPRLPMHRKNRALMCALDSQLSNCFDSSEDLSDTHSILYCAAAAACRVAHVKIPNNDRATRQAKPAWQCRIERRIGEAKALIGKLICFREGNTRPRVMRFVRRAFSGTDISPRDYLPRITERIDFLKQKVYAWANRIRRYKRRVERYTQNHTFQSNERWVYRAWERPDQSVIDTRLPDDDAMYSFWRSIWSVPVNHTEGDWTREIERECELIPEMGAINISPQDVACAVRPLPNWKSPGPDGLHNFWLKWFQSSHARLASQFQSALESGSLPQFLTTGITHLLHKSGSTAEPKNYRPITCLPTVYKVLTSILRAKINNHIETNSIMSASQNGCRNGSRGTKELLLIDVAISQQVRRYRRDLSTCWIDYKKAYDSVPHTWLMRVLELYKVDATLRAFLMSCMGQWRTVLHYPGCRRVSENSEPLRIERGIFQGDSLSPLWFCLALNPLSTLLEGSGLGYRLRREGQVISHLLYMDDLKLFASNNLQLMELLKVTETFSSAIRMEFGLDKCAVMHVKRGEIMESVGTQLSDSIHLRSLCSTETYKYLGMSEALGINAADVKQSLRERFFGRLNKVLNSLLSGGNKVRAFNGWVMPVLMYSFGILKWTQTELDALDRRVRTLLTANRMHHPRSSVMRLYIPRKCGGRGFLNAKTLHNREVCSLREYFLETDVGMHRDVVAVDKGLTPLSLASENWRKPIVMDTNERKEVWKGKELHGRFYRALHGPDVDLLASVSWLRFGNLFGETEGFVFAIMDEVMMTNNYRKYIVKDGTVDICRACHRPGESIRHIISGCSHLANRDYLHRHNLVARIIHQQLALKYNLVESEVPYYRYVPDPVLENGSVTLYWDRSIITDRTIVANKPDIVVIDRLERRTMIVDIAVPHDENLVKAEKDKQTKYLDLAREVVDMWEVDRAIIVPIVVTANGLIAKSLDQHLRRLSLGSWIKGLIQKAVLLDTARIVRRFLSQEP

SEQ ID NO: 10561 - protein, 903 aa, Acronicta aceris
MIPAWQSRIEQRIGEARALIGKLICFREGNTRPRVMRFVRRAFSGTNIDPRDYASCVTERIDFLKQKVYAWANRIRRYKRRAERYSLNRAFQGDQRWVYRTWDRPDNGVSDVCRPNDDAMSLFWRNIWSVPVNHTEDDWICDVERACESLPAMEEINISPQDVACAVHSVPNWKAPGPDGLHNFWIKWLRSSHARLASQFQSSLESGTLPQFLTTGITHLLHKSGDTADPKNYRPITCLPTVYKLLTSILRAKICYHIDESSIMSASQNGCRNGSRGTKELLLIDMTISQQVRRLRKNLSTCWIDYKKAYDSVPHTWLMRVLELYKVDVSLRTFLRSCMGQWRTVLHYPGCRQIQRISEPIRIERGIFQGDSLSPLWFCLALNPLSTLLEESRLGYRLRRGGQVISHLLYMDDLKLFASSDLHLMELLKITENFSNSIRMEFGVEKCAVMHVKRGGIVESVGIQLSDSTQLRSLASTETYKYLGMAEALGINVADMKQSLQVRFFGRLTKVLKSLLSGGNKVRAFNGWVMPVLMYSFGVLKWTQTELETLDRKVRTLLTAYRMHHPRSSVMRLYIPRKCGGRGFLNAKNLHNREVCSLREHFLKTEMGMHRDVVAVDNGLTPLSMAKENWRKPVVLSTNDRRNVWQGKELHGRYYRALHEPGVDTLASVSWLRFGDLFGETEGFVCAIIDEVMMTNNYRKFIVKDGTVDICRACHRPGESIRHIISGCSRLANGEYLHRHNLVARIIHQQLALKYNLVESEVPYYKYVPDPVLENGHATLYWDRSIITDRTIIANKPDIVVIDRLERRAMIVDITVPHDENLFKAEKEKEIKYLDLAHEVVDMWGVDAAIIVPIVVSANGLIAKSLDRHLKRLSLGGWIKGLIQKAVLLDTARIVRRFLSLGP

SEQ ID NO: 10562 - protein, 1192 aa, Eilema sororculum
MPTRAQAIRNRSAPITSPDSSLSSAAQPPAVEPAASSSSSSDEFFSPPTSPTPVRRPGRGRPPTCLGPRAPPASNGAPATGGDVHRMRWTNSINENVMRAYFAATEGGTNLSAYRTRMLPLFQALEPSINVSAQRLSDQVRVIQRNRMLNETVLETLRLECLRNICVTPAPVPVPASTVELNDDTCVAPDDTPIPVSIQYNEEIKEALECALREYRSMPVHVRPRLPRLPIHRRNIALVSALDSLLPRYLENSENLGDTHSILYCTAVAACRMAGAKFPIKYPAIRPKSAIPAWQCRIERRVTEARVLIGKLICFRSGNTRPRVMRYVTRAFAGTDISPQDYTSRVTERIDFLKQKVYAWANRIRRYKKRVDRYTVNRMFQRDQRWVYRSWERTEESVDDVRRPDAEVTNAFWRSIWSVPVSHTEGVWMHEVERACETIPEMEEINIDAIDVDCAVRSLSNWKSPGPDGLHNFWLKWLRSSHVVLASQFQSAVESGTLAAFMTTGVTHLLHKTGSTLEPNNYRPITCLPTVYKLLTSILRAKINNHINNNSIMCASQNGCRNGARGTKELLLIDMAISQQARRNRKDLTACWIDYKKAFDSVPHTWLLRVLELYKVNTTLCTFLRSCMGQWRTVLFYPGCRQALGGGVPITIERGIFQGDSLSPLWFCLALNPLSTLLVNSGLGYRLRREGQMVSYLFYMDDLKLFAHTNPQLITLLKITETFSNSIKMAFGVDKCAVIHVKRGRVVESEGIQLSDSTNLRSLLVTETYKYLGMSQALCINEVDMKQMLQERFFGRLKKVLNSLLSGGNKVRACNSWVMPLLMYSFGILKWTQTELDTIDRKVRTQLTAFRMHHPRSSVMRLYIPRKCGGRGFLNAKTLHNREVCNLRDYFLKSNVDMHRDVVNVDTGLTPLGLAKENWRRPTIVSTDSRREVWQSKELHGRFYRALHRPEVDLLASVSWLRFSDLFGETEGFVCAIADEVIKTNNYRKYIMRDGTIDICRACHQPGESLRHITSGCSRLANGEYLHRHNQVARIIHQRLALKYNLVEFEVPYYRYVPEPVLENTHITLYWDRSIITDRTVVANKPDIVVIDRSERRALIVDVTIPHDENLVKAEKDKQVKYLDLAHEVVDMWNVDSAIIVPIVVSVNGLIAKSLDQHLKRLGLDGWVKGQMQKAVLLDTARIVRKFLSLEP

SEQ ID NO: 10563 - protein, 1128 aa, Eilema sororculum
MLTRAQARNRNAQTTSPDSSLSSAAQPPAMEPAASSSSSSDEFFSPPTSPTPVRRPGRGRPPTCLGPRRPPASNRAPAAGGNVHRMRWTNSINENVMRAYFAATEGGTNLSAYRTRMLPLFQALEPSINTSAQRLSDQVRVIQRNRMLNETVLETLRQECLRNICVTPAPAPAPASTAEINNDTCVAPDDTPIPVSIQYNEEIKEALECALREYRSVPVHVRPRLPRLPIHRRNISLVSALDSLLPRYLENSENLGDTHSILYCTAVAACRMAGAKFPIKDPAIRPKSAIPAWQCRIERRVAEARVLIGKLICFRSGNTRPRVMRYVTRAFAGTDIGPQDYTSRVTERIDFLKQKVYAWANRIRRYKRRVDRYTVNHMFQRDQRWVYRSWERTDESVDDVRRPDAEATNAFWRSIWSVPVSHTEGDWMREVERACETIPEMEEIYIDATDVDCAVHSLSNWKSPGPDGLHNFWLKWLRSSHVVLASQFQSAIESGTLPAFMTTGVTHLLHKTGSTLEPNNYRPITCLPTVYKLLTSILRAKINNHINNNSIMCASQNGCRNGARGTKELLLIDMAISQQARRNRKDLTACWIDYKKAFDSVPHTWLLRVLELYKVNTTLCTFLRSCMGQWRTVLFYPGCRQALGGGVPITIERGIFQGDSLSPLWFCLALNPLSTLLVNSGLGYRLLREGQMVSHLFYMDDLKLFAHTNPQLIALLKVTETFSNSIKMAFGVDKCAVIHVKRGRVVESEGIQLSDSTNLRSLLVTETYKYLGMSQALCINEVDMKQMLQERFFGRLKKVLNSLLSGGNKVRACNSWVMPLLMYSFGILRWTQTELDTIDRKVRTQLTAFRMHHPRSSVMRLYIPRKCGGRGFLNAKTLHNREVCNLRDYFLKSNVDMHRDVVNVDTGLTPLGLAKENWRRPTIVSTDSRREVWQSKELHGRFYRALHRPEVDLLASVSWLRFSDLFGETEGFVCAIADEVIKTNNYRKNIMRDGTIDICRACHQPGESLRHITSGCSRLANGEYLHRHNQVARIIHQRLALKYNLVEVEVPYYKYVPEPVLQNSHITLYWDRSIITDRTVVANKPDIVVIDRSERRALIVDVTIPHDENLVKAEKDKQVKYLDLAHTC

SEQ ID NO: 10564 - protein, 1045 aa, Eilema sororculum
MLNETVLETLRLECLRNICVTPAPAPAPASTVEINDDTCVAPDDTPIPVSIQYNEEIKEALECALREYRSMPVHVRPRLPRLPIHRRNIALVSALDSLLPRYLENSENLGDTHSILYCTAVAACRMAGAKFPNKDPAIRLKSAIPAWQCRIERRVAEARVLIGKLICFRSGNTRPKVMRYVTRAFAGTDISPQDYTSRVTERIDFLKQKVYAWANRIRRYKKRVDRYTVNRMFQRDQRWVYRSWEQTEESVDDVRRPDAEATNAFWRSIWSVPVSHTEGDWMREVERTCETIPEMEKINIDAIDVDCAVRSLSNWKSPGPDGLHNFWLKWLRSSHVVLASQFQSAVESGTLPAFMTTGVTHLLHKTGSTLEPNNYRPITCLPTVYKLLTSILRAKINNHINNNSIMCASQNGCRNGARGTKELLLIDMAISQQARRNRKDLAACWIDYKKAFDSVPHTWLLRVLELYKVNTTLCTFLRSCMGQWRTVLFYPGCRQALGSGEPITIERGIFQGDSLSPLWFCLALNPLSTLLVNSGLGYRLRREGQMVSHLFYMDDLKLFAHTNPQLIALLKVTETFSNSIKMAFGVDKCAVIHVKRGRVVESEGIQLSDSTNLRSLLVTETYKYLGMSQALCINEVDMKQMLQERFFGRLKKVLNSLLSGGNKVRACNSWVMPLLMYSFGILKWTQTELDTIDRKVRTQLTAFRMHHPRSSVMRLYIPRKCGGRGFLNAKTLHNREVCNLRDYFLKSNVDMHRDVVNVDTGLTPLGLAKENWRRPTVVGTDSRREVWQSKELHGRFYRALHRPEVDLLASVSWLRFSDLFGETEGFVCAIADEVIKTNNYRKYIMRDGTIDICRACHQPGESLRHITSGCSRLANGEYLHRHNQVARIIHQRLALKYNLVEVEVPYYRYVPEPVLENSHITLYWDRSIITDRTVVANKPDIVVIDRSERRALIVDVTIPHDENLVKAEKDKQVKYLDLAHEVVDMWNVDSAIIVPIVVSVNGLIAKSLDQHLKRLGLDGWVKGQMQKAVLLDTARIVRKFLSLEP

SEQ ID NO: 10565 - protein, 1067 aa, Eilema sororculum
MLSVNTSAQRLSDQVRVIQRNHMLNETVLETLRQECLRNICVTPALAPAPASTTALNEDSHVTRDDTPIPVSIQYNEEIKEALEYALREYRSMPIHVRPRLPRLPIHRRNIALVSALDSLLPKYLENSENLGDTHSILYCTAVAACRMAGAKFPIKDPAIRPKPAIPAWQCRIERRVAEARVLIGKLICFRSGNTRPRVMRYVTRAFAGTNISPQDYTSRVTERIDFLKQKVCAWANRIRRYKKRVDRYTVNRMFQRDQRWVYRSWERTDESVDDLRRPDAEATNAFWRSIWSVPVSHTEGDWMREVERACETIPEMEEIYIDATDVDCAVRSLSNWKSPGPDGLHNFWLKWLRSSHVVLASQFQSAIESGTLPAFMTTGVTHLLHKTGSTLEPNNYRPITCLPTVYKLLTSILRAKINNHINNNSIMCTSQNGCRNGARRTKELLLIDMTISQQARRNRKDLVACWIDYKKAFDSVPHTWLLRVLELYKVNTTLCTFLRSCMGQWRTVLLYPGCRQALGSGEPITIERGIFQGDSLSPLWFCLALNPLSTLLVNSGLGYRLRREGQMVSHLFYMDDLKLFAHTNPQLIALLKVTETFSNSIKMAFGVDKCAVIHVKRGRVVESEGIQLSDSTNLRSLLVTETYKYLGMSQALCINEVGMKQMLQERFFGRLKKVLNSLLSGGNKVRACNSWVMPLLMYSFGILKWTQTELDTIDRKVRTQLTAFRMHHPRSSVMRLYIPRKCGGRGFLNAKTLHNREVCNLRDYFLKSNVDMHRDVVNVDTGLTPLGLAKENWRRPTIVGTDSRREVWQSKELHGRFYRALHRPEVDLLASVSWLRFSDLFGETEGFVCAIADEVIKTNNYRKYIMRDGTIDICRACHQPGESLRHITSGCSRLANGEYLHRHNQVARIIHQRLALKYNLVEVEVPYYRYVPEPVLENSHITLYWDRSIITDRTVVANKPDIVVIDRSERRALIVDVTIPHDENLVKAEKDKQVKYLDLAHEVVDMWNVDSAINVPIVVSVNGLIAKSLDQHLKRLGLDGWVKGQMQKAVLLDTARIVRKFLSLEP

SEQ ID NO: 10566 - protein, 964 aa, Eilema sororculum
MPIHRRNIALVSALDSLLPRYLENSENLGDTHSILYCTAVAACRMAGAKFPNKDPAIRLKSAIPVWQCRIERRVAEARVLIGKLICFRSGNTRPRVMRYVTRAFAGTDISPQDYTSRVTERIDFLKQKVYAWANRIRRYKKRVDRYTVNRMFQRDQRWVYRSWERTEESVDDVRRPDAEATNAFWRSIWSVPVNHTEGDWMREVERACETIPEMEKINIDAIDVDCAVLSLSNWKSPGPDGLHNFWLKWLRSSHVVLASQFQSAVESGTLPAFMMTGVTHLLHKTGSTLEPNNYRPITCLPTVYKLLTSILRAKINNHINNNSIMCASQNGCRNGARGTKELLLIDMAISQQARRNRKDLTACWIDYKKAFDSVPHTWLLRVLELYKVNTTLCTFLRSCMGQWRTVLFYPGCRQALGSGEPITIERGIFQGDSLSPLWFCLALNPLSTLLVNSGLGYRLRREGQMVSHLFYMDDLKLFAHTNPQLIALLKVTETFSNSIKMAFGVDKCAVIHVKRGRVVESEGIQLSDSTNLRSLLVTETYKYLGMSQALCINEVDMKQMLQERFFGRLKKVLNSLLSGGNKVRACNSWVMPLLMYSFGILKWTQTELDTIDRKVRTQLTAFRMHHPRSSVMRLYIPRKCGGRGFLNAKTLHNREVCNLRDYFLTSNVDMHRDVVNVDTGLTPLGLAKENWRRPTIVSTDSRREVWQSKELHGRFYRALHRPEVDLLASVAWLRFSDLFGETEGFVCAIADEVIKTNNYRKYIMRDGTIDICRACHQPGESLRHITSGCSRLANGEYLHRHNQVARIIHQRLALKYNLVEVEVPYYKYVPEPVLENSHITLYWDRSIITDRTVVANKPDIVVIDRSERRTLIVDVTIPHDENLVKAEKEKQVKYLDLAHEVVDMWNVGSAIIVPIVVSVNGLIAKSLDQHLKRLGLDGWVKGQMQKAVLLDTARIVRKFLSLEP

SEQ ID NO: 10567 - protein, 1192 aa, Eilema sororculum
MLTRAQAKRNRSAPITSPDSSLSSAAQPPAVEPAASSSSSSDEFFSPPTSPTPVRRPGRGRPPTCLGPRRPPASNGAPATGGYVHRMRWTNSINENVMRAYFAATEGGTNLSAYRTRMLPLFQALEPSINVSAQRLSDQVRVIQRNRMLNETVLETLRLECLRNICVTPAPVPVPASTVELNDDTCVAPDDTPIPVSIQYNEEIKEALECALREYRSMPVHVRPRLPRLPIHRRNIALVSALDSLLPRYLENSENLGDTHSILYCTAVAACRMAGAKFPIKDPAIRPKSAIPAWQCRIERRVTEARVLIGKLICFRSGNTRPRVMRYVTRAFAGTDISPQDYTSRVTERIDYLKQKVYAWANRIRRYKKRVDRYTVNRMFQRDQRWVYRSWERTEESVDDVRRPDAEVTNAFWRSIWSVPVSHTEGDWMHEVERACETIPEMEEINIDAIDVDCAVRSLSNWKSPGPDGLHNFWLKWLRSSHVVLASQFQSAVESGTLPAFMTTGVTHLLHKTGSTLEPNNYRPITCLPTVYKLLTSILRAKINNHINNNSIMCASQNGCRNGARGTKELLLIDMAISQQARRNRKDLTACWIDYKKAFDSVPHTWLLRVLELYKVNTTLCTFLRSCMGQWRTVLFYPGCRQALGGGVPITIERGIFQGDSLSPLWFCLALNPLSTLLVNSGLGYRLRREGQMVSHLFYMDDLKLFAHTNPQLITLLKITETFSNSIKMAFGVDKCAVIHVKRGRVVESEGIQLSDSTNLRSLLVTETYKYLGMSQALCINEVDMKQMLQERFFGRLKKVLNSLLSGGNKVRACNSWVMPLLMYSFGILKWTQTELDTIDRKVRTQLTAFRMHHPRSSVMRLYIPRKCGGRGFLNAKTLHNREVCNLRDYFLKSNVDMHRDVVNVDTGLTPLGLAKENWRRPTIVSTDSRREVWQSKELHGRFYRALHRPEVDLLASVSWLRFSDLFGETEGFVCAIADEVIKTNNYRKYIMRDGTIDICRACHQPGESLRHITSGCSRLANGEYLHRHNQVARIIHQRLALKYNLVEFEVPYYRYVPEPVLENTHITLYWDRSIITDRTVVANKPDIVVIDRSERRALIVDITIPHDENLVKAEKDKQVKYLDLAHEVVDMWNVDSAIIVPIVVSVNGLIAKSLDQHLKRLGLDGWVKGQMQKAVLLDTARIVRKFLSLEP

SEQ ID NO: 10568 - protein, 1193 aa, Eilema depressum
MLTRAQARRNANAPATPPDSSLSSAAQPPPREPAASSSSSSDEFFSPPTSPTPVRRPGRGRPPICLGPRRPPASNRAPAAGGDVHRMRWTPSINENVMRAYFAATEGGTNLSAYRTRMLPLFQALEPSVNTSSQRLSDQVRVIQRNRMLNETVLETLRQECLRNICVTPAPAPASTPAPVPVRHMNEQTGDDTLIPVSIQYNEQIKEALECALREYRSMPLNDRPRLPRLPIHRRNMALVGALDSLLPSYLYNSENLGDTHSILYCTAVAACRMAGVKFPNKDPAMRPKSTIPAWQCRIERRVAEARVLISKLICFRSGNTRPRVMRYVTRAFAGTGISPQEYTSRITERIDFLKQKVCAWANRIRRYRKRVDRFTVNRMFRRDQRWVYRSWEQPDESVDDVRRPEAAATNTFWRSIWSVPVSHIEGDWMCEVERACESIPEMEDIYIDAIDVDCAVRPLSNWKSPGPDGLHNFWLKWLRSSHALLASQFQSAVESGTLPAFMTTGVTHLLHKTGSTLEPNNYRPITCLPTVYKLLTSILRVKINNHINNNSIMCASQNGCRNGARGTKELLLIDMAISQQARRHTKDLAACWIDYKKAFDSVPHTWLLRVLELYKVNATLCTFLRSCMRQWRTVLFYPGCRQALGDGEPITIERGIFQGDSLSPLWFCLALNPLSTLLVNSGLGYRLRREGQMVSHLLYMDDLKLFAHTNPQLMALLKITENFSNSIKMGFGVEKCAVIHVKRGRVVESQGIQLSDSTSLRSLLITETYKYLGMSQALCINEAGMKQMLQERFFGRLKKVLNSLLSGGNKVRACNSWVMPLLMYSFGILKWTQTELDTIDRRVRTQLTAFRMHHPRSSVMRLYIPRKCGGRGFLNAKTLHNREVCNLRDYFLKSNVDMHRDVVSVDTGLTPLGLAKENWRRPIVVGTDSRREVWQSKELHGRFYRALHRPEVDLLASVSWLRFGDLFGETEGFVCAIADEVIKTNNYRKYIMRDGTIDICRACHQPGESLRHITSGCSRLANGEYLHRHNQVARIIHQRLALKYNLVELEVPYYRYVPEPVLENSHITLYWDRSIITDRTVVANKPDIVVIDRSERRALIVDVTIPHDENLVKAEKDKQVKYLDLAHEIVDMWNVDSAIIVPIVVTVNGLIAKSLDQHLKRLGLDGWVKGQMQKAVLLDTARIVRKFLSLEP

SEQ ID NO: 10569 - protein, 1212 aa, Ptilodon capucinus
MTDAPRRNPRRLCRQRTVNEPNAQSTPPDPSPRSASPSPASIIRTSVTAVASSESDEYFSPPTSPPPVRRQRGRPPGHLGLLGQPAPNRVLVPSGVVRRMRWTSSINENVMRAYYEATEGGTNLTAYRNRMLPLFQSLEPAVNVSAQRLSDQVRVIQRGNMLADTVLDRLRSEMQSRRVVPVASSQPAAQPVASATVTSRLAADSDVDRDNAPIYVSNQYNDLLRSTLEDVVRVYRSMPNHLRPRIPRLPMHKGNRAIVGALDSLLSIYFDSSDNLADTHSILYCAAITVCRVARVKVFNTDTATRPKPAVPAWQCRIERRISEARALIGKLSCFREGNTRPRVMRFVRRAFAGTDVSPREYISRVTERIDFLKQKIYAWANRIRRYKVRVDRYSQNSMFQRDQRWVYRSWERPNEPVSELQRPDDNAMTTFWRDIWSVPVTHYEGDWIGDVERMCEPIKEMEAISIGPLDVANAVRSLPNWKAPGPDGLHNFWLKWLRSSHVRLASQFQSALQSGSLPEFITTGVTHLLHKSGSTTDPKNYRPITCLPTIYKTLTSILRAKIVRHVEDNSIMSASQNGCRSGSRGTKELLLIDMTICQQARRNRKDLSTCWIDYKKAYDSVPHTWLVRVLELYKIDTTLRTFLESCMRQWKTVLLCPGSRQILGNGEPIRIERGIFQGDSLSPLWFCLALNPLSTLLEESGFGFRLRRGGQVISHLLYMDDLKLFAPTALQLTGLLKVTETFSNSIRMEFGVDKCAVMHAKQGRLVESEGIQLSDSIQLRSLAATETYKYLGMSQGLGISETDMKQLLRDRFLGRLKKVLKSLLSGGNKVRAYNGWVMPVLMYSFGILKWTQTELDTLDRTVRTTLTAYRMHHPRSSVMRLYIPRKCGGRGFLNVKTLHNREICSLREYFLRADGEMHADVVAVDNGLTPLSLAKENWRKPVVLTTVDRRLVWQGKELHGRYYRALHGPDVDLAASVAWLRFGDLFGETEGFVCAIMDEVVMTNNYRKYILRDGTIDICRACHRPGESLRHIISGCSRLANGQYLHRHNQVARIIHQQLALKYRLVTSEVPYYRYEPQPVLEEGHISLYWDRSIITDRTIVANKPDIVLIDRQERRAMIVDITVPHDENLVKAEKDKESKYLDLAHEVVDMWDIDAAIIVPIVVSAHGLLAKSLDKHLKRLALGGWIKGQIQKAVLLETARIVRKFLSLEP

SEQ ID NO: 10570 - protein, 1205 aa, Ptilodon capucinus
MILLQVSYLIIIIINAQSTPPDQSPRSASPSPASIIRTSVTAVASSESDEYFSPPTSPPPVRRQRGRPPGHLGLLGQPAPNRVLVPSGVVRRMRWTSSMNENVMRAYYEATEGGTNLTAYRDRMLPLFQSLEPAVKVSAQRLSDQVRVIQRGNMLADTVLDRLRSEVQSRRVVPVASSQPAAQPVASATVTSRLAADSDVDRDNAPIDVSTQYNDLLRSTLEDVVREYRSMPNHLRPRIPRLPMHKGNRVLVGALDSLLSIYFDSSDDLADTHSILYCAAITVCRVARIKVFNTDTATRPKPAVPAWQCRIERRINEARALIGKLSCFREGNTRPRVMRFVKRAFTGTDVSPREYISRVTERIDFLKQKIYAWANRIRRYKARVDRYSQNSMFQRDQRWVYRSWERPNEPVSEFQRPDDNAMTTFWRDIWSVPVTHYEGDWIGDVERMCEPIKEMEAISIGPLDVANAVRSLPNWKAPGPDGLHNFWLKWLRSSHVRLASQFQSALQSGSLPEFITTGVTHLLHKTGSTTDPKNYRPITCLPTIYKTLTSILRAKIARHVEDNSIMSASQNGCRSGSRGTKELLLIDMTICQQARRNRRDLSTCWIDYKKAYDSVPHTWLVRVLELYKIDTTLRTFLESCMRQWKTVLLCPGSRQILGNGEPIRIERGIFQGDSLSPLWFCLALNPLSTLLEESGFGLRLRRGGQVISHLLYMDDLKLFAPTALQLSGLLKVTETFSNSIRMEFGVDKCAVMHAKQGRLVESEGIQLSDSIQLRSLAATETYKYLGMSQGLGISETDMKQLLRDRFLGRLKKVLKSLLSGGNKVRAYNGWVMPVLMYSFGILKWTQTELDTLDRTVRTTLTAYRMHHPRSSVMRLYIPRKCGGRGFLNVKTLHNREICSLREYFLRADGEMHVDVVAVDNGLTPLSLAKENWRKPVVLTTDDRRLVWQGKELHGRYYRALHGPDVDLAASVAWLRFGDLFGETEGFVCAIMDEVVMTNNYRKYILRDGTIDICRACHRPGESLRHIISGCSRLANGQYLHRHNQVARIIHQQLALKYRLVTSEVPYYRYEPQPVLEEGHISLYWDRSIITDRTIVANKPDIVLIDRQERRAMIVDITVPHDENLVKAEKDKESKYLDLAHEVVDMWDIDAAIIVPIVVSAHGLLAKSLDKHLKRLALGGWIKGQIQKAVLLETARIVRKFLSLEP

SEQ ID NO: 10571 - protein, 1212 aa, Ptilodon capucinus
MTDAPRRNPRRLCRQRTVNEPNAQSTPPDPSPRSASPSPASIIRTSVTAVASSESDEYFSPPTSPPPVRRQRGRPPGHLGLLGQPAPNRVLVPSGVVRRMRWTSSINENVMRAYYEATEGGTNLTAYRNRMLPLFQSLEPAVNVSAQRLSDQVRVIQRGNMLADTVLDRLRSEMQSRRVVPVASSQPAAQPVASATVTSRLAADSDVDRDNAPIYVSNQYNDLLRSTLEDVVRVYRSMPNHLRPRIPRLPMHKGNRAIVGALDSLLSIYFDSSDNLADTHSILYCAAITVCRVARVKVFNTDTATRPKPAVPAWQCRIERRISEARALIGKLSCFREGNTRPRVMRFVRRAFAGTDVSPREYISRVTERIDFLKQKIYAWANRIRRYKVRVDRYSQNSMFQRDQRWVYRSWERPNEPVSELQRPDDNAMTTFWRDIWSVPVTHYEGDWIGDVERMCEPIKEMEAISIGPLDVANAVRSLPNWKAPGPDGLHNFWLKWLRSSHVRLASQFQSALQSGSLPEFITTGVTHLLHKSGSTTDPKNYRPITCLPTIYKTLTSILRAKIARHVEDNSIMSASQNGCRSGSRGTKELLLIDMTICQQARRNRKDLSTCWIDYKKAYDSVPHTWLVRVLELYKIDTTLRTFLESCMRQWKTVLLCPGSRQILGNGEPIRIERGIFQGDSLSPLWFCLALNPLSTLLEESGFGFRLRRGGQVISHLLYMDDLKLFAPTALQLTGLLKVTETFSNSIRMEFGVDKCAVMHAKQGRLVESEGIQLSDSIQLRSLAATETYKYLGMSQGLGISETDMKQLLRDRFLGRLKKVLKSLLSGGNKVRAYNGWVMPVLMYSFGILKWTQTELDTLDRTVRTTLTAYRMHHPRSSVMRLYIPRKCGGRGFLNVKTLHNREICSLREYFLRADGEMHADVVAVDNGLTPLSLAKENWRKPVVLTTDDRRLVWQGKELHGRYYRALHGPDVDLAASVAWLRFGDLFGETEGFVCAIMDEVVMTNNYRKYILRDGTIDICRACHRPGESLRHIISGCSRLANGQYLHRHNQVARIIHQQLALKYRLVTSEVPYYRYEPQPVLEEGHISLYWDRSIITDRTIVANKPDIVLIDRQERRAMIVDITVPHDENLVKAEKDKESKYLDLAHEVVDMWDIDAAIIVPIVVSAHGLLAKSLDKHLKRLALGGWIKGQIQKAVLLETARIVRKFLSLEP

SEQ ID NO: 10572 - protein, 1100 aa, Agrochola circellaris
MRAYFGATEGGSNLTAYRGRMLSLFQVLEPAVNVSAQRLSDQVRVIQRNHMLDDAVLDRLRLESRNNRVTPASPLVAVQLQNSLSATPRPDHVGEEVDDGVISVSSQCNAQLRNALEDAFREYRSTPPGLRPRLPRLPMHKKNKALVCTLDSLLSNYFDGSKDLADTHSILYCAAVAACRVAHVKFPSSDRAPRPKPAVPAWQCRIERRIGEARVLIGKLICFREGNTRPRVMRFVKRAFSGTDTSSRDYLTRVTERIDFLKQKICAWANRIRRYRRRVERYTQNRTFQSDERWVYRAWERLDQGVIDTRLPDDDAMCSFWRSIWSAPVNHTEGDWTGKIERACERIPEMGAINISPQDVACAVRPLPNWKSPGPDGLHNFWIKWLQRSHARLASQFQSALESGSLPQFLTTGITHLLHKSGSTAEPKNYRPITCLPTVYKVFTSILRTKINKHIDTNSIMSVSQNGCKNGSRGTKELLLIDMAINQQVRRSRRDLSTCWIDYKKAYDSVPHTWLMRVLELYKVDATLRTFLISCMGQWRTVLRYPGCRQIQRISEPIRIERGIFQGDSLSPLWFCLALNPLSTLLEDSGLGYRLRRGGQVISHLLYMDDLKLFAPNNLQLVELLKVTETFSSAIRMEFGVDKCAVMHVKRGGIVESGGTQLPDSIHLRSLSSIETYKYLGMSEALGINTADMKQSLKERFFDRLNKVLNSLLSGGNKVRAFNGWVMPVLMYSFGILKWTQTELDALDRRVRTLLTVNRMHHPRSSVMRLYIPRKCGGRGFLNAKTLHNREVCSLREYFLEADVGMHRDVVSVDKGLTPLSLASENWRKPIVLDTNDRREVWQSKELHGRFYRALHGPDVDLLASVSWLRFGDLFGETEGFVFAIMDEVMMTNNYRKYIVKDGTVDICRACHRPGESIRHIISGCSRLANGDYLHRHNLVARIIHQQLALKYNLVESEVPYYKYVPDPVLENGNITLYWDRSIITDRTIVANKPDIVVIDRLERRTMIIDIAVPHDENLVKAEKDKQIKYLDLAREVVDMWDVDTAVIVPIVVTANGIIAKSLDQHLRRLSLGSWIKGLIQKAVLLDTARIVRRFLSQEP

SEQ ID NO: 10573 - protein, 1201 aa, Hydraecia micacea
MLTRSAAARRARLPPPDSSLSSASPPAPLVSSPTVSAVTAPAAAVASSSSDEYFSPPTTPPPARRRGGRRPPDSLGPRGPLASDRVPAPGGSVQRMRWTRSINENVMRSYYGATEGGSNLTAYRVRMLSLFQVLEPAVNVSAQRLSDQVRVIQRNHMLDDTVLDRLRNEIQSSHAIAPQSQTAVILPQSNTSHADEGSNDRATNVSTQCNEELSSALEDAIQEYRFMSPELRPRLPRLPMHNKNRALVAVLNSQLSKYFDDCEDLTDTHSILYCAAVAACRVAHVKFTNDSRATRPKPAVPAWQCRIERRIGGARALIGKLICFREGNTRPRVTRFVRRAFLGTDISPQDYTSCVTERIDFLKQKVYAWANRIRRYKRRVERYTQNRTFQSDERWVYRDWERPDQSVADTCLPDDDAMCSFWRSIWSVPVSHTEGDWARDVERACDPIPEMEAITICPQDVARAVRPLPNWKSPGPDGLHNFWIKWFSRSHARLASQFQTALESGSLPQFLTTGITHLLHKSGSTAEPKNYRPITCLPTVYKVLTSVLRAKINKHIDTNFIMSASQNGCRNGSRGTKELLLIDMTISQQVRRFRKDLSTCWIDYKKAYDSVPHTWLMRVLELYKVDTTLRTFLMSCMGQWRTVLRYPGCRNIQRNSEPIRIERGIFQGDSLSPLWFCLALNPLSTLLEDSGLGYRLRRGGQVISHLLYMDDLKLFAPNNLQLMELLKVTQTFSNAIRMEFGVDKCAVMHVKRGEIVESVGNQLSDSTNLRALSASETYKYLGMSEALGINVTDMKQSLKERFFGRLKKVLNSLLSGGNKVRAFNGWVMPVLMYSFGILKWTQTELDALDRRVRTLLTANRMHHPRSSVMRLYIPRKCGGRGFLNSKTLHNREICSLREYFLETDVGMHRDVVMVDKGLTPLSLAKENWRKPVVLDTNDRMEVWQSKELHGRFFRALHGPDVDLLASVAWLRFGDLFGETEGFVCAIMDEVMMTNNYRRFIVKDGTVDICRACHRPGESIRHIISGCSRLANGEYLHRHNLVARIIHQQLALKYSLVESEVPYYRYVPDPVLENGNITLYWDRSIITDRTIVANKPDIVVVDRSERRAMIVDITVPHDENLVKAEKDKQIKYLDLAREVVDMWDVDSAIIVPIVVTANGLIAKSLDQHLRRLSLASWIKGLIQKAVLLDTARIVRRFLSLEP

SEQ ID NO: 10574 - protein, 1206 aa, Amphipyra tragopoginis
MLTRSRAKAQNTRPPSSASSLSSASQPPEPASIVSDVTPAAAVASSSSDEYFSPATSPSPPPARRRGRGRPPTCLGPRGPPASDRVPAPGGSVQRMRWTQSMNENCMRAYFGATEGGTNLTAYRGRMLSLFQALEPAVNVSAQRLSDQVRVIQRDHRLDDAALDRLRSEMQNSHAAPLPSQIRTQTLVPPAVPLESNYADEEGEDRAISAGTQYSEIMRSALEDALREFRSTPPELRPRLPRLPMHNKNRALVCALDSLLPNVFESSEDLGDTQSILYCAAVAACRVAHVKFPNDNRATRPKSAVPAWQCRIERRIDEARVLIGKLTCFREGNRRPRVMRFVRRAFSGTDIGPGEYASRVTERIDFLKQKVYAWANRIRRYRRRVDRYTQNRIFQSDQRWVYRTWERPDQGVSDTHLPDNDVMNAFWRNIWSVPVTHTEGDWMQEVQRACEPIQEMGAVTIGPQDVTSAVRPMPNWKSPGPDGLHNFWIKWLRSSHTRLASQFQSSLESGSLPAFLTTGITHLLFKSGSTAEPKNYRPITCLPTVYKLLTSILRAKLNHHIDSNAIMCATQNGCKNGSRGTKELLLIDMAISQQVRRSRKDLSTCWIDYKKAYDSVPHTWLMRVMELYKVNATLRTFLMSCMGQWRTVLHYPGCRQIQGNGELIRIERGIFQGDSLSPLWFCLALNPLSTLLEGSGLGYRLRRGGQVISHLLYMDDLKLFAPNNLQLVELLKVTETFSNSIRMEFGVDKCAVMHVKRGRIMESVGTQLSDSIHLRSLSSTETYKYLGMSEALGINEADMKQSLRERFFGRLIKVLKSLLSGGNKVRAFNGWVMPVLMYSFGILRWTQTELDALDRRVRTLLTAYRMHHPRSSVMRLYIPRKCGGRGFLNAKTLHNREVCSLREYFSQADVGMHRDVVAVDKGLTPLSLAKENWRKPVVLDAKGRMEVWRSKELHGRFYRALHGPDVDFLASVAWLRFGDLFGETEGFVCAIMDEVMMTNNYRKYIVKDGTVDICRACHCPGESIRHIVSGCSRLANGEYLHRHNLVARIIHQQLALKYNLVDTEVPYYKYVPDPVLENGHVTLYWDRSIITDRTIVANKPDIVVIDRLERRTMIVDITVPHDENLVKAENDKKIKYLDLAHEVVDMWDVDSAVIVPIVVTANGLIAKSLDQHLMRLSLGSWIKGLIQKAVLLDTARIVRKFLSLDP

SEQ ID NO: 10575 - protein, 1205 aa, Amphipyra tragopoginis
MITRSQVRLQRTRPPSSASSLSSASQPPESSPTVSAVTPAAAVASSSSDEYFSPPTSPPPARRRGGRRPPDRLGLRGPLASDRVPAPGGSVTRMRWTKTINENAMRAYFGATEGGTNLTAYRSRMLSLFQVLEPTVNVSAQRLSDQVRAIQRGHMLDDTVLDRLRSEIQCGPVISSSPQAPGLISRNIPVTSPRLQQVVEEDDDRATVVSIQCNEQLRRALEDAMREYRSTRPEVRPRLPRLPMHRKNRALMCALDSLLSNYFDGSEDLGDTHSILYCAAVAACRVAHVKFINNERATRPKNAVPAWQCRIERRIAEARALIGKLVCFREGNTRPRVMRFVRRAFSGTDVSPREYMSRVTERIDFLKQKVYAWANRIRRYRRRVDRYNQNRMFRSDERWVYRTWERPDQGVDAAHLPDDDAMNSFWRSIWSVPVTHTEGDWMRDVERMCEPILDMGAITISPQDVAGAVRPLPNWKSPGPDGLHNFWLKWLRSSHARLASQFQSSLETGTLPQFLTTGVTHLLHKSGSTAEPKNYRPITCLPTVYKVLTSILRTKINSHIDNNSIMSASQNGCRNGSRGTKELLLIDMAISQQVRRSRKDLSTCWIDYKKAFDSVPHTWLMRVLELYKVNTTLRTFLTSCMGQWRTVLHYPGCRQIQGRGEPIRIERGIFQGDSLSPLWFCLALNPLSTLLEGSGLGYRLRRGGQVISHLLYMDDLKLFAPNNLQLMELLKVTETFSNSIRMEFGVDKCAVMHVKRGGIMESVGTQLSDSIHLRSLSSTETYKYLGMSEALGINVTDMKQSLRERFYGRLKKVLKSLLSGGNKVRAFNGWVMPVLMYSFGILKWTQTELDALDRRVRSLLTAYRMHHPRSSVMRLYIPRKCGGRGFLNAKTLHNREVCSLREYFSQTSVGMHQDVVAVDKGFTPLSLAKENWRKPVVLDTNGRREVWRSKELHGRFYRALHGPDVDFLASVAWLRFGDLFGETEGFVCAIMDEVMMTNNYRKYIVKDGTVDICRACHCPGESIRHIVSGCSRLANGEYLHRHNLVARIIHQQLALKYNLVDAEVPYYKYVPDPVLENGHVTLYWDRSIITDRTIVANKPDIVVIDRSERLTMIVDIAVPHDENLVKAEKDKEIKYQDLAHEVVDMWNVDSAVIVPIVVTANGLIAKSLDQHLKRLSLGGWIKGLIQKAVLLDTARIVRKFLSLRP

SEQ ID NO: 10576 - protein, 1203 aa, Amphipyra tragopoginis
MLTRARARQKDARPRSPDSSLCSASQPPESSPPVSAVTPAAAVASSSSDEYFSPPSSPPPVRRRGGARPPACLGPRSQPASNGVPAAGGNVSRMRWTQSINENVMRAYYGATDGGINLTAYRDRMLSLFQVLEPAINVSTQRLSDQVRVIQRNRRLDDTVLERLRSETQNNHTVTSPAQSAVQPQLPAVPPRPSHADGDGDGEVIEVSNQCSDELRSALEGAILEYRTTPPELRPRLPRLPMHKKNRALVCALDSLLSNYFDGSEDLADTHSILYCAAIAACRVAHVKFTESDRATRPKPVVPAWQCRIERRIGGARALIGKLICFREGNTRPRVMRFVRRAFSGTDINPRDYMSRITERIDFLKQKVYAWANRIRRYKRRVERYTRNRTFQSDQRRVFRTWERPDPSGSDVRLPDDEAMGSFWRSIWSVPIAHTEGDWMRDIERACEPIPEMGAIIISPQDVAGAARPLPNWKSPGPDGLHNFWLKWLRSSHACLASQFQSSLESGSLPQFLTTGATHLLYKSGSTAEPKNYRPITCLPTVYKLLTSILRVKISNHIDNNSILSPSQNGCRSGSRGTKELLLIDMTISQQVRRSRKDLSTCWIDYKKAYDSVPHTWLMRVLELYKINTTLRTFLMSCMRQWRTVLRYPGCREIRGRGEPIRIERGIFQGDSLSPLWFCLALNPLSTLLEGTRLGYRLRREGQVISHLLYMDDLKLFAPTDLRLMELLKVTENFSSSIRMEFGVDKCAVMHVKRGGIVESEGIQISNSIQLRSLSPTETYKYLGMSEALGISEADMRQSLRERFFGRLNKVLRSLLSGGNKVRAFNGWVMPVLMYSFGILKWTQTDLEALDRRVRALLTVHRMHHPRSSVMRLYIPRKCGGRGFLNAKTLHNREVCSLREYFLQAEGEMHRDVVAVDKGLTPLALAKENWRKPAVLSTNDREEVWQSKELHGRFYRALHGPDVDFPASVSWLRFGDLFGETEGFVCAIMDEVMMTNNYRKYIVKDGTVDICRACHRPGESIRHIISGCSRLANGEYLHRHNLVARIIHQQLALKYNLVESEVPYYRYVPDPVLENGHATLYWDRSIITDRTIVANKPDIVVIDRSERRTMIVDITVPHDENLVKAEKDKQIKYLDLAHEVVGMWDVDSAVVVPIVVTANGLIAKSLDQHLKRLSLGGWIKGLLQKAVLLDTARIVRRFLSLEP

SEQ ID NO: 10577 - protein, 1207 aa, Amphipyra tragopoginis
MLTRSRAKTLQRTHPTPSASSLSSASQPPEPASIVSDVTPAAAVASSSSDEYFSPATSPSPPPARRRGRGRPPTCLGPRGPPASDRVPAPGGSVQRMRWTQSMNENCMRAYFGATEGGTNLTAYRGRMLSLFQTLEPAVNVSAQRLSDQVRVIQRDHRLDDAALGRLRDEMQNSHATPPPSQIRTQPLVPPAVPLQPNHADEEEQDRAISAGTQYSEIMRSALEDALREFRSTPPELRPRLPRLPMHNKNRALVCALDSLLSNVLESSKDIGDTHSILYCAAVAAYRVAHVKFPNDNRATRPKSTVPAWQCRIERRIDEARVLIGKLTCFREGNIRPRVMRFVRRAFSGTDVSPGEYVSRVTERIDFLKQKVYAWANRIRRYRRRVDRYTQNRIFQSDQRWVYRTWERPDQGVSDTHLPDNDVMNAFWRNIWSVPVTHTEGDWMQEVQRACEPIQEMGAVTIGPQDVTSAVRPMPNWKSPGPDGLHNFWIKWLRSSHARLASQFQSSLESGSLPSFLTTGVTHLLFKSGSTAEPKNYRPITCLPTVYKLLTSILRAKINNHIDNNAIMSDSQNGCRNGSRGTKELLLIDMAISQQVRRSRKDLSTCWIDYKKAYDSVPHTWLMRVLELYKINATLRTFLMSCMGQWRTVLHYPGCRQIQGNGELIRIERGIFQGDSLSPLWFCLALNPLSTLLEGSGLGYRLRRGGQVISHLLYMDDLKLFAPNNLQLVELLKVTETFSNSIRMEFGVDKCAVMHVKRGRIMESVGTQLSDAIHLRSLSSTETYKYLGMSEALGINEADMKQSLKERFFGRLIKVLKSLLSGGNKVRAFNGWVMPVLMYSFGILRWTQTELDALDRRVRTLLTAYRMHHPRSSVMRLYIPRKCGGRGFLNAKTLHNREVCSLREYFSQADVGMHRDVVAVDKGLTPLSLAKENWRKPVVLDTNGRREVWRSKELHGRFYRALHGPDVDFLASVAWLRFGDLFGETEGFVCAIMDEVMMTNNYRKYIVKDSTVDICRACHCPGESIRHIVSGCSRLANGEYLHRHNLVARIIHQQLALKYNLVDTEVPYYKYVPDPVLENGHVTLYWDRSIITDRTIVANKPDIVVIDRLERRTVIVDIAVPHDENLVKAENDKKIKYLDLAHEVVDMWDVDSAVIVPIVVTANGLIAKSLDQHLMRLSLGSWIKGLIQKAVLLDTARIVRKFLSLEP

SEQ ID NO: 10578 - protein, 1099 aa, Amphipyra tragopoginis
MRAYYGATEGGINLTAYRDRMLSLFQVLEPAINVSTQRLSDQVRVIQRNRRLDDAVLERHRSEEQNNRAVTPPVQAAEQPQLLAVAPRPIHVDGESDGAVINVSSQCSDELRSALEGAILEYRATPPELKPRLPRLPMHKKNRALVCALDSLLSNYFDGSEDPGDTHSILYCAAIAACRVAHVKLTQNERATRPKPAVPAWQCRIERRIDGARALIGKLICFREGNTRPRVMRFVRRAFSGTDISPRDYMSRVTERIDFLKQKVYAWANRIRRYKRRVERYTRNRTFQSDQRRVYRTWERPVPGVSDMRLPDDDAMSSFWRSIWSVPVAHTEGDWMRDIERACETIPEMGEIVISPQDVATAARPLPNWKSPGPDGLHNFWIKWLRSSHACLASQFQSSLESGSLPQFLTTGVTHLLYKSGSTAEPKNYRPITCLPTVYKLFTSILRVKISNHIDNNYILSPSQNGCRSGSRGTKELLLIDMAISQQVRRSRKDLSTCWIDYKKAYDSVPHTWLMRVMELYKINTTLCTLLMSCMRQWRTVLRYPGCREILGRGEPIRIERGIFQGDSLSPLWFCLALNPISTLLEGTRLGYRLRREGQVISHLLYMDDLKLFAPTDLQLMELLKVTENFSNSIRMEFGVDKCAVMHVKRGGIVESEGIQLSNSIQLRSLSPTETYKYLGMSEALGISEADMRQSLRERFFGRLNKVLKSLLSGGNKVRAFNGWVMPVLMYSFGILKWTQTDLDALDRRVRALLTVHRMHHPRSSVMRLYIPRKCGGRGFLNAKTLHNREVYSLREYFLQAEGEMHRDVVAVDRGLTPLALAKENWRKPVVLSTNDREEVWQSKELHGRFYRALHGPDVDFLASVSWLRFGDLFGETEGFVCAIMDEVMMTNNYRKYIVKDGTVDICRACHRPGESIRHIVSGCSRLANGEYLHRHNLVARIIHQQLALKYNLVESEVPYYRYVPDPVLENGHATLYWDRSIITDRTIIANKPDIVVIDRSERRTMIVDITVPHDENLVKAEKDKQLKYLDLAHEVVAMWDVDSAVIVPIVVTANGLIAKSLDQHLKRLSLDGWIKGLIQKAVLLDTARIVRRFLSLEP

SEQ ID NO: 10579 - protein, 1111 aa, Amphipyra tragopoginis
MRWTQSMNENCMRAYFGATEGGTNLTAYRGRMLSLFQALEPAVNVSAQRLSDQVRVIQRGHMLDDTVLDRLRSEVQSSPVISPSSQVLAQQQNLAAAFPRPNHAGEEDDDRATNVSTQYNEELRSALEDAMREYRYTRSDLRPRIPRLPMNRKNRALVCALDSLLSNYFDGSEDLGVTHSILYCAAVAACRVAHVKFIDNERATRPKNAVPAWQCRIERRIAEARALIGKLICFREGNIRPRMMRFVRRAFSGTDVSPREYMSRVTERIDFLKQKVCAWANRIRRYRRRVDRYTQNRLFQSDERWVYRTWERPDQRVSDTHLPDNDVMNAFWRNIWSVPVTHTEGDWMQEVQRACEPIQEMGDIIISPQDVASAVRPMSNWKSPGPDGLHNFWLKWLRSSHARLASQFQSSLESGSLPQFLTTGVTHLLHKSGSTAEPKNYRPITCLPTVYKVLTSILRAKINNHIDNNSIMSASQNGCRNGSRGTKELLLIDMAISQQVRRSRKDLSTCWIDYKKAYDSVPHTWLMRVLELYKVNTTLCAFLTSCMGQWRTVLHYPGCRQIQRMGEPIRIERGIFQGDSLSPLWFCLALNPLSTLLEGSGLGYRLRRGGQVISHLLYMDDLKLFAPNNLQLLELLKVTETFSNSIRMEFGVDKCAVMHVKRGRIMESVGTQLSDSIHLRSLSSTETYKYLGMSEALGVNETGMKQSLKERFFGRLKKVFNSLLSGGNKVRAFNGWVMPVLMYSFGILKWTQTELDALDRRVRSLLTANRMHHPRSSVMRLYIPRKCGGRGFLNAKTLHNREVCSLREYFSQAGVGMHRDVVAVDKGFTPLSLAKENWRKPVVLDTNDRREVWRSKELHGRFYRALHGPDVDFLASVAWLRFGDLFGETEGFVCAIMDEVMMTNNYRKYIVKDGTVDICRACHCPGESIRHIVSGCSRLANGEYLHRHNLVARIIHQQLALKYNLVDSEVPYYKYVPDPVLENGHVTLYWDRSIITDRTIVANKPDIVVIDRSERLTMIVDITVPHDENLVKAEKDKEIKYQDLAHEVVAMWDVDSAIIVPIVVTANGLIAKSLDQHLKRLSLGSWIKGLIQKAVLLDTARIVRKFLSLRP

SEQ ID NO: 10580 - protein, 1111 aa, Noctua pronuba
MRWTQSINENVMRAYYGATEGGSNLTAYRGRMLSLFQVLEPGVSVSAQRLSDQVRVIQRNHMLDDTVLDRLRFDSRSNLVTPASPMIAVQLQNVSSAPPRSDRDGEEDDDEVISVSTQCNAQLRSALEGAFREYRSIPPELRPRLPRLPMHKKNKALVCALDSQLSTCFDSSKDLADTHSILYCGAVAACLVAHVKFPNNDRATRPKLAVPAWQSRIERRIGEARALIGKLICFREGNTRPRVMRFVRRAFSGTGISFRDYLARVTERIDFLKQKICAWANRIRRYKRRVERYTQNRTFQSDERWVYRAWERPDQGVTDTRLPDDDAMCLFWRSIWSVPVSHTEGDWTREVEQACDPIPEMGAIFISPQDVACAVRPLPNWKSPGPDGLHNFWIKWFQRSHARLASQFQSALESGSLPQFLTTGITHLLHKSGSTAEPKNYRPITCLPTVYKVLTSILRAKINHHIDSNSIMSASQNGCRNGSRGTKELLLIDMAISQQVRRSRRDLSTCWIDYKKAYDSVPHTWLMRVLELYKVDATLRTFLKSCMGHWRTVLRYPGCRQIQGNSEPIRIERGIFQGDSLSPLWFCLALNPLSTLLEGSGLGYRLRRDGQVISHLLYMDDLKLFAPNNLQLMKLLKVTETFSSAIRMEFGVDKCAVMHVKRGEIMESVGTQLSDSIHLRSLSSTETYKYLGMSEALGINTADMKQSLRERFFGRLNKVLGSLLSGGNKVRAFNGWVMPVLMYSFGILKWTQTELDALDRRVRALLTANRMHHPRSSVMRLYIPRKCGGRGFLNAKTLHNREVCSLREYFLEADVGMHRDVVSVDKGLTPLSLANENWRKPRVLDTNDRKEVWQGKELHGRFYRALHGPDVDFLASVSWLRFGDLFGETEGFVCAIMDEVMMTNNYRKYIVKDGTVDICRACHRPGESIRHIISGCSRLANGEYLHRHNLVARIIHQQLALKYNLVESEVPYYKYAPDPVLDDGNITLYWDRSIITDRTIVANKPDIVVIDRLERRAMIVDITVPHDENLVKAEKDKQFKYLDLAREVVDMWDVSTAVIVPIVVSANGLIAKSLDQHLRRLSLGSWIKRLIQKAVLLDTARIVRRFLSQEP

SEQ ID NO: 10581 - protein, 868 aa, Noctua pronuba
MRFVRRAFSGTDISPRDYMSRVTERIDFLKQKVYAWANRIRRYKRRVDRYTQNRTFQRDERWVYRAWERPDQGVADTRLPDDDAMCSFWRSIWSVPVSHTEDEWTREVERACDPVQEMGAITISPQDVVCAVRPLPNWKSPGPDGLHNFWIKWFTRSHARLATLFQSALESGSLPEFLTTGITHLLHKSGSTAEPKNYRPITCLPTVYKVLTSILRTKISKHINDNSIMSPSQNGCRNGSRGTKELLLIDMAISQQVRRFRRDLSTCWIDYKKAYDSVPHTWLMRVLELYKVDTTLRTFLMSCMGQWRTVLRYPGCRQIQRDSEPIRIERGIFQGDSLSPLWFCLALNPLSTLLEDSGLGYRLRRGGQVISHLLYMDDLKLFAPNDLQLMELLKVTETFSSAIRMEFGVDKCAVMHVKRGEIVESVRTQLSDSINLRSLSATETYKYLGMSEALGINVADMKQSLKECFFGRLKKVFNSLLSGGNKVRAFNGWVMPVLMYSFGILKWTQTELDALDRRVRTLLTAYRMHHPRSSVMRLYIPRRCGGRGFLNAKTLHNREICSLREYFLETDVGMHRDVVAVDKGLTPLSLAKENWRKPVVLDTNDRREVWQSKELHGRFFRALHGPDVDLSASVAWLRSGDLFGETEGFVCAIMDEVMMTNNYRRFIVKDGTVDICRACHRPGESIRHIISGCSRLANGEYLHRHNLVARIIHQQLALKYNLVESEVPYYKYVPDPVLENGCVTLYWDRSIITDRTIVANKPDIVVVDRSERRAMIVDITVPHDENLVKAEKDKQIKYLDLAHEVVDLWDVDSAIIVPIVVSAHGLIAKSFDQHLRRLSLGSWIKGLIQKAVLLDTARIVRRFLSLEP

SEQ ID NO: 10582 - protein, 1107 aa, Tinea trinotella
MRWTQSINENVMRSYFGATEGGSSLTAYRGRMLTLFQVLEPAVNVSAQRLSDQVRVIQRNRMLDDVVLDRLRLESRSSHVSPVSPPVAVQLQPSALPRPNNIEENDDDVTISVSNQYNEQLRSALEDAFREYRSTPPGLRPRIPRLPMHKKNRALVCALDSQLVNHFKSSKDLADTHSILYCAAVAVCRVAHVKFPNNDRAARLAVPAWQCRIERRIGEARALIGKLISFREGNTRPRVMRFVRRAFSGTDISSRDYQTRVTERIDFLKQKIYAWANRIRRYKRRVERYTQNRTFQSNERWVYRAWERPDQDVSDMCLPDDDAMSLFWRNIWSVPVGHTEGEWTREVERACDFIPEMGAIIISPQDVACAVRPLSNWKSPGLDGLHNFWIKCFQRSHARLAAQFQSALELGSLPQFLTTGITHLLHKSGSTAEPKNYRPITCLPTVYKVLTSILRAKIDKHIDTNCIMSASQNGCRSGSRGTKELLLIDVAISQQVRRSRRDLSTCWIDYKKAYDSVPQTWLMRVLELYKVDAALRTFLVSCMGQWRTVLHYPGCRRILGNGEPIKIERGIFQGDSLSPLWFCLALNPLSTLLDGSGQGYRLRRDGQVISHLLYMDDLKLFAPNNLQLMKLLKVTETFSSAISMEFGVDKCAIMHVKRGEIMESVGTQLSDSIHLRSLCSTETYKYLGMSEALGINAVDVKQSLRDRFFGRLNKVLNSLLSGGNKVRAFNGWVMPVLLYSFGILKWTQTELDALDRRVRTLLTANRMHHPRSSVMRLYIPRKCGGRGFLNAKTLHNREVCSLREYFLKTDVGMHRDVVAVDKGLTSLLLANENWRKPVVLDANDRREVWQSKELHGRFYRALHGPDVDFLASVSWLRFGDLFGETEGFVCAIMDEVMMTNNYRKYIVKDGTVDICRACHRPGESIRHIISGCSRLANGDYLHRHNLVARIIHQQLALKYNLVESEVPYYRYVHDPVLENGNITLYWDRSIITDRTIVANKPDIVVIDRLERRTIIVDVAVPHDENLVKAEKDKQIKYLDLAREVVDMWEVDTAIIVPIVVTANGLIAKSLDEHLKRLSLGSWIKRLIQKAVLLDTARIVRRFLSQEP

SEQ ID NO: 10583 - protein, 1200 aa, Tinea trinotella
MLTRSRARNQSAQLTSSGSSLSSASQPPGSTPTVSQVISVAAVASSSSDECFSPPTTPPSARRRGGGRPPASLEPRGPSASGGVPATSGRVQRMRWTQSINENVMRSYFGATEGGSSLTAYRGRMLTLFRVLEPAVNVSAQRLSDQVRVIQRNRMLDDVVLDRLRLESRSSHVSPVSPPVAVQLQPSALPRPNNIEENDDDVTISVSNQYNEQLRSALEDAFREYRSTPPGLRPRIPRLPMHKKNRALVCALDSQLVNHFKSSKDLADTHSILYCAAVAVCRVAHVKFPNNDRAARLAVPAWQCRIERRIGEARALIGKLISFREGNTRPRVMRFVRRAFSGTDISSRDYQTRVTERIDFLKQKIYAWANRIRRYKRRVERYTQNRTFQSNERWVYRAWERPDQDVSDMCLPDDDAMSLFWRNIWSVPVGHTEGEWTREVERACDFIPEMGAIIISPQDVACAVRPLSNWKSPGLDGLHNFWIKCFQRSHARLAAQFQSALELGSLPQFLTTGITHLLHKSGSTAEPKNYRPITCLPTVYKVLTSILRAKIDKHIDTNCIMSASQNGCRSGSRGTKELLLIDVAISQQVRRSRRDLSTCWIDYKKAYDSVPHTWLMRVLELYKVDAALRTFLVSCMGQWRTVLHYPGCRRILGNGEPIKIERGIFQGDSLSPLWFCLALNPLSTLLDGSGQGYRLRRDGQVISHLLYMDDLKLFAPNNLQLMKLLKVTETFSSAISMEFGVDKCAIMHVKRGEIMESVGTQLSDSIHLRSLCSTETYKYLGMSEALGINAVDVKQSLRDRFFGRLNKVLNSLLSGGNKVRAFNGWVMPVLMYSFGILKWTQTELDALDRRVRTLLTANRMHHPRSSVMRLYIPRKCGGRGFLNAKTLHNREVCSLREYFLKTDVGMHRDVVAVDKGLTSLSLANENWRKPVVLDANDRREVWQSKELHGRFYRALHGPDVDFLASVSWLRFGDLFGETEGFVCAIMDEVMMTNNYRKYIVKDGTVDICRACHRPGESIRHIISGCSRLANGDYLHRHNLVARIIHQQLALKYNLVESEVPYYRYVPDPVLENGNITLYWDRSIITDRTIVANKPDIVVIDRLERRTIIVDVAVPHDENLVKAEKDKQIKYLDLAREVVDMWEVDTAIIVPIVVTANGLIAKSLDEHLKRLSLGSWIKRLIQKAVLLDTARIVRRFLSQEP

SEQ ID NO: 10584 - protein, 1200 aa, Tinea trinotella
MLTRSRALHQSAQLISSGSSLSSASQPPGSTPTVSQVISVAAVASSSSDECFSPPMTPPSARRRGGGRPPASLEPRGPSASGGVPATSGRVQRMRWTQSINENVMRSYFGATEGGISLTAYRGRMLTLFQVLEPAVNVSAQRLSDQVRVIQRNRMLDDVVLDRLRLESRSSHVSAVSPPVAVQLQPSALPRPNNIEENDDDVTISVSNQYNEQLRSALEDAFREYRSTPPGLRPQIPRLPMHKKNRALVCALDSQLANYFESSKDLADTHSILYCAAVAVCRVAHVKFPNNDRAARLAVPAWQCRIERRIGEARALIGKLISFREGNTRPRVMRFVRRAFSGTDISSRDYQTRVTERIDFLKQKIYAWANRIRRYKRRVERYTQNRTFQSNERWVYRAWERPDQDVSDTCIPDDDAMSLFWRNIWSVPVGHTEGEWTREVERACDLIPEMGAINISPQDVACAVRPLPNWKSPGLDGLHNFWLKCFQRSHARLAAQFQSALELGSLPQFLTTGITHLLHKSGSTAEPKNYRPITCLPTVYKVLTSILRAKINKHIDTNCIMSASQNGCRSGSRGTKELLLIDIAISQQVRRSRRDLSTCWIDYKKAYDSVPHTWLMRVLELYKVDAALRTFLVSCMGQWRTVLHYPGCRRILGNGEPIKIKRGIFQGDSLSPLWFCLALNPLSTLLDGSGQGYRLRRDGQVISHLLYMDDLKLFAPNNLQLMKLLKVTETFSSAISMEFGADKCATMHVKRGEIMESVGIQLSDSIHLRSLCSTETYKYLGMSEALGINAVDVKQSLKDRFFGRLNKVLNSLLSGGNKVRAFNGWVMPVLMYSFGILKWTQTELDALDRRVRTLLTANRMHHPRSSVMRLYIPRKCGGRGFLNAKTLHNREVCSLREYFLKTDVGMHRDVVAVDKGLTSLSLANENWRKPVVLDINDRREVWQSKELHGRFFRALHGPDVDFLASVSWLRFGDLFGETEGFVCAIMDEVMMTNNYRKYIVKDGTVDICRACHRPGESIRHIISGCSRLANGDYLHRHNLVARIIHQQLALKYNLVESEVPYYRYVPDPVLENGNITLYWDRSIITDRTIVANKPDIVVIDRLERRTIIVDVAVPHDENLVKAEKDKQIKYLDLAREVVDMWEVDAAIIVPIVVTANGLIAKSLDKHLKRLSLGSWIKRLIQKAVLLDTARIVRRFLAQEP

SEQ ID NO: 10585 - protein, 1198 aa, Spilosoma lubricipeda
MLTRARSRALLPSSDSSLRSALPSSDARTEVPTVAEASSSSSSDEFFSPPTSPTPVRRQGRDRPPTSLGPRGPLTSNRAPAAGGDVRRMKWTQSINENVMRAYFRATELGTNLTAYRVRLVSLFQELEPAVNVSAQRLSDQVRAIQRCHLLDDVVLERIRSDVRGTLTVPSSSHSVDLVATTPQLPHNEYVDEQVESEVMTVSTQCNDRIRRALEDAIQEYRHVDYKNRPRLPRLPIHKRNLALVSALNSLLPDYFGNSEDLSDTHSILYCAAIAVCRVAGVKFVEQITTTRPKNEVPAWQCRIERRITETRTLIGKLITFQSGNTRPRVMRFVKQAFLGTTISPQQYMSSVTERIDFLKQKVYAWANRIRRYRKRVDRFIQNRMFQRNEKWVYRKWEEPSPRVGEGRFPDENVTNTFWRNIWSVPVTHTEGDWYRDVERSCESITSMEPITISKDDIGCAVRSLPNWKSPGPDGLHNFWLKWFRSSHACLASQYQAAVDSGSLPQFLTTGITHLLYKSGSAMDPKNFRPITCLPTMYKLLTSILRLKISTHINNNLIMSVSQNGCRSGSRGTKELLIIDMTISQQVRRNRKSLATCWIDYKKAYDSVPHTWLLRVLELYKIDTTLCTFLKSCMGQWRKVLRYPGCRQTAVNDVLINIERGIFQGDSLSPLWFCLALNPLSALLEDSRLGYRLQKDDQVISHLFYMDDLKLLAPTKLQLTALLKVTENFSNSIKMEFGVDKCAVMYVKKGVIVESEGTELSDSTRLRSLSATETYKYLGFSQSLGIPEPDMKQSLRERFFGRLKKVLKSLLSGGNKVRAYNGWVMPVLMYSFGILRWTQTELDALDRRVRTLLTAFRMHHPRSSVMRLYIPRKFGGRGLLNAKTLHNREIYNLREYFLHTDVGVHRSVVTVDTGLTPLALAKENWRKPVVLSTNDRREVWKGKELHGRFYRALNGPDIDFKASTSWLRYGDLFGESEGFVCAIMDEVIMTNNYRKYILKDGTVDICRACHRPGESIRHIISGCSRLANGEYLHRHNQVARIVHQQLALKYHLVSSEVPYYRYVPDPVLENGRATLYWDRSIITDRTIVANKPDIVVIDRLERRAMIVDIAVPHDENLVKVEKEKQIKYLDLSHEIVDMWNVDSAIIVPIVVSAHGLIAKSLDQHLKRLTLEGWIKGLMQKAVLLDTARIVRRFLSLEP

SEQ ID NO: 10586 - protein, 1196 aa, Spilosoma lubricipeda
MLTRARARALLPSSDSSLRSALPSSDARTEVPTVAEASSSSSSDEFFSPPTSPTPVRRQGRDRPPTSLGSRGPLTSNRAPAAGGDVRRMKWTQSINENVMRAYFRATELGTNLTAYRVRLVSLFQELEPAVNVSAQRLSDQVRAIQRCHLLDDTVLERICSDIRNSLTVPSSPHVVDVVTNSTPQNEDVSELVDSEIISVSTLYSDKIRSTLEDVIREYRYVNFNNRPRLPRLPIHKRNLALVSALDSLLPDYFGNSEDLSDTHSILYCAAIAVCRVAGIKFAENITTTRPENTVPAWQCRIERRIAGARTLIGKLISFRSGNTRPKVMRFVKQAFLGTTISPQQYMSCVTERIDFLKQKVYAWANRIRRYRKRIDRYNQNRMFQRNEKWVYRKWENLSPCISDGQVPDENATNSFWRSIWSVPVAHTEGDWYRDVERSCESLLPMELINIDKEDVSCAVRSLPNWKAPGPDGLHNFWLKWFRSSHACLASQFQTALDSGSLPQFLTTGITHLLYKSGSAMDPKNFRPITCLPTLYKLLTSILRLKITTHINQNSILSVSQNGCRSGTRGTKELLIIDMTISQQVRRNRKNLATCWIDYKKAYDSVPHTWLLKVLELYKIDTTLCTFLKSCMGQWRTVLRYPGCRQTAVNDVPIKIERGIFQGDSLSPLWFCLALNPLSTLLESSGLGYRLQKDAALISHLFYMDDLKLFAPTKLQLTALLRVTENFSNSIKMEFCVDKCAVMHVKKGVIVESEGIELSDSTKLRFLSATETYKYLGFSQSLGIPEPDMKQSLRERFFGRLKKVLKSLLSGGNKVRAYNGWVMPVLMYSFGILRWTQTELDAIDRRVRTLLTAFRMHHPRSSVMRLYIPRKLGGRGLLNAKTLHNREIYNLREYFLHTDVGVHRSVVTVDTGLTPLALAKENWRKPVVLSTNDRREVWKGKELHGRFYRALNGPDIDFKASASWLRYGDLFGETEGFVCAIMDEVIMTNNYRKYILKDGTVDICRACHRPGESIRHIISGCSRLANGEYLHRHNQVARIVHQQLALKYHLVSSEVPYYRYVPDPVLENGRATLYWDRSIITDRTIVANKPDIVVIDRLERRAMIVDIAVPHDENLVKVEKEKQIKYLDLSHEIVDMWNVDSAIIVPIVVSAHGLIAKSLDQHLKRLTLEGWIKGLMQKAVLLDTARIVRRFLSLEP

SEQ ID NO: 10587 - protein, 1196 aa, Spilosoma lubricipeda
MLTRARSRALLPSSDSSLRSALPSSDARTEVPTVAEASSSSSSDEFFSPPTSPIPVRRQGRDRPPTSLGSRGPLTSNRAPATGGDVRRMKWTQSINENVMRAYFRATELGTNLTAYRVRLVSLFQELEPAVNVSAQRLSDQVRAIQRCHLLDDTVLERICSDIRNSLTVPSSPHVVDVVTNSTPQNEDVSELVDSEIISVSTLYNDKIRSTLEDVIREYRCVNFNNRPRLPRLPIHKRNLALVSALDSLLPDYFGNSEDLSDTHSILYCAAIAVCRVAGIKFAENITTTRPENTVPAWQCRIERRIAGARTLIGKLISFRSGNTRPKVMRFVKQAFLGTTISPQQYMSCVTERIDFLKQKVYAWANRIRRYRKRIDRYNQNRMFQRNEKWVYRKWENLSPCMSDGQVPDENATNSFWRSIWSVPVAHTEGDWYRDVERSCESLLPMELINIDKEDVSCAVRSLPNWKAPGPDGLHNFWLKWFRSSHACLASQFQTALDSGSLPQFLTTGITHLLYKSGSAMDPKNFRPITCLPTLYKLLTSILRLKITTHINQNSILSVSQNGCRSGTRGTKELLIIDMTISQQVRRNRKSLATCWIDYKKAFDSVPHTWLLKVLELYKIDTTLCTFLKSCMRQWRTVLRYPGCRQTAVNDVPIKIERGIFQGDSLSPLWFCLALNPLSTLLEGSGLGYRLQKEAPVISHLFYMDDLKLFAPTKLQLTALLRVTENFSNSIKMEFGIDKCAVMHVKKGVIVESEGIELSDSTRLRSLSATETYKYLGFSQSLGIPESDMKQSLRERFIGRLKKVLKSLLSGGNRVRAYNGWVMPVLMYSFGILRWTQTELDALDRRVRTLLTAFRMHHPRSSVMRLYIPRKFGGRGLLNVKTLHNREIYNLREYFLHTDVGVHRSVVAMDTGLTPLALAKENWRKPVVLGTNERREVWKGKELHGRFYRALHGPDIDFKASTSWLRYGDLFGETEGFVCAIMDEVIMTNNYRKYILKDGTVDICRACHRPGESIRHIISGCSRLANGEYLHRHNQVARIVHQQLALKYKLVNSEVPYYRYVPDPVLENGRATLYWDRSIITDRTIVANKPDIVVIDRSERRAMIVDIAVPHDENLVKVEKEKQIKYLDLSHEIVDMWDVDSVIIVPIVVSVHGLIAKSLDQHLKRLTLDGWIKGLMQKAVLLDTARIVRRFLSLEP

SEQ ID NO: 10588 - protein, 1198 aa, Ochropleura plecta
MLTRAAQARNARHPPPGSSLSSASPPPEPSLVVSAVTPAVAVASSSSDEYFSPPTTPPPVRRRGRHRPPDGLGPRGPPASDRVPAPGGSVQRMRWTQSINENVMRSYYGATEGGNNLTAYRVRMLSLFQVLEPAVNVSAQRLSDQVRVIQRNRMLDDTVLDRLRTEMQSSQVITSSSQAVVPPQPHQLINRVNEVSNDVATNVSTQCSEEMRSTLEGAIREYRYMSPELRPRLPRLPMHNKNRALVAALDSQLSSYFDNCENLTDAHSILYCAAVTVCRVAHVKFPDDRATRPKPAIPFWQCRIERRIGAARALIGKLTCFREGNTRPRVMRFVRRAFAGTDISPPDYISRIAERIDFLKQKVYAWANRIRRYKRRVERYTQNRTFQSDERWVYRAWERPDQGVSDTHLPDDNAMCLFWRSIWSVPVSHTEGEWTREVERACDPIPEMGALTISPQDVACAVRPLPNWKSPGPDGLHNFWIKWIQRSHVRLAALFQTALESGSLPKFLTTGITHLLHKSGSTAEPKNYRPITCLPTLYKVLTSILRAKITKHIDDNSIMSASQNGCRNGSRGTKELLLIDMAISQQVRRSRRHLSTCWIDYKKAYDSVPHTWLMRVLELYKIDATLRTFLISCMRQWSTVLRYPGCRQIQRNSEPIRIERGIFQGDSLSPLWFCLALNPLSTLLENSGLGYRLRRGGQVISHLLYMDDLKLFAPNDLQLMELLKVTETFSSSIRMEFGVDKCAVMHVKRGEIVESVGTQLSDSINLRSLSATETYKYLGMSEALGINVADMKQSLKERFFGRLRKVFNSLLSGGNKVRAFNGWVMPVLMYSFGILKWTQTELDALDRKVRTLLTTFRMHHPRSSVMRLYIPRSCGGRGFLNAKTLHNREICSLREYFLETDVGMHRDVVAVDKGFTPLSLAKENWRKPVVLDTNDRREVWQSKELHGRFFRALHGPDVDQPASVAWLRSGDLFGETEGFVCAIMDEVMMTNNYRRFIVKDGTVDICRACHRPGESIRHIISGCSRLANGEYLHRHNLVARIIHQQLALKYSLVESEVPYYRYEPDPVLEHGNITLYWDRSIITDRTIVANKPDIVVVDRSERRAMIVDITVPHDENLVKAEKDKQIKYIDLAREVVDMWDVDSAIIVPIVVSANGLIAKSLDQHLRRLSLGSWIKGLIQKAVLLDTARIVRRFLSLEP

SEQ ID NO: 10589 - protein, 868 aa, Ochropleura plecta
MRFVRRAFAGTDISPPDYMSRITERIDFLKQKVYAWANRIRRYKRRVERYTLNRTFQSDERWVYRAWERPDQGVSDTHLPDDDAMCLFWRSIWSVPVSHTEGEWTREVERACDPIPEMGALTISPQDVACAIRPLPNWKSPGPDGLHNFWIKSIQRSHTCLATLFQTALESGSLPKFLTTGITHLLHKSGSTAEPKNYRPITCLPTLYKVLTSILRAKITKHIDDNSIMSASQNGCRNGSRGTKELLLIDMAISQQVRRSRRHLSTCWIDYKKAYDSVPHTWLMRVLEMYKVDATLRTFLISCMRQWSTVLRYPGCRQIQKNSEPIRIEQGIFQGDSLSPLWFCLALNPLSTLLENSGLGYRLRRGGQVISHLLYMDDLKLFAPNDLQLMELLKVTETFSSAIRMEFGVDKCAVMHVKRGEIMESVGTQLSDSTNLRSLSATETYKYLGMSEALGINVADMKQSLKERFFGRLRKVFNSLLSGGNKVRAFNGWVMPVLMYSFGILKWTQTELDALDRKVRTLLTAFRMHHPRSSVMRLYIPRSCGGRGFLNAKTLHNREICSLREYFLETDVGMHRDVVAVDKGLTPLSLAKENWHKPVVLDTNDRKEVWQSKELHGRFFRALHGPDVDQSASVAWLRSGDLFGETEGFVCAIMDEVMMTNNYRRFIVKDGTVDICRACHRPGESIRHIISGCSRLANGEYLHRHNLVARIIHQQLALKYNLVESEVPYYRYEPDPVLEHGNITLYWDRSIITDRTIVANKHDIVVVDRSERRAMIVDITVPHDENLVKAEKDKQIKYIDLAREVVDMWDVDSAIIVPIVVSANGLIAKSLDQHLRRLSLGSWIKGLIQKAVLLDTARIVRRFLSLEP

SEQ ID NO: 10590 - protein, 1198 aa, Ochropleura plecta
MITRLAARQHARLPPPDSPLSSASPPPEPSLIVSAVTPAVAVASSSSDEYFSPPTTPLPACRRGGRRPPDGLGLRGPPASDRVPAPGGSVQRMRWTSSINENVMRSYYGATEGGNNLTAYRVRMLSLFQVLEPAVNVSAQRLSDQVRVIQRNRMLDDTVLDRLRTEMQSSQVITSSSQAVVPPQSHQLVSHADEVSKDMATNVSTQCNEEMRIALEGAIREYRYISPELRPRLPRLPMHNKNRALVAVLDSQLSNYFDNCENLTDAHSILYCAAVAACRVAHVKFPDDGATRPKPAVPFWQCRIERRIGVARALIGKLICFREGNTRPRVMRFVRRAFAGTDISPPDYMSHITERIDFLKQKVYAWANRIRRYKRRVERYTLNRTFQSDERWVYRAWERPDQGVSDTHLPDDDAMCLFWRNIWSVPVSHTEGEWTREVERACDPIPEMGALTISPQDVACAVRPLPNWKSPGPDGLHNFWLKWIQRSHARLATLFQTALESGSLPKFLTTGITHLLHKSGSTTEPKNYRPITCLPTIYKVLTSILRAKITKHIDDNSIMSASQNGCRNGSRGTKELLLIDMAISQQVRRSRRHLSTCWIDYKKAYDSVPHTWLMRVLELYKVDATLRTFLSSCMRQWNTVLRYPGCRQIQRNSEPIRIERGIFQGDSLSPLWFCLALNPLSTLLEDSGLGYRLRRGGRVISHLLYMDDLKLFAPNDSQLMELLKVTETFSSAISMEFGVDKCAVMHVKRGEIVESVGTQLSDSIHLRSLSANETYKYLGMSEALGINVADMKQSLKERFFGRLRKVFNSLLSGGNKVRAFNGWVMPVLMYSFGILKWTQTELDALDRKVRTLLTAYRMHHPRSSVMRLYIPRSCGGRGFLNAKTLHNREICSLREYFLEADVGMHRDVVTVDKGFTPLSLAKENWRKPVVLDTNDRREVWQSKELHGRFFRALHGPDVDQPASVAWLRSGDLFGETEGFVCAIMDEVMMTNNYRRFIVKDGTVDICRACHRPGESIRHIISGCSRLANGEYLHRHNLVARIIHQQLALKYSLVESEVPYYRYEPDPVLEHGNITLYWDRSIITDRTIVANKPDIVVVDRSERRAMIVDITVPHDENLVKAEKDKQIKYIDLAREVVDMWDVDSAIIVPIVVSANGLIAKSLDQHLRRLSLGSWIKGLIQKAVLLDTARIVRRFLSLEP

SEQ ID NO: 10591 - protein, 1200 aa, Hecatera dysodea
MLTRSRTRCQNTRLTPSDSSLSSASQPPGPTPPASPEIPVAAVASSSSDEYFSPPTTPPPARRRGRGRPPNSLGPRGPPASDRVPAIGGSVQRMRWTHSINENVMRSYFGATEGGTNLTAYRGRMLSLFQVLEPAVNVSAQRLSDQVRVIQRNRMLDDAVLDRLRLESRSSRVSPASPPAAVQIQPSISPRPDHVSEDVDDGAISVSTQCNERLRSALENAFREYRSTPPELRPRLPRLPMHNKNRALVCALDSQLSIYFDSSENLTDTHSILYCGAAAACRVAHVKLPNSDRVARPAVPAWQCRIERRIAEARALIGKLICFREGNTRRRVMRFVRRAFSGTDISPRDYLTRVTERIDFLKQKVYAWANRIRRYKRRVERYTQNRIFQNNERWVYRAWERPDQGVTDTRLPDDEAMLSFWRNIWSVPVSHTEGDWTREVERACDSIPEMGAINISPQDVARAVRPLPNWKSPGPDGLHNFWIKWLTRSHARLASQFQSALESRSLPQFFTTGITHLLHKSGSTADPKNYRPITCLPTVYKVLTSILRAKINDHIESNSIMSISQNGCRSGARGTKELLLIDVAISQQVRRSRKDLSTCWIDYKKAYDSVPHTWLMRVLELYKVDAVLRAFMMSCMGQWRTVLHYPGCRQTQANSEPIRIERGIFQGDSLSPLWFCLALNPLSTLLEGSGQGYRLRRGGQVISHLLYMDDLKLFAPNNLQLMKLLKVTETFSSDISMEFGVDKCAVMHVKRGEIMESVGTQLSDSIHLRSLCSTETYKYLGMSEALGINATSVKQSLKERFFGRLNKVLNSLLSGGNKVRAFNGWVMPVLMYSFGILKWTQTELDALDRRVRSLLTANRMHHPRSSVMRLYIPRKCGGRGFLNAKTLHNREVCSLREYFLEADVGMHRDVVAVDKGFTPLSLANENWRKPVVLDTNDRREVWQSKELHGRFYRVLHGPDVDFLASVAWLRFGDLFGETEGFICAITDEVMMTNNYRKYIVKDGTVDICRACHRPGESIRHIISGCSSLANGDYLHRHNLVARIIHQQLALKYNLVESEVPYYRYAPDPVLENGNCTLYWDRSIITDRTIVANKPDIVVIDRLERRAMIVDIAVPHDENLVKAEKDKQSKYLDLAREVVDMWDVNTAVIVPIVVTANGIIAKSLDQHLKRLSLGSWIKGLIQKAVLLDTARIVRRFLSREP

SEQ ID NO: 10592 - protein, 1200 aa, Hecatera dysodea
MLTRSRTRCQNTRLTPSDSSLSSASQPPGPTPPVSPEIPVAAVASSSSDEYFSPPTTPPPARRRGRGRPPNSLGPRGPPASDRVPAIGGSVQRMRWTHSINENVMRSYFGATEGGTNLTAYRGRMLSLFQVLEPAVNVSAQRLSDQVRVIQRNRMLDDAVLDRLRLESRSSRVSPASPQAAVQIQPSISPRPDHVSEDVDDGTISVSTQCNERLRSALEDAFREYRSTPPELRPRLPRLPMHNKNRALVCALDSQLSIYFDSSENLTDTHSILYCGAAAACRVTHVKLPNSDRVARPAVPAWQCRIERRIAEARALIGKLICFREGNTRRRVMRFVRRAFSGTDISPRDYLTRVTERIDFLKQKVYAWANRIRRYKRRVERYTQNRIFQNNERWVYRAWERPDQGVTDTRLPDDEAMLSFWRNIWSVPISHTEGDWTREVERACDSIPEMGAINISPQDVARAVRPLPNWKSPGPDGLHNFWIKWLTRSHARLASQFQSALESRSLPQFFTTGITHLLHKSGSTADPKNYRPITCLPTVYKVLTSILRAKINDHIESNSIMSTSQNGCRSGARGTKELLLIDVAISQQVRRSRKDLSTCWIDYKKAYDSVPHTWLMRVLELYKVDAVLRAFLMSCMGQWRTVLHYPGCRQTQANSEPIRIERGIFQGDSLSPLWFCLALNPLSTLLEGSGQGYRLRRGGQVISHLLYMDDLKLFAPNNLQLMKLLKVTETFSSDISMEFGVDKCAVMHVKRGEIMESVGTQLSDSIHLRSLCSTETYKYLGMSEALGINATSVKQSLKERFFGRLNKVLNSLLSGGNKVRAFNGWVMPVLMYSFGILKWTQTELDALDRRVRSLLTANRMHHPRSSVMRLYIPRKCGGRGFLNAKTLHNREVCSLREYFLEADVGMHRDVVAVDKGFTPLSLANENWRKPVVLDTNDRREVWQSKELHGRFYRVLHGPDVDFLASVAWLRFGDLFGETEGFICAITDEVMMTNNYRKYIVKDGTVDICRACHRPGESIRHIISGCSSLANGDYLHRHNLVARIIHQQLALKYNLVESEVPYYRYAPDPVLENGNCTLYWDRSIITDRTIVANKPDIVVIDRLERRAMIVDIAVPHDENLVKAEKDKQSKYLDLAREVVDMWDVNTAVIVPIVVTANGIIAKSLDQHLKRLSLGSWIKGLIQKAVLLDTARIVRRFLSREP

SEQ ID NO: 10593 - protein, 1103 aa, Hecatera dysodea
MDAIQNVMRSYFGATEGGTNLTAYRGRMLSLFQVLEPAVNVSAQRLSDQVRVIQRNRMLDDAVLDRLRLESRSSRVSPAAPPAAVQIQPSISPRPDHVSEDVDDGAITVSTQCNERLRSALEDAFREYRSTPPGLRPRLPRLPMHNKNRALVCALDSQLENCFNSSKDLTDTHSILYCAAAAACRVAHVKFPNSDRAARPAVPAWQYRIERRIGEARALIGKLICFREGNTRRRVMRFVRRAFSGTDISPRDYLTRVTERIDFLKQKVYAWASRIRRYKRRVERYTQNRTFQSNERWVYRAWERPDQVVTDTHLPDDDAMCSFWRSIWSVPVSHTEGDWTREVERTCDPIPEMGAITISPQDVARAVRPLPNWKSPGPDGLHNFWIKWFPRSHARLASQFQSALESGSLPQFLTTGITHLLHKSGSTVEPKNYRPITCLPTVYKVLTSILRAKINDHIESNSIMSTSQNGCRNGARGNKELLLIDVAISQQVRRSRKDLSTCWIDYKKAYDSVPHTWLMRVLELYKVDAVLRTFLMSCMGQWRTVLHYPGCRQTQANSEPIRIERGIFQGDSLSPLWFCLALNPLSTLLEGSGQGYRLRRGGQVISHLLYMDDLKLFAPNNLQLMKLLKVTETFSSDISMEFGVDKCAVMHVKRGEIMESVGTQLSDSIYLRSLCSTETYKYLGMSEALGINATSVKQSLKERFFGRLNKVLNSLLSGGNKVRAFNGWVMPVLMYSFGILKWTQTELDALDRRVRSLLTANRMHHPRSSVMRLYIPRKCGGRGFLNAKTLHNREVCSLREYFLEADVGMHRDVVAVDKGLTPLSLANENWRKPVVLDTNDRREVWQSKELHGRFYRVLHGPDVVFLASVAWLRFGDLFGETEGFICAITDEVMMTNNYRKYIVKDGTVDICRACHRPGESIRHIISGCSSLANGDYLHRHNLVARIIHQQLALKYNLVESEVTYYRYAPDPVLENGNCTLYWDRSIITDRTIVANKPDIVVIDRLERRAMIVDIAVPHDKNLVKAEKDKQSKYLDLAREVVDMWDVNTAVIVPIVVTANGIIAKSLDQHLKRLSLGSWIKGLIQKAVLLDTARIVRRFLSRES

SEQ ID NO: 10594 - protein, 1200 aa, Mythimna impura
MLTRSRAQKLHTHPTSSGSSLSSASQPPGPAPTMSPEIPVAAVASSSSDEYFSPPTTPPPVRRRGRGRPPASLGPRGPPASDRVPAAGGSVQRMRWTSSMNENVMRSYFGATEGGINLTAYRSRMLSLFQVLEPAVNVSVQRLSDQVRVIQRNRMLDDAVLDRLRLESQSSRVSPATTPAAVQRLPTASPRPVQVGDADDDAAISVSTQCNDRLRGALEDAFREYRSTPPGLRPRLPRLPMHKRNRALMCALDSQLSNCFDSSKDLTDTHSILYCAAVAACRVAHVKFPNCDRATRPAVPAWQCRIEHRIGEARALIGKLICFREGNTRPRVMRFVRRAFSGTDISPRDYLPCVTERIDFLKQKIYAWANRIRRYKRRVERYTRNRTFQSNERWVYRDWERSDQGVTDTRLPDDDAMCSFWRSIWSAPVSHTEGDWIREVERACDLLPEMGAITISPQDVARAVRPLPNWKSPGPDGLHNFWVKWFQRSHARLASQFQSALESGSLPQFLTTGITHLLHKSGSTAEPKNYRPITCLPTVYKVLTSILRAKINSHIETNSIMSASQNGCRNGSRGTKELLLIDIAISQQVRRSRKNLSACWIDYKKAYDSVPHTWLMRVLELYKVDATLRTFLMSCMGQWRTVLHYPGCRQIQENNEPIRIERGIFQGDSLSPLWFCLALNPLSTLLEGSGLGYRLKRGGQVISHLLYMDDLKLFAPNNLQLVELLKVTETFSSAIRMEFGVDKCAVIHVKRGEIMESVGIQLSDSIHLRSLCSTETYKYLGMSESLGINTDDVKQSLKERFFGRLNKVLNSLLSGGNKVRAFNGWVMPVLMYSFGILKWTQTELDALDRRVRTLLTANRMHHPRSSVMRLYIPRKCGGRGFLNAKTLHNREVCSLREYFLKTDVGMHRDVVAVDKGLTPLSLANENWRKPIVLDTNDRREVWQSKELHGRFYRALHGPDVDLLASVSWLRFGDLFGETEGFVFAIMDEVMMTNNYRKYIVKDGTVDICRACHRPGESIRHIISGCSHLANGDYLHRHNLVARIIHQQLALKYNLVESEVPYYRYVPDPVLDNGNITLYWDRSIITDRTIVANKPDIVVIDRLERRTMIVDIAVPHDENLVKAEKDKQTKYLDLAREVVDMWEVDKAIIVPIVVTVNGIIAKSLEQHLRRLSLGSWIKGLIQKAVLLDTARIVRRFLSQEP

SEQ ID NO: 10595 - protein, 1200 aa, Mythimna impura
MLTRAAARRARLPPPASSLSSASPPPESSPTVSAVTPAVAVASSSSDEYFSPPTSPPPARRRRGRRPPSGLGPRGPPASDRVPAPGGSVQRMRWTQSINENVMRAYYGATEGGNNLTAYRVRMLSLFQVLEPAVNVSAQRLSDQVRVIQRNHMLDDTVLDRLRTEMSNHAIAPSSQPVVPVMVPPSYHLSDHADEEITDMVTHVSTQCNNELRSALECAIREYRNMPLELRPRLPRLPMHNKNKALVAALDLQLSNYFDDCEDLTDTHSIMYCAAVAACRVAHVKFPSCDVSTRPKPAVPAWQCRIERRIGGARALIGKLICFREGNTRPRVMRFVRRAFSGTDISPRDYMSRVTERIDFLKQKVYAWANRIRRYKRRVERYTQNRTFRSNERWVYRAWERPDQGVTDTRLPDDDAMSSFWRSIWSVPVSHTEGDWTREVERACDPIPQMGAIDISPQDVARAVRPLPNWKSPGPDGLHNFWIKWFTRSHARLAYQFQSALESGSLPQFLTTGITHLLHKSGSTAEPKNYRPITCLPTVYKVLTSILRSKINSHIDKNLIMSPSQNGCRNGSRGTKELLLIDMTISQQVRRFRKDLSTCWIDYKKAYDSVPHTWLMRVLELYKIDTTLRTFLMSCMRQWSTVLRYPGCRHIQRNSEPVRIERGIFQGDSLSPLWFCLALNPLSTLLENSGLGYRLKRGGQVISHLLYMDDLKLFAPNNLQLMELLKVTETFSSAIRMEFGVDKCAVMHVKRGEVVESVGTQLTDSINLRSLSPTETYKYLGMSEALGINITDMKQSLKERFFGRLKKVFNSLLSGGNKVRAFNGWVMPVLMYSFGVLKWTQTELDALDRRVRTLLTAYRMHHPRSSVMRLYIPRKCGGRGFLNAKTLHNREVCSLREYFLATDVGMHRDVVAVDKGLTPLSLANENWRKPVVLDTNDRREVWQSKELHGRFFRAFHGPDVDQLASVAWLRFGDLFGETEGFVCAIMDEVIMTNNYRRFIVKDGTVDICRACHRPGESIRHIISGCSRLANGEYLHRHNLVARIIHQQLALKYSLVESEVPYYRYEPDPVLDNGHITLYWDRSIITDRTIVANKPDIVVVDRSERRAMIVDISVPHDENLVKAEKDKQIKYIDLAREVVDIWDVDSAIIVPIVVSANGLIAKSLDQHLRRLALGGWIKALIQKAVLLDTARIVRRFLSLEP

SEQ ID NO: 10596 - protein, 1200 aa, Mythimna impura
MLTRAAARRARLPPPASSLSSASPPPESSPTVSAVTPAVAVASSSSDEYFSPPTSPPPARRRRGRRPPSGLGPRGPPASDRVPAPGGSVQRMRWTQSINENVMRAYYGATEGGNNLTAYRVRMLSLFQALEPAVNVSAQRLSDQVRVIQRNHMLDDTVLDRLRTEMSNHAIAPSSQPVVPVMVPPSYHLSDHADEEITDMVTHVSTQCNNELRSALECAIREYRNMPLELRPRLPRLPMHNKNKALVAALDLQLSNYFDDCEDLTDTHSIMYCAAVAACRVAHVKFPSCDVSTRPKPAVPAWQCRIERRIGGARALIGKLICFREGNTRPRVMRFVRRAFSGTDISPRDYMSRVTERIDFLKQKVYAWANRIRRYKRRVERYTQNRTFRSNERWVYRAWERPDQGVTDTRLPDDDAMSSFWCSIWSVPVSHTEGDWTREVERACDPIPQMGAIDISPQDVARAVRPLPNWKSPGPDGLHNFWIKWFTRSHARLAYQFQSALESGSLPQFLTTGITHLLHKSGSTAEPKNYRPITCLPTVYKVLTSILRSKINSHIDKNLIMSPSQNGCRNGSRGTKELLLIDMTISQQVRRFRKDLSTCWIDYKKAYDSVPHTWLMRVLELYKIDTTLRTFLMSCMRQWSTVLRYPGCRHIQRNSEPVRIERGIFQGDSLSPLWFCLALNPLSTLLENSGLGYRLKRGGQVISHLLYMNDLKLFAPNNLQLMELLKVTETFSSAIRMEFGVDKCAVMHVKRGEVVESVGTQLTDSINLRSLSPTETYKYLGMSEALGINITDMKQSLKERFFGRLKKVFNSLLSGGNKVRAFNGWVIPVLMYSFGVLKWTQTELDALDRRVRTLLTAYRMHHPRSSVMRLYIPRKCGGRGFLNAKTLHNREVCSLREYFLATDVGMHRDVVTVDKGLTPLSLANENWRKPVVLDTNDRREVWQSKELHGRFFRASHGPDVDQLASVAWLRFGDLFGETEGFVCAIMDEVIMTNNYRRFIVKDGTVDICRACHRPGESIRHIISGCSRLANGEYLHRHNLVARIIHQQLALKYSLVESEVPYYRYEPDPVLDNGHITLYWDRSIITDRTIVANKPDIVVVDRSERRAMIVDISVPHDENLVKAEKDKQIKYIDLAREVVDMWDVDSAIIVPIVVSANGLIAKSLDQHLRRLALGGWIKALIQKAVLLDTARIVRRFLSLEP

SEQ ID NO: 10597 - protein, 975 aa, Mythimna impura
MPLELRPRLPRLPMHNKNKALVAALDLQLSNYFDDCKDLTDTHSIMYCAAVAACRLAHVKFPNCDVATRPKPAVPAWQCRIERRIGGARALIGKLICFREGNTRPRVMRFVRRAFSGTDISPRDYMSRVTERIDFLKQKVYAWANRIRRYKRRVDRYTQNRTFRSNERWVYRAWERPDQGVTDACLPDDDAMSSFWRSIWSVPVSHTEGDWTREVERACDPIPQMGAIDISPEDVARAVRPLPNWKSPGPDGLHNFWIKWFTRSHARLAYQFQSALESGSLPQFLTTGITHMLHKSGSTAEPKNYRPITCLPTVYKVLTSILRSKINSHIDKNLIMSPSQNGCRNGSRGTKELLLIDMTISQQVRRSRKDLSTCWIDYKKAYDSVPHTWLMRVLELYKIDTKLRTFLMSCMRQWSTVLRYPGCRHTQRNSEPVRIERGIFQGDSLSPLWFCLALNPLSTLLENSGLGYRLKRGGQVISHLLYMDDLKLFAPNNLQLMELLKVTETFSSAIRMEFGVDKCAVMHVKRGEVVESVGTQLTDFINLRSLSPTETYKYLGMSEALGINITDMKQSLKEHFFGRLKKVFNSLLSGGNKVRAFNGWVMPVLMYSFGVLKWTQTELEALDRKVRTLLTAYRMHHPRSSVMRLYIPRKCGGRGFLNAKTLHNREVCSLREYFLAADVGMHRDVVTVDKGLTPLSLANENWRKPVVLDTNDRREVWQSKELHGRFFRALHGPDVDQLASVAWLRSGDLFGETEGFVCAIMDEVIMTNNYRRFIVKDGTVDICRACHRPGESIRHIISGCSRLANGEYLHRHNLVARIIHQQLALKYSLVESEVPYYRYEPDPVLDNGHITLYWDRSIITDRTIVANKPDIVVVDRSERRAMIVDISVPHDENLVKAEKDKQIKYIDLAREVVDMWDVDSAIIVPIVVSGNGLIAKSLDQHLRRLALGDWIKGLIQKAVLLDTARIVRRFLSLEP

SEQ ID NO: 10598 - protein, 1200 aa, Mythimna impura
MLTRAAARRARLPPPASSLSSASPPPEPSPTVSAVTPAVAVASSSSDEYFSPPTSPPPARRRRGRRPPSGLGPRGPPASDRVPAPGGSVQRMRWTQSINENVMRAYYGATEGGNNLTAYRVRMLSLFQVLEPAVNVSAQRLSDQVRVIQRNHMLDDTVLDRLRTEMSNHAIAPSSQSVVPVMVPPSYHLSGHVDEEITDMVTHVSTQCNNELRSALECAIREYRNMPLELRPRLPRLPMHNKNKALVAALDLQLSNYFDDCKDLTDTHSIMYCAAVAACRLAHVKFPNCDVATRPKPAVPAWQCRIERRIGGARALIGKLICFREGNTRPRVMRFVRRAFSGTDISPRDYMSRVTERIDFLKQKVYAWANRIRRYKRRVDRYTQNRTFRSNERWVYRAWERPDQGVTDACLPDDDAMSSFWRSIWSVPVSHTEGDWTREVERACDPIPQMGAIDISPQDVARAVRPLPNWKSPGPDGLHNFWIKWFTRSHARLAYQFQSALESGSLPQFLTTGITHLLHKSGSTAEPKNYRPITCLPTVYKVLTSILRSKINSHIDKNLIMSPSQNGCRNGSRGTKELLLIDMTISQQVRRSRKDLSTCWIDYKKAYDSVPHTWLMRVLELYKIDTKLRTFLMSCMRQWSTVLRYPGCRHTQRNSEPVRIERGIFQGDSLSPLWFCLALNPLSTLLENSGLGYRLKRGGQVISHLLYMDDLKLFAPNNLQLMELLKVTETFSSAIRMEFGVDKCAVMHVKRGEVVESVGTQLTDFINLRSLSPTETYKYLGMSEALGINITDMKQSLKERFFGRLKKVFNSLLSGGNKVRAFNGWVMPVLMYSFGVLKWTQTELEALDRKVRTLLTAYRMHHPRSSVMRLYIPRKCGGRGFLNAKTLHNREVCSLREYFLAADVGMHRDVVTVDKGLTPLSLANENWRKPVVLDTNDRREVWQSKELHGRFFRALHGPDVDQLASVAWLRSGDLFGETEGFVCAIMDEVIMTNNYRRFIVKDGTVDICRACHRPGESIRHIISGCSRLANGEYLHRHNLVARIIHQQLALKYSLVESEVPYYRYEPDPVLDNGHITLYWDRSIITDRTIVANKPDIVVVDRSERRAMIVDISVPHDENLVKAEKDKQIKYIDLAREVVDMWDVDSAIIVPIVVSGNGLIAKSLDQHLRRLALGDWIKGLIQKAVLLDTARIVRRFLSLEP

SEQ ID NO: 10599 - protein, 1129 aa, Mythimna impura
MDARHTEPVIMATLGEAYVHDNDNDNDNDNDNDNDNDNDNDNDNDNDNDNDNDNDNDNDNDNDNDNDNDNDNDNDNDNDNDNDNDNDNDNDNDNDNDNAIAPSSQSVVPVMVPPSYHLSDHADEAITDMVTHVSTQCNNELRSALECAIREYRNMPLELRPRLPRLPMHNKNKALVAALDLQLSNYFDDCKDLTDTHSIMYCAAVAACRVAHVKFPNCDVATRPKPAVPAWQCRIERRIGGARALIGKLICFREGNTRPRVMRFVRRAFSGTDISPRDYMSRVTERIDFLKQKVYAWANRIRRYKRRVERYTQNRTFRSNERWVYRAWERPDQGVTDACLPDDDAMSSFWRSIWSVPVSHTEGDWTREVERACDPIPQMGAIDISPQDVARAVRPLPNWKSPGPDGLHNFWIKWFTRSHARLAYQFQSALESGSLPQFLTTGITHLLHKSGSTAEPKNYRPITCLPTVYKVLTSILRSKINSHIDKNLIMSPSQNGCRNGSRGTKELLLIDMTISQQVRRSRKDLSTCWIDYKKAYDSVPHTWLMRVLELYKIDTTLRTFLMSCMRQWSTVLRYPGCRHTQRNSEPVRIERGIFQGDSLSPLWFCLALNPLSTLLENSGLGYRLKRGGQVISHLLYMDDLKLFAPNNLQLMELLKVTETFSSAIRMEFGVDKCAVMHVKRGEVVESVGTQLTDSINLRSLSPTETYKYLGMSEALGINITDMKQSLKERFFGHLKKVLNSLLSGGNKVRAFNGWVMPVLMYSFGVLKWTQTELDVLDRRVRTLLTAYRMHHPRSSVMRLYIPRKCGGRGFLNAKTLHNREVCSLREYFLAADVGMHRDVVAVDKGLTPLSLANENWRKPVVLDTNDRREVWQSKELHGRFFRALHGPDVDQLASVAWLRFGDLFGETEGFVCAIMDEVIMTNNYRRFIVKDGTVDICRACHRPGESIRHIISGCSRLANGEYLHRHNLVARIIHQQLALKYSLVESEVPYYRYEPDPVLDNGHITLYWDRSIITDRTIVANKPDIVMVDRSERRAMIVDISVPHDENLVKAEKDKQIKYIDLAREVVDMWDVDSAIIVPIVVSANGLIAKSLDQHLRRLALGGWIKGLIQKMVLLDTARIVRRFLSLEP

SEQ ID NO: 10600 - protein, 1003 aa, Mythimna impura
MVDNNNNNNNSNNELRSALECAIREYRNMPLELRPRLPRLPMHNKNKALVAALDLQLSNYFDDCEDLTDTHSIMYCAAVAACRVAHVKFPSCDVSTRPKPAVPAWQCRIERRIGGARALIGKLICFREGNTRPRVMRFVRRAFSGTDISPRDYMSRVTERIDFLKQKVYAWANRIRRYKRRVERYTQNRTFRSNERWVYRAWERPDQGVTDTRLSDDDAMSSFWRSIWSVPVSHTEGDWTREVERACDPIPQMGAIDISPQDVARAVRPLPNWKSPGPDGLHNFWIKWFTRSHARLAYQFQSALESGSLPQFLTTGITHLLHKSGSTAEPKNYRPITCLPTVYKVLTSILRSKINSHIDKNLIMSPSQNGCRNGSRGTKELLLIDMTISQQVRRFRKDLSTCWIDYKKAYDSVPHTWLMRVLELYKIDTTLRTFLMSCMRQWSTVLRYPGCRHIQRNSEPVRIERGIFQGDSLSPLWFCLALNPLSTLLENSGLGYRLKRGGQVISHLLYMDDLKLFAPNNLQLMELLKVTETFSSAIRMEFGVEKCAVMHVKRGEVVESVGTQLTDSINLRSLSPTETYKYLGMSEALGINITDMKQSLKERFFGRLKKVFNSLLSGGNKVRAFNGWVMPVLMYSFGVLKWTQTELDALDRRVRTLLTAYRMHHPRSSVMRLYIPRKCGGRGFLNAKTLHNREVCSLREYFLATDVGMHRDVVAVDKGLTPLSLANENWRKPVVLDTNDRREVWQSKELHGSFFRAFHGPDVDQLASVAWLRFGDLFGETEGFVCAIMDEVIMTNNYRRFIVKDGTVDICRAYHRPGESIRHIISGCSRLANGEYLHRHNLVARIIHQQLALKYSLVESEVPYYRYEPDPVLDNGHITLYWDRSIITDRTIVANKPDIVVVDRSERRAMIVDISVPHDENLVKAEKDKQIKYIDLAREVVDMWDVDSAIIVPIVVSANGLIAKSLDQHLRRLALGGWIKALIQKAVLLDTARIVRRFLSLEP

SEQ ID NO: 10601 - protein, 1200 aa, Mythimna impura
MLTRAAARRARPPPPASSLSSALPPPEPSPTVSAVTPAAAAASSSSDEYYSPPTSPPPARRRRGRRPPSRLGPRGPPVSDRVPAPGGSVQRMRWTQSINENVMRAYYGATEGGNNLTAYRARMLSLFQVLEPAVNVSAQRLSDQVRVIQRNHMLDDTVLDRLRTEMSNHAIAPSSQSVVPVMVPPSYHLSDHADEAITDMVTHVSTQCNNELRSALECAIREYRSMPLELRPRLPRLPMHNKNKALVAALDLQLSIYFDDCKDLTDTHSIMYCAAFAACRVAHVKFPNCDVATRPKPAVPAWQCRIERRIGGARALIGKLICFREGNTRPRVMRFVRRAFSGTDISPRDYMSRVTERIDFLKQKVYAWANRIRRYKRRVERYTQNRTFRSNERWVYRAWERPDQGVTDECLPDDDAMSSFWRSIWSVPVSHTEGDWTREVERACDPIPQMGAIIISPQDVARAVRPLPNWKSPGPDGLHNFWIKWFTRSHARLAYQFQSALESGSLPQFLTTGITHLLHKSGSTAEPKNYRPITCLPTVYKVLTSILRSKINSHIDKNLIMSPSQNGCRNGSRGTKELLLIDMTISQQVRRSRKDLSTCWIDYKKAYDSVPHTWLMRVLELYKIDTTLRTFLTSCMRQWSTVLRYPGCRHTQRNSEPVRIERGIFQGDSLSPLWFCLALNPLSTLLENSGLGYRLKRGGQVISHLLYMDDLKLFAPNNLQLMELLKVTETFSSAIRMEFGVDKCAVMHVKRGEVVESVGTQLTDSINLRSLSPTETYKYLGMSEALGINITDMKQSLKERFFGRLKKVFNSLLSGGNKVRAFNGWVMPVLMYSFGVLKWTQTELDALDRRVRTLLTAYRMHHPRSSVMRLYIPRKCGGRGFLNAKTLHNREVCSLREYFLAADVSMHRDVVAVDKGLTPLSLANENWRKPVVLDTNDRREVWQSKELHGRFFRALHGPDVDQLASVAWLRSGDLFGETEGFVCAIMDEVIMTNNYRRFIVKDGTVDICRACHRPGESIRHIISGCSRLANGEYLQRHNLVARIIHQQLALKYSLVESEVPYYRYEPDPVLDNGHITLYWDRSIITDRTIVANKPDIVVVDRSERRAMIVDISVPHDENLVKAEKDKQIKYIDLAREVVDMWDVDSAIIVPIVVSANGLIAKSLDQHLRRLALGGWIKGLIQKVVLLDTARIVRRFLSLEP

SEQ ID NO: 10602 - protein, 1201 aa, Phlogophora meticulosa
MLTRSRARVLNAPTTSSGSSLSSASQLPGPAPDVSPVTPAAAVASSSSDEYYSPPTSPPPVRRCGRGRPPASLGLRGPPASARVPASGGSVQRMRWTQSINENVMRSYYGATEGGINLTAYRGRMLSLFQVLEPAVNVSAQRLSDQVRVIQRNHMLDDAVLDRLRLNSRSNRVTPASPPVAVQLQNLPSVSPRPDYVGEEDDAAISVSSQCNVRLRSALEDAFREYRSTPPGLRQRLPRLPMHKKNKALMCALDSLLSNSFDSSRDLADTHSILYCAAVAACRVANVKFPNSVRSTRPAIPAWQCRIERRIGEARVLIGKLICFRDGNTRPRVMRFVRRAFSGTDISSRDYLTRVTERIDFLKQKICAWANSIRRYKRRVERYTQNRTFRSDERWVYRTWERPDQGVTDTFLPDDEAMCLFWRSIWSVPVSHTEGDWTREVERTCEPLPEMGAINISPQDVACAVRPLPNWKSPGPDGLHNFWIKWLKSSHARLASQFQSALESGSLPQFLTTGITHLLHKSGSTSEPKNYRPITCLPTVYKVLTSILRSKINNHIDSTSIMSVSQNGCKNGSRGTKELLLIDMAISQQVRRSRKDLSTCWIDYKKAYDSVPHTWLMRVLELYKIDATLRTFLKSCMGQWRTVLHYPGCRQFQENSEPIRIERGIFQGDSLSPLWFCLALNPLSTLLEGSGLGYRLRRGGQVISHLLYMDDLKLFAHNNLQLLKLLKVTETFSSAIRMDFGVDKCAVMHVKRGGIVESAGTQLSDSIYLRSLSSTETYKYLGMSEALGINTADMKQSLKERFFGRLNKVLNSLLSGGNKVRAFNSWVMPVLMYSFGILKWTQTELDALDRRVRTLLTANRMHHPRSSVMRLYISRKCGGRGFLNAKTLHNREVCSLREYFLEADVGMHRDVVAMDKALTPLSLANENWRKPIVLDTTDRMEIWKSKELHGRFYRVLHGPDVDLSASVSWLRFGDLFGETEGFVCAIMDEVIMTNNYRKYIVKDGTVDICRACHRPGESIRHIISGCSRLANGDYLHRHNLVAKIIHQQLALKYNLVESEVPYYKYVPDPVLENGNITLYWDRSIITDRTIVANKPDIVVIDRSDRRTMIVDITVPHDENLVKAEKEKQIKYLDLAREVVDMWDVNTAVIVPIVVTANGIIAKSLDQHLRRLSLGNWIKGLIQKAVLLDTARIVRRFLSQEP

SEQ ID NO: 10603 - protein, 1198 aa, Phlogophora meticulosa
MLTRSAARRARPPPPASSLSSASSPPKPSTIVSTVKPAVPVASSSSDEYFSPPTSPPPARRRRGRRPPDGLGPRGPLASDRVPAPGGSVQRMRWTQSINENVMRSYYGATEGGSNLTAYRVRMLSLFQVLEPAVNVSAQRLSDQVRVIQRNHMLDDVVLDRLRTEMQSSRVITSPSHTVVPPQYNIVLSSFADGEGSDKVINVSTQYNEELRSALEGAIREYRFMLPALRPRLPRLPMHNKNRALVAALDSQLSNYFDNCDDLTDAHSILYCAAVAACRVAHVKFPYDKATRPKPAVPAWQCRIERRIAGARALIGKLVCYREGNTRPRVMRYVRRAFLGTDISPRDYMSRVTERIDFLKQKVYAWASRIRRYKRRVERYTQNRTFQSNERWVYRAWERPVQGVTDTHLPDDDVMCSFWRNIWSVPVSHTEGDWTREVERACDPIPQMGAITISPQDVARAVRPLPNWKSLGPDGLHNFWIKWLQKSHARLASQFQSALETGSLPQFLTTGITHLLHKSGSTAEPKNYRPITCLPTVYKVLTSILRVKINNHIDSNSIMSASQNGCRNGSRGTKELLLIDTAISQQVRRSRKDLSTCWIDYKKAYDSVPHTWLKRVLELYKVDATLRTFLTSCMGQWRTVLRYPGCRQIQRNSESIRIERGIFQGDSLSPLWFCLALNPLSTLLEDSGLGYRLKRGGQVVSHLLYMDDLKLFAPSDLQLMELLTVTKTFSSAIRMEFGVDKCAVMHVKRGKIVESVGTQVPDFINFRALSPIETYKYLGMSEALGINAADMKQSLKERFFGRLKKVCNSLLSGGNKVRAFNGWVMPVLMYSFGILKWTQTELDALDRRVRTFLTASRMHHPRSSVMRLYIPRKCGGRGFLNAKTLHNREICSLRDYFLETDVGMHRDVVAVDQGLTPLSLAKENWRKPVVLDTNDRKEVWQSKELHGRFFQALHGPDVDQLASVSWLRFGDLFGETEGFVCAIMDEVIMTNNYRRFIVKDGTVDICRACHRPGESIRHIISGCSRLANEEYLHRHNLVARIIHQQLALKYSLVESEVPYYKYVPDPVLENGSVTLYWDRSIITDRTIVANKPDIVVMDRIERRATIIDVTVPHDGNLVKAEKDKQIKYLDLAREVVDMWDVDSAIVVPIVVSANGLIAKSLDQHLRRLALGSWIKGLIQKAVLLDTARIVRRFLSLEP

SEQ ID NO: 10604 - protein, 960 aa, Phlogophora meticulosa
MHKKNKALMCTLDSLLSNSFDSSRDLADTHSTLYCAAVAACRVANVKFPNSVRSTRPAIPAWQCRIERRIGEARVLIGKLICFREGNTRPRVMRFVRRAFSGTDISSRDYLTRVTERIDFLKQKICAWANRIRRYKRRVERYTQNRTFRSDERWVYRTWERPDQGVTDTFLSDDEAMCLFWRSIWSVPVSHTEGDWTREVERTCEPLPEMGAINISPQDVACAVRPLPNWKSPGPDGLHNFWIKWLKSSHARLASQFQSALESGSLPQFLTTGITHLLHKSGSTAEPKNYRPITCLPTVYKVLTSILRSKINNHIDSTSIMSVSQNGCKNGSRGTKELLLIDMAISQQVRRSRKDLSTCWIDYKKAYDSVPHTWLMRVLELYKIDATLRTFLKSCMGQWRTVLQYPGCRQFQENSEPIRIERGIFQGDSLSPLWFCLALNPLSTLLEGSGLGYRLRRGGQVISHLLYMDDLKLFAHNNLQLMKLLKVTETFSSAIRMDFGVDKCAVMHVKRGGIVESAGTQLSDSIYLRSFSSTETYKYLGMSEALGISTADMKQSLKERFFGRLNKVLNSLLSGGNKVRAFNSWVMPVLMYSFGILKWTQTELDALDRRVRTLLTANRMHHPRSSVMRLYISRKCGGRGFLNAKTLHNREVCSLREYFLEADVGIHRDVVAMDKALTPLSLANENWRKPIVLDTTDRMEIWKSKELHGRFYRVLHGPDVDLSASVSWLRFGDLFGETEGFVCAIMDEVIMTNNYRKYIVKDGTVDICRACHRSGESIRHIISGCSRLANGDYLHRHNLVAKIIHQQLALKYNLVESEVPYYKYVPDPVLENGNITLYWDRSIITDRTTVANKPDIVVIDRLERRTMIVDITVPHDENLVKAEKEKQIKYLDLAREVVDMWDVNTAVIVPIVVTANGIIAKSLDQHLRRLSLGSWIKGLIQKAVLLDTARIVRRFLSQEP

SEQ ID NO: 10605 - protein, 1198 aa, Xestia xanthographa
MLTRSAAARRARLPPPDSSLSSASPPPDPSPIVSAVTPAVAVASSSSDECFSPPTTPPPARRRGGRRPPDGLGPRGPPASDRVPAPGGSVQRMRWTQSINENVMRAYYGATEGGNNLTAYRVRMLSLFQVLEPAVNVSAQRLSDQVRVIQRNRMLDDTVLDRLRTEIQSSHVIATPSQAVVPPQSSIIPNCDNDVGNDMVTNVSTQCNVEMRSALEGAIREYRFMQPDLRPRIPRLPMHNKNRALVAVLDSQLSNYFDNCEDLTDVHSILYCAAVAACRVAHVKFPSDRATRPKPAVPAWQYRIERRIGGARALIGKLVCFREGNTRPRVMRFVRQAFSGTDISPRDYMSRVTERIDFLKQKVYAWANRIRRYKRRVDRYTQNRTFQKDERWVYRAWERPDQGMTDTHLPDDDAMCSFWRSIWSVPVSHAEGEWTRVIERACDPVSEMGAITISPQDVARAVRPLPNWKSPGPDGLHNFWIKWFTRSHARLATLFQSALESGSLPEFLTTGITHLLHKSGSTAEPKNYRPITCLPTVYKVLTSILRTKISKHIDDNSVMSASQNGCRNGSRGTKELLLIDMAISHQVRRSRKDLSTCWIDYKKAYDSVPHTWLMRVLELYKVDATLRTFLMSCMGQWRTVLRYPGCRQIQRNSESIRIERGIFQGDSLSPLWFCLALNPLSTLLEDSGLGYRLRKDGQVISHLLYMDDLKLFAPNDLQLMELLKVTDTFSSAIRMEFGVDKCAVMHVKRGEIVESVGTQLSDSITLRSLSATETYKYLGMSEALGVNVADMKQSLKERFFGRLKKVFNSLLSGGNKVRAFNGWVMPVLMYSFGILKWTQTELDALDTKVRKLLTAYRMHHPRSSVMRLYIPRKCGGRGFLNAKTLHNREICSLREYFLGTDVGMHRDVVTVDKGLTPLSLAKENWRKPPVLDTNDRREVWQSKELHGRFFRALHGPDVDLPASVAWLRSGDLFGETEGFVCAIMDEVMMTNNYRRFIVKDGTVDICRACHRPGETIRHIISGCSRLANGEYLHRHNLVARIIHQQLALKYNLVESEVPYYRYVPDPVLNNGCITLYWDQSIITDRTIVANKPDIVVVDRSERRAMIVDITVPHDENLVKAEKDKQIKYLDLAREVVDMWEVDSAIIVPIVVSAHGLIAKSLDQYLRRLSLGSWIKGLIQKAVLLDTARIVRRFLSLEP

SEQ ID NO: 10606 - protein, 1209 aa, Xestia xanthographa
MITRSRAKQHQEAHPPSPGSSLSSASQPPGRATPVSIVSPVAAVASSSSDEFFSPPSTPSPSPRRGRRRGRGWPPAGLGPRGQQAPSRVPAAGGNVSRIRWTQSMNENVMRAYYGATEGGINLTAYRGQMLSLFQVLEPGVSASAQRLSDQVRVIQRNHMLDDTVLDRLRSESRSNLVTPASPLIAVQVQNVSSAPPRSDRDGEEDDSEVISVSTQCNAQLRSALESAFREYRSTPPELRPRLPRLPMHNKNKALVCALDSQLSNCFDSSKDLADTHSILYCGAMAACRVARVKFPNNDRATRPKLTAPAWQCRIERRIGEARALIGKLICFREGNTRPRVMRFVRRAFSGTDISFRDYLARVAERIDFLKQKICAWASRIRRYKRRVERYTQNRTFQSDERWVYRAWERPDQGVTDMRLPDDSAMCSFWRSIWSVPVSHTEGDWTREVEQACDPIPEMGAIVISPQDVARAVRPLPNWKSPGPDGLHNFWIKWFQRSHACLASQFQSALESGSLPQFLTTGITHLLHKSGSVAEPKNYRPITCLPTVYKVLTSILRAKINQHIESNSIMSASQNGCRNGSRGTKELLLIDMAISQQVRRSRKNLSTCWIDYKKAYDSVPHTWLMRVLELYKVDATLRTFLMSCMGQWRTVLRYPGCRQIQGNSEPIRIERGIFQGDSLSPLWFCLALNPLSTLLERSGLGYLLRRDGQVISHLLYMDDLKLFAPNNLQLMKLLKVTETFSSAIRMEFGVDKCAVMHVKRGEIMESVGTQLSDSIHLRPLSSTETYKYLGMSEALGINTADMKQSLRERFFGRLNKVLGSLLSGGNKVRAFNGWVMPVLMYSFGILKWTQTELDALDRRVRTLLTANRMHHPRSSVMRLYIPRKCGGRGFLNAKTLHNREVCSLREYFLEADGEMHRDVVSVDKGLTPLSLANENWRKPKVLDTNDRKVEWQGKELHGRFYRALHGPDVDFLASVSWLRFGDLFGETEGFVCAIMDEVMMTNNYRKYIVKDGTVDICRACHRPGESIRHIISGCSSLANGEYLHRHNLVARIIHQQLALKYNLVESEVPYYKYAPDPVLDNGHITLYWDRPITTDRTVVANRPDIVVIDRLERRTMIVDITIPHDENLVKAEKDKQFKYLDLAREVVDMWDVDTAVIVPIVVSANGLIAKSLDQHLRRLSLGSWIKGLIQKAVLLDTARIVRRFLSQEP

SEQ ID NO: 10607 - protein, 1197 aa, Xestia xanthographa
MLTRSAAARRARLPPPDSSLSSASPPPEPSPIVSAVTPAVAVASSSSDEYFSPPTTPPPARRRGGHRPPDGLGPRGPPASDRVPAPGGSVQRMRWTQSINENVMRAYYGATEEGNNLTAYRVRMLSLFQVLEPAVNVSAQRLSDQVRVIQRNRMFDDTVLDRLRTEIQSNHVIVTPSQAVVPPQSSIIPCDNDVSNDMVTNVSTQCNVEMRSALEGAIREYRFMQPDLRPRIPRLPMHNRNRALVAVLDSQLSNYFDNCEDLTDVHSILYCAAVAACRVAHVKFPSDIATRPKPAVPAWQYRIERRIGGARALIGKLVCFREGNTRPRVMRFVRQAFSGTDISPRDYMSRVTERIDFLKQKVYAWANRIRRYKRRVDRYTQNRTFQKDERWVYRAWERPDQGVADTHLPDVDAMCSFWRSIWSVPVSHAEGEWTRVIERACDPISEMGAINISPQDVARAVRPLPNWKSPGPDGLHNFWIKWFTRSHARLATLFQSALESGSLPEFLTTGITHLLHKSGSTAEPKNYRPITCLPTVYKVLTSILRTKISKHIDDNSVMSASQNGCRNGSRGTKELLLIDMAISHQVRRSRKDLSTCWIDYKKAYDSVPHTWLMRVLELYKVDATLRTFLMSCMGQWRTVLRYPGCRQIQRNSEPIRIERGIFQGDSLSPLWFCLALNPLSTLLEDSGLGYRLRKDGQVISHLLYMDDLKLFAPNDLRLMELLKVTETFSNAIRMEFGVDKCAVMHVKRGEIVESVGTQLSDSITLRSLSATETYKYLGMSEALGVNVADMKQSLKERFFGRLKKVLNSLLSGGNKVRAFNGWVMPVLMYSFGILKWTQTELDALDTKVRKLLTAYRMHHPRSSVMRLYIPRKCGGRGFLNAKTLHNREICSLREYFLGTDVGMHRDVVTMDKGFTPLSLAKENWHKPPVLDTNDRREVWQSKELHGRFFRALHGPDVDLSASVAWLRSGDLFGETEGFVCAIMDEVMMTNNYRRFIVKDGTVDICRACHRPGESIRHIISGCSRLANGEYLHRHNLVARIIHQQLALKYNLVESEVPYYRYVPDPVLDNGCITLYWDQSIITDRTIVANKPDIVVVDRSERRAMIVDITVPHDENLVKAEKDKQIKYLDLAREVVDMWEVDSAIIVPIVVSAHGLIAKSLDQYLRRLSLGSWIKGLIQKAVLLDTARIVRRFLSLEP

SEQ ID NO: 10608 - protein, 1198 aa, Xestia xanthographa
MLTRSAAARRARLPPPDSSLSSASPPPEPSPIVSAVTPAVAVASSSSDEYFSPPTTPPPARRRGGRRPPDGLGPRGPPASDRVPAPGGSVQRMRWTQSINENVMRAYYGATEGGNNLTAYRVRMLSLFRVLEPAVNVSAQRLSDQVRVIQRNRMLDDTVLDRLRTEIQSSHVIATPSQAVVPPQSSFIPNCDNDVGNDMVTNVSTQCNVEMRSALEGAIREYRFMQPDLRPRIPRLPMHNKNRALVAVLDSQLSNYFDNCEDLTDVHSILYCAAVAACRVAHVKFPSDRATRPKPAVPAWQYRIERRIGGARALIGKLVCFREGNTRPRVMRFVRQAFSGTDISPRDYMSRVTERIDFLKQKVYAWANRIRRYKRRVDRYTQNRTFQKDERWVYRAWERPDQGVADTHLPDDDAMCSFWRSIWSVPVSHAEGEWTRVIERACDPVSEMGAITISPQDVARAVRPLPNWKSPGPDGLHNFWIKWFTRSHARLATLFQSALESGSLPEFLTTGITHLLHKSGSTAEPKNYRPITCLPTVYKVLTSILRTKISKHIDDNSVMSASQNGCRNGSRGTKELLLIDMAISHQVRRSRKDLSTCWIDYKKAYDSVPHTWLMRVLELYKVDATLRTFLMSCMGQWRTVLRYPGCRQIQRNSEPIRIERGIFQGDSLSPLWFCLALNPLSTLLEDSGLGYRLRKDGQVTSHLLYMDDLKLFAPNDLQLMELLKVTDTFSSAIRMEFGVDKCAVMHVKRGEIVESVGTQLSDSITLRSLSATETYKYLGMSEALGVNVADMKQSLKERFFGRLKKVFNSLLSGGNKVRAFNGWVMPVLMYSFGILKWTQTELDALDTKVRKLLTAYRMHHPRSSVMRLYIPRKCGGRGFFNAKTLHNREICSLREYFLGTDVGMHRDVVTVDKGLTPLSLAKENWRKPPMLDTNDRREVWQSKELHGRFFRALHGPDVDLPASVAWLRSGDLFGETEGFVCAIMDEVMMTNNYRRFIVKDGTVDICRACHRPGETIRHIISGCSRLANGEYLHRHNLVARIIHQQLALKYNLVESEVPYYRYVPDPVLDNGCITLYWDQSIITDGTIVANKPDIVVVDRSERRAMIVDITVPHDENLVKAEKDKQIKYLDLAREVVDMWEVDSAIIVPIVVSAHGLIAKSLDQYLRRLSLGSWIKGLIQKAVLLDTARIVRRFLSLKP

SEQ ID NO: 10609 - protein, 1200 aa, Cosmia trapezina
MLTRSAARQARLPPPDSSLSSASPPPVPSLTVSAVSTPAAVVASSSSDEYFSPPTTPPPARRRGGRRPPDGLGPRGPPASDRVPAPGGSVQRMRWTRAINENVMRSYYGATEGGNNLTAYRVRMHSLFQVLEPALNVSAQRLSDQVRVIQRNHMLDDTVLDRLRNEMQSSRVIAPLSQTIVAPPPPQCNTTQADEGSDGTAANVSTQCNEELRSALEGAIQEYRFVSPELRPRLPRLPMHNKNRALVAALDSQLSNYFDDCEDLTDTHSILYCAAVAACRVAHVKFANDSRATRPKPAVPAWQCRIERRIGGARALIGKLICFREGNTRPRVMRFVKRAFSGTDVSPQDYMSRVTERIDFLRQKVYAWANRIRRYKRRVDRYTQNRTFQSDERWVYRGWERPDQGVTDTRLPDDDAMCSFWRSIWSVPVSHTEGDWAREVRRACDPIPEMGAITICPQDVARAVRPLPNWKSPGPDGLHNFWIKWFLGSHARLAAQYQSALQSGSLPQFLTTGITHLLHKSGSTTEPKNYRPITCLPTVYKVLTSILRAKINEHIDTNSIMSASQNGSRNGSRGTKELLLIDMAISQQVRRSRRDLSTCWIDYRKAYDSVPHTWLMRVLELYKVDATLRTFLMSCMGQWRTVLRYPGCRNIQRNSEPIRIERGIFQGDSLSPLWFCLALNPLSTLLENSGLGYRLRRGGQVISHLLYMDDLKLFATSNLQLMELLKVTETFSSAIRMEFGVDKCAVMHVKRGEIVESVGTQLPDSINLRTLSAAETYKYLGMSEALGINVADMKQSLKERFFGRLKKVFNSLLSGGNKVRAFNGWVMPVLMYSFGILKWTQTELDALDRRVRTLLTAYRMHHPRSSVMRLYIPRKCGGRGFLNAKTLHNREICSLREYFLETDVGMHRDVVAVDKGLTPLSLAKENWRKPVVLDANDRMEVWQSKELHGRFFRALHGPDVNLLASVAWLRSGDLFGETEGFVCAIMDEVIMTNNYRRFIVKDGTVDICRACHRPGESIRHIISGCSRLANEEYLHRHNLVARIIHQQLALKYSLVESEVPYYRYVPDPVLENGHITLYWDRSIITDRTIVANKPDIVVVDRTERRAMIVDITVPHDGNLVKAEKDKQIKYIDLAREVVDMWDVDSAVIVPIVVSANGLIAKSLDQHLRRLSLGSWIKGLIQKAVLLDTARIVRRFLSLEP

SEQ ID NO: 10610 - protein, 1205 aa, Cosmia trapezina
MLTRSRAQHLRNTHPTSSGSSLSSASQLPEPAPDVSQVIPAAAVASSSSDEYFSPPTTPPPVRRRGRGRPPASLGPRGPPASDRVPAPGGSVQRMRWTQTVNENVMRAYFGATEGGSNLTAYRGRMLSLFQVLEPAVNVSAQRLSDQVRVIQRNHMLDDVVLDRLRLESRNSRVTSDSPMVAVQLQNLPSASPRPDRVGEEDDSGAISVSSQCNVQLRSALEDAFREYRSTPPGLRPRLPRLPMHKKNKALVCALDSQLSNCFDGSKDLADTHSILYCAAVAACRVAHVKFHNNDRVTRPKPAVPTWQCRIERRIGEARALIGKLICFREGNTRPRVMRFVRRAFSGMDISPRDYLTCVTERIDFLKQKICAWANRIRRYRRRVERYTQNRTFRSDERWVYRAWERPDQGVADTQLPDDDAMCSFWRSIWSVPVSHTEGDWTREVERACDHIPQMGALTISPQDVARAVRPLPNWKSPGPDGLHNFWIKWFQRSHARLASQFQSALQSGSLPQFLTTGITHLLHKSGSTAEPRNYRPITCLPTVYKVLTSILRAKINKHIDTNSIMSASQNGCGNGSRGTKELLLIDMTISQQVRRSRKDLSTCWIDYKKAYDSVPHTWLMRVLELYKIDATLRAFLMSCMGQWRTVLRYPGCRNIQRNSEPIRIGRGIFQGDSLSPLWFCLALNPLSTLLEDSGLGYRLRRGGQVISHLLYMDDLKLFAPNNLQLMELLKVTETFSSAIRMEFGVDKCAVMHVKRGGIVESVRTQLSDSIHLRSLSSLETYKYLGMSEALGINAADMKQSLRERFFGRLNKVLNSLLSGGNKVRAFNGWVMPVLMYSFGILKWTQTELDALDRRVRTLLTANRMHHPRSSVMRLYIPRKCGGRGFLNAKTLHNREVCSLREYFLEADVGMHREVVSVDKGLTPLSLANENWRKPIVLDTNDRREVWQSKELHGRFYRVLHGPDVDFLASVSWLRFGDLFGETEGFVFAIMDEVMMTNNYRKYIVKDGTVDICRACHRPGESIRHIISGCSRLANGDYLHRHNLVARIIHQQLALKYSLVESEVPYYRYVPDPVLENGNITLYWDRSIITDRTIVANKPDIVVIDRLERRTVIVDIAVPHDENLVKAEKDKQIKYLDLAREVVDMWDVDTAIIVPIVVTANGIIAKSLDQHLRRLSLGGWIKGLIQKAVLLDTARIVRRFLSQQP

SEQ ID NO: 10611 - protein, 1205 aa, Cosmia trapezina
MLTRSRAQHLKNTHPTSSGSSLSSASQLPEPAPDVSQVIPAAAVASSSSDEYFSPPTTPPPVRRRGRGRPPASLGPRGPPASDRVPAPGGSVQRMRWTQTVNENVMRAYFGATEGGSNLTAYRGRMLSLFQVLEPAVNVSAQRLSDQVRVIQRNHMLDDVVLDRLRLESRNSRVTSDSPMVAVQLQNLPSASPRPDRVGEEDDSGAISVSSQYNVQLRSALEDAFREYRSTPPGLRPRLPRLPMHKKNKALVCALDSQLSNCFDGSKDLADTHSILYCAAVAACRVAHVKFHNNDRVTRPKPAVPTWQCRIERRIGEARALIGKLICFREGNTRPRVMRFVRRAFSGMDISPRDYLTCVTERIDFLKQKICAWANRIRRYRRRVERYTQNRTFQSDERWVYRAWERPDQGVADTQLPDDDAMCSFWRSIWSVPVSHTEGDWTREVERACDHIPQMGALTISPQDVARAVRPLPNWKSPGPDGLHNFWIKWFQRSHARLASQFQSALQSGSLPQFLTTGITHLLHKSGSTAEPRNYRPITCLPTVYKVLTSILRAKINKHIDTNSIMSASQNGCGNGSRGTKELLLIDMTISQQVRRSRKDLSTCWIDYKKAYDSVPHTWLMRVLELYKIDATLRTFLMSCMGQWRTVLRYPGCRNIQRNSEPIRIERGIFQGDSLSPLWFCLALNPLSTLLEDSGLGYRLRRGGQVISHLLYMDDLKLFAPNNLQLMELLKVTETFSSAIRMEFGVDKCAVMHVKRGEIVESVRTQLSDSIHLRSLSSLETYKYLGMSEALGINAADMKQSLKERFFGRLNKVLNSLLSGGNKVRAFNGWVMPVLMYSFGILKWTQTELDALDRRVRTLLTANRMHHPRSSVMRLYIPRKCGGRGFLNAKTLHNREVCSLREYFLEADVGMHREVVSVDKGLTPLSLANENWRKPIVLDTNDRREVWQSKELHGRFYRVLHGPDVDFLASVSWLRFGDLFGETEGFVFAIMDEVMMTNNYRKYIVKDGTVDICRACHRPGESIRHIISGCSRLANGDYLHRHNLVARIIHQQLALKYSLVESEVPYYRYVPDPVLENGNITLYWDRSIITDRTIVANKPDIVVIDRLERRTVIVDIAVPHDENLVKAEKDKQIKYLDLAREVVDMWDVDTAIIVPIVVTANGIIAKSLDQHLRRLSLGGWIKGLIQKAVLLDTARIVRRFLSQQP

SEQ ID NO: 10612 - protein, 1200 aa, Cosmia trapezina
MLTRSATRKARLPPPDSSLSSASPPPVPSLTVSAVSTPAAVVASSSSDEYFSPPTTPPPARRRGGRRPPDGLGPRGPPASDRVPAPGGSVQRMRWTRAINENVMRSYYGATEGGNNLTAYRVRMHSLFQVLEPALNVSAQRLSDQVRVIQRNHMLDDTVLDRLRNEMQSSRVIAPLSQTIVAPPPPQCNTTQADEGSDGTAAHVSTQCNEELRSALEGAIQEYRFVSPELRPRLPRLPMHNKNRALVAALDSQLSNYFDDCEDLTDTHSILYCAAVAACRVAHVKFANDSRATRPKPAVPAWQCRIERRIGGARALIGKLICFREGNTRPRVMRFVKRAFSGTDVSPQDYMSRVTERIDFLRQKVYAWANRIRRYKRRVDRYTQNCTFQSDERWVYRGWERPDQGVTDTRLPDDDAMCSFWRSIWSVPVSHTEGDWAREVRRACDPIPEMGAITICPQDVARAVRPLPNWKSPGPDGLHNFWIKWFLGSHARLAAQYQSALQSGSLPQFLTTGITHLLHKSGSTTEPKNYRPITCLPTVYKVLTSILRAKINEHIDTNSIMSASQNGSRNGSRGTKELLLIDMAISQQVRRSRRDLSTCWIDYKKAYDSVPHTWLMRVLELYKVDATLRTFLMSCMGQWRTVLRYPGCRNIQRNSEPIRIERGIFQGDSLSPLWFCLALNPLSTLLENSGLGYRLRRGGQVISHLLYMDDLKLFAPSNLQLMELLKVTETFSSAIRMEFGVDKCAVMHVKRGEIVESVGTQLPDSINLRTLSAAETYKYLGMSEALGINVADMKQSLKERFFGRLKKVFNSLLSGGNKVRAFNGWVMPVLMYSFGILKWTQTELDALDRRVRTLLTAYRMHHPRSSVMRLYIPRKCGGRGFLNAKTLHNREICSLREYFLETDVGMHRDVVAVDKGLTPLSLAKENWRKPVVLDANDRMEVWQSKELHGRFFRALHGPDVNLLASVAWLRSGDLFGETEGFVCAIMDEVIMTNNYRRFIVKDGTVDICRACHRPGESIRHIISGCSRLANEEYLHRHNLVARIIHQQLALKYSLVESEVPYYRYVPDPVLENGHITLYWDRSIITDRTIVANKPDIVVVDRTERRAMIVDITVPHDGNLVKAEKDKQIKYIDLAREVVDMWDVDSAVIVPIVVSANGLIAKSLDQHLRRLSLGSWIKGLIQKAVLLDTARIVRRFLSLEP

SEQ ID NO: 10613 - protein, 1198 aa, Mamestra brassicae
MLTRAAAQRARLPPPASSLSSASPPPEPSPTVSAVIPAVAVASSSSDEYFSPPTSPPPARRRRGRRPPDGLGPRGPPASDRVPAPGGSVQRMRWTQTINENVMRSYYGATEGGTNLTAYRGRMLSLFQVLEPAVNVSAQRLSDQVRVIQRNRMLDDAVLDRLRLESRNGRVSAASPPAAVQIQFSVSPRPNIVGVYDDDGAISVSTQCNERLRSALEDAFREYRSTPPELRPRLPRLPMHNKNRALVCALDSQLANCFDSSEDLADTHSILYCAAAAACRVAHVKFPNSDRATRPAVPAWQCRIERRIGEARALIGKLICFREGNTRRRVMRFVRRAFSGTDTSPRDYLTRVTERIDFLKQKIYAWANRIRRYKRRVERYTQNGTFQSNERWVYRAWERPDQGVTDTRLPDDDVMCSFWRNIWSVPVSHTEGDWTREVERACDPIPEMGAITISPQDVARAVRPLPNWKSPGPDGLHNFWIKWFKRSHARLASQFQSALESGSLPQFLTTGITHLLHKSGSTAEPKNYRPITCLPTVYKVLTSILRAKINQHIETNSIMSASQNGCRNRSRGTKELLLIDVAISQQVRRSRRDLSTCWIDYKKAYDSVPHTWLMRVLELYKVDAVLRTFLMSCMGQWRTVLRYSGCRQIQANSDPIRIERGIFQGDSLSPLWFCLALNPLSTLLEGSGQGYRLRRGGQVISHLLYMDDLKLFAPNNLQLMKLLKVTETFSSAISMEFGVDKCAVMHVKRGEIMESVGTQLSDSIHLRSLSSTETYKYLGMLEALGINANDVKQSLKERFFGRLNKVLNSLLSGGNKVRAFNDWVMPVLMYSFGILKWTQTELDALDRRVRSLLTANRMHHPRSSVMRLYIPRKCGGRGFLNAKTLHNREICSLREFFLEADVGMHRDVVAVDKGLTALSLANENWRKPVVLDTNDRREVWQSKELHGRFYRVLHGPDVDFLASVAWLRFGDLFGETEGFVCAIMDEVMMTNNYRKYIVKDGTVDICRACHRPGESIRHIISGCSSLANGDYLHRHNLVARIIHQQLALKYNLVESEVPYYRYVPDPVLENGNCTLYWDWSIITDRTIIANKPDIVVIDRLERRAMIVDIAVPHDVNLVKTEKDKQTKYLDLAREVVDMWDVNTAVIVPIVVTANGIIAKSLDQHLKRLSLGSWIKGLIQKAVLLDTARIVRRFLSQGP

SEQ ID NO: 10614 - protein, 1194 aa, Mamestra brassicae
MLTRSRARHLATHPSPSASSLSSASPPPEPSPTVSAVTPAVAVASSSSDEYFSPPTTPPPARRRRGRRPPDGLGPRGPPASDRVPAPGGSVQRMRWTQSINKNVMRSYFGATEGGTNLTAYRGRMLSLFQVLEPAVNVSAQRLSDQVRVIQRNRMLDDSVLDRLRMEMCGHVITPPSQTVSPPQSQISSHADEESNDRVTNVSTQCNEELRSAFECAIREYRYIPPELRPRLPRLPMHNKNRALVAALDSQLSNYFDDCEDLTDTHSIMYCAAVAACRVATTNDRVTRPKPAVPAWQCRIERRIGGARALIGKLICFREGNTRPRVMRFVRRAFSGTDISPRDYMSRVTERIDFLKQKVYAWANRIRRYRRRVERYTQNRTFRSNERWVYRVWEQPDQGVTDTRLPDDDAMCSFWRNIWSVPVSHTEGGWIREVERACDPLPEMGAITISPQDVARALRPLPNWKSPGPDGLHNFWIKWLQRSHARLASQYQTALESGSLPEFLTTGVTHLLHKSGSTAEPKNYRLITCLPTVYKVLTSILRAKINNHINSNNIMSVSQNGCRNGSRGTKELLLIDMAISQQVRRFRKDLSTCWIDYKKAYDSVPHTWLMRVLELYKIDTMLRTFLMSCMGHWRTVLRYPGCRNIQRNSEPVRIERGIFQGDSLSPLWFCLALNPLSTLLENSGLGYRLKRGGQVISHLLYMDDLKLFAPSNLQLMELLKVTETFSSAIRMEFGVDKCAVMHVKRGEIMESVGTQLSDSINLSSLSSTETYKYLGMSEALGINVTDMKQSLRERFFGRLKKVFNSLLSGGNKVRAFNGWVMPVLMHSFGVLKWTQTDLDALDRRVRTLLTAYRMHHPRSSVMRLYIPRKCGGRGFLNAKTLHNREICSLREYFLAVDVGMHRDVVTVDKGLTPLSLANENWRKPVVLDTNDRRAVWQSKELHGRFFRALHGPDVDQLASVAWLRFGDLFGKTEGFVCAIMDEVIMTNNYRRFIVKDGTVDICRACHRPGESIRHIVSGCSRLANGEYLHRHNLVARIIHQQLALKYSLVESEVPYYRYAPDPVLDNGNITLYWDRSIITDRTIVANKPDIVVVDRIERRAMIVDITVPHDENLVKAEKDKQIKYIDLAREVVDMWDVDSAIIVPIVVSANGLIATSLDQHLRRLSLGSWIKGLIQKAVLLDTARIVRRFLSLEP

SEQ ID NO: 10615 - protein, 1197 aa, Mamestra brassicae
MLTRSRARHLATHPSPSASSLSSASPPPEPSPTVSAVTPAVAVASSSSDEYFSPPTTPPPARRRRGRRPPDGLGPRGPPASDRVPAPGGSVQRMRWTQSINENVMRSYFGATEGGTNLTAYRGRMLSLFQVLEPAVNVSAQRLSDQVRVIQRNRMLDDSVLDRLRMEMCGHVITPPSQTVSPPQSQISSHADEESNDRVTNVSTQCNEELRSALECAIREYRYIPPELRPRLPRLPMHNKNRALVAALDSQLSNYFDDCEDLTDTYSIMYCAAVAACRVAHVKMTNDRVTRPKPAVPAWQCRIERRIGGARALIGKLICFREGNTRPRVMRFVRRAFSGTDISPRDYMSRVTERIDFLKQKVYAWANRIRRYRRRVERYTQNRTFRSNERWVYRVWEQPDQGVTDTRLLDDDAMCSFWRNIWSVPVSHTEGGWIREVERACDPLPEMGAITISPQDVARALRPLPNWKSPGPDGLHNFWIKWLQRSHARLASQYQTALDSGSLPEFLTTGVTHLLHKSGSTAEPKNYRPITCLPTVYKVLTSILRAKINNHINSNNIMSVSQNGCRNGSRDTKELLLIDMAISQQVRRFRKDLSTCWIDYKKAYDSVPHTWLMRVLELYKIDTMLRTFLMSCMGQWRTVLRYPGCRNIQRNSEPVRIERGIFQGDSLSPLWFCLALNPLSTLLENSGLGYRLKRGGQVISHLLYMDDLKLFAPSNLQLMELLKVTETFSSAIRMEFGVDKCAVMHVKRGEIMESVGTQLSDSINLSSLSSTETYKYLGMWEALGINVTDMKQSLRERFFGRLKKVFNSLLSGGNKVRAFNGWVMPVLMHSFGVLKWTQTELDALDRRVRTLLTAYRMHHPRSSVMRLYIPRKCGGRGFLNAKTLHNREICSLREYFLAVDVGMHRDVVTVDKGLTPLSLANENWRKPAVLDTNDRRAVWQSKELHGRFFRALHGPDVDQLASVAWLRFGDLFGETEGFVCAIMDEVIMTNNYRRFIVKDGTVDICRACHRPGESIRHIVSGCSRLANGEYLHRHNLVARIIHQQLALKYSLVESEVPYYRYAPDPVLDNGNITLYWDRSIITDRTIVANKPDIVVVDRIERRAMIVDITVPHDENLVKAEKDKQIKYIDLAREVVDMWDVDSAIIVPIVVSANGLIATSLDQHLRRLSLGSWIKGLIQKAILLDTARIVRRFLSLEP

SEQ ID NO: 10616 - protein, 1197 aa, Mamestra brassicae
MLTRSRARHLATHPSPSASSLSSASPPPEPSPTVSAVTPAVAVASSSSDEYFSPPTTPPPARRRRGRRPPDGLGPRGPLASDRVPAPGGSVQRMRWTQSINENVMRSYFGATEGGTNLTAYRGRMLSLFQVLEPAVNVSVQRLSDQVRVIQRNRMLDDSVLDRLRMEMCGHVITPPSQTVAPPQSQISSHADEESNDRVTNVSTQCNEELRSALESAIREYRYIPPELRPRLPRLPMHNKNRALVAALDSQLSNYFDDCEDLTDTHSIMYCAAVAACRVAHVKMTNDRVTRPKPAVPAWQCRIERRIGGARALIGKLICFREGNNRPRVMRFVRRAFSGTDISPRDYMSRVTERIDFLKQKVYAWANRIRRYRRRVERYTQNRTFRSNERWVYRVWEQPDQGVTDTHLPDDDAMCSFWRNIWSVPVSHTEGDWIREVERACDPLPEMGAITISPQDVARAVRPLPNWKSPGPDGLHNFWIKWLQRSHARLASQYQTALESGSLPEFLTTGVTHLLHKSGSTAEPKNYRPITCLPTVYKVLTSILRAKINNHINSSNIMSVSQNGCRNGSRGTKELLLIDMAISQQVRRSRKDLSTCWIDYKKAYDSVPHTWLRRVLELYKIDTMLRTFLMSCMGQWRTVLRYPGCRNIQRNSEPVRIERGIFQGDSLSPLWFCLALNPLSTLLENSGLGYRLKRGGQVISHLLYMDDLKLFAPSNLQLMELLKVTETFSSAIRMEFGVDKCAVMHVKRGEIMESVGIQLSDSINLRSLSSTETYKYLGMSEALGINVTDMKQSLKERFFGRLKKVFNSLLSGGNKVRAFNGWVMPVLMYSFGVLKWTQTELDALDRRVRTLLTAYRMHHPRSSVMRLYIPRKCGGRGFLNAKTLHNREICSLREYFLAVDVGMHRDVVAVDKGLTPLSLANENWRKPAVLDTDDRRAVWQSKELHGRYFRALHEPDVDQLASVAWLRFGDLFGETEGFVCAIMDEVIMTNNYRRFIVKDGTVDICRACHRPGESIRHIVSGCSRLANGEYLHRHNLVARIIHQQLALKYSLVESEVPYYRYAPDPVLDNGNITLYWDRSIITDRTIVANKPDIVVVDRIERRAMIVDITVPHDENLVKAEKDKQIKYIDLAREVVDMWDVDSAIIVPVVVSANGLIATSLDQHLRRLSLGSWIKGLIQKAVLLDTARIVRRFLSLEP

SEQ ID NO: 10617 - protein, 1198 aa, Mamestra brassicae
MLTRAAAQRARLPPPASSLSSASPPPEPSPTVSAVIPAVAVASSSSDEYFSPPTSPPPARRRRGRRPPDGLGPRGPPASDRVPAPGGSVQRMRWTQTINENVMRSYYGATEGGTNLTAYRGRMLSLFQVLEPAVNVSAQRLSDQVRVIQRNRMLDDAVLDRLRLESRNGRVSAASPPAAVQIQSSVSPRPNIVGEDDDDGAISVSTQCNERLRSALEDAFREYRSTPPELRPRLPRLPMHNKNRALVCALDSQLANCFDSSEDLADTHSILYCAAAAACRVAHVKFPNSDRATRPAVPAWQCRIERRIGEARALIGKLICFREGNTRRRVMRFVRRAFSGTDTSPWDYLTRVTERIDFLKQKIYAWANRIRRYKRRVERYTQNRTFQSNERWVYRAWERPDQGVTDTRLPDDDVMCSFWRNIWSVPVSHTEGDWTREVERACDPIPEMGAITISPQDVARAVRPLPNWKSPGPDGLHNFWIKWFKRSHARLASQFQSALESGSLPQFLTTGITHLLHKSGSTAEPKNYRPITCLPTVYKVLTSILRAKINQHIETNSIMSASQNGCRNRSRGTKELLLIDVAISQQVRRSRRDLSTCWIDYKKAYDSVPHTWLMRVLELYKVDAVLRTFLMSCMGQWRTVLRYPGCRQIQANSDPIRIERGIFQGDSLSPLWFCLALNPLSTLLEGSGQGYRLRRGGQVISHLLYMDDLKLFAPNNLQLMKLLKVTETFSSAISMEFGVDKCAVMHVKRGEIMESVGTQLSDSIHLRSLSSTETYKYLGMSEALGINANDVKQSLKERFFGRLNKVLNSLLSGGNKVRAFNGWVMPVLMYSFGILKWTQTELDALDRRVRSLLTANRMHHPRSSVMRLYIPRKCGGRGFLNAKTLHNREICSLREFFLEADVGMHRDVVAVDKGLTALSLANENWRKPVVLDTNDRREVWQSKELHGRFYRVLHGPDVDFLASVAWLRFGDLFGETEGFVCAIMDEVMMTNNYRKYIVKDGTVDICRACHRPGESIRHIISGCSSLANGDYLHRHNLVARIIHQQLALKYNLVESEVPYYRYVPDPVLENGNCTLYWDRSIITDRTIIANKPDIVVIDRLERRAMIVDIAVPHDVNLVKTEKDKQTKYLDLAREVVDMWDVNTAVIVPIVVTANGIIAKSLDQHLKRLSLGSWIKGLIQKAVLLDTARIVRRFLSQGP

SEQ ID NO: 10618 - protein, 868 aa, Mamestra brassicae
MRFVRRAFSGTDTSPRDYLTRVTERIDFLKQKIYAWANRIRRYKRRVERYTQNRTFQSNERWVYRAWERPDQGVTDTRLPDDDVMCSFWRNIWSVPVSHTEGDWIREVERACDPILEMGATTISPQDVARAVRPLPNWKSPGPDGLHNFWIKWFTGSHARLASQFQSALESGSLPQFLTTGITHLLHKSGSTAEPKNYRPITCLPTVYKVLTSILRAKINHHIESNSIMSASQNGCRNGSRGTKELLLMDIAISQQVRRSRKDLSTCWIDYKKAYDSVPHTWLMRVLELYKVDAVLRTFLMSCMGQWRTVLRYPGCRQIQVNGDPIRIERGIFQGDSLSPLWFCLALNPLSTLLEGSGQGYRLRRGGQVISHLLYMDDLKLFAPNNLQLMELLKVTETFSSAISMEFGVDKCAVMHVKRGEIMESVGTQLSDSIHLRSLSSTETYKYLGMSEALGINANDMKQSLKERFFGRLNKVLNSLLSGGNKVRAFNGWVMPVLMYSFGILKWTQTELDALDRRVRSLLTANRMHHPRSSVMRLYIPRKCGGRGFLNAKTLHNREICSLREFFLEADVGMHRDVVAVDKGLTALSLANENWRKPVVLDTNDRREVWQSKELHGRFYRVLHGPDVDFLASVAWLRFGDLFGETEGFVCAIMDEVMMTNNYRKYIVKDGTVDICRACHRPGESIRHIISGCSSLANGDYLHRHNLVARIIHQQLALKYNLVESEVPYYRYVPDPVLENGNCTLYWDRSIITDRTIVANKPDIVVIDRLERRAMIVDIAVPHDENLVKTEKDKQTKYLDLAREVVDMWDVNTAVIVPIVVTANGIIAKSLDQHLKRLSLGSWIKGLIQKAVLLDTARIVRRFLSQGP

SEQ ID NO: 10619 - protein, 927 aa, Noctua fimbriata
MIRFNKCSIIYGLFVDQLLLVTYKELKLYTHAKLFVHFFTYFKSKPNDNLVFSYNNNNNNNNNRRAFSGTDISPRDYMSRITERIDFLKQKVYAWANRIRRYKRRVDRYTQNRTFQRDERWVYRAWERPDQGVADTRLPDDDAMCSFWRSIWSVPVSHTEGEWTQGVERACDLVPEMGAITISPQDVVRAVRPLPNWKSPGPDGLHNFWIKWFTRSHARLAILFQSALESGSLPEFLTTGITHLLHKSGSTAEPKNYRPITCLPTVYKVLTSILRAKINKHIDDNSIMSASQNGCRNGSRGTKELLLIDMAISQQVRRSRRDLSTCWIDYKKAYDSVPHTWLMRVLELYKVDATLRTFLMSCMGQWRTVLRYPGCRQIQRNSEPIRIERGIFQGDSLSPLWFCLALNPLSTLLEDSGLGYRLRRGGQVISHLLYMDDLKLFAPNDLQLMELLKVTETFSSAIRMEFGVDKCAVMHVKRGEIVESVGTQLSDSINLRSLSATESYKYLGMSEALGINVADMKQSLKERFFGRLKKVFNSLLSGGNKVRAFNGWVMPVLMYSFGILKWTQTELDALDRRVRTLLTAYRMHHPRSSLMRLYIPRKCGGRGFLNAKTLHNREICSLREYFLETDVGMHRDVVAVDKGLTPLSLAKENWRKPLVLDTNDRMEVWQSKELHGRFFRALHGPDVDLAASVAWLRSGDLFGETEGFVCAIMDEVMMTNNYRRFIVKDGTVDICRACHRPGESIRHIISGCSRLANGEYLHRHNLVARIIHQQLALKYNLVESEVPYYKYVPDPVLENGSITLYWDQSIITDRTIVANKPDIVVVDRSERRTMIVDITVPHDENLVKAEKDKKIKYLDLAREVVDMWDVDSAIIVPIVVSAHGLIAKSLDQYLRRLSLGSWIKGLIQKAVLLDTARIVRRFLSLEP

SEQ ID NO: 10620 - protein, 1197 aa, Noctua fimbriata
MLTRSATRRARLLPPDPSLSSASPPPESSPTVSAVTPAVAVASSSSDEYFSPPTTPPPVRRRRGRRPPDGLGPRGPPASDRVPAPGGSVQRMRWTQSINENVMRSYYGATEGGNNLTAYRVRMLSLFQVLEPAVNVSAQRLSDQVRVIQRNRMLDDTVLDRLRTETQSSHVITPSAQAVVLPQSSTIPNRDNDVSNDMVTNVSTQCNEEMRSALEGAIREYRFMQPDLRPRIPRLPMHNKNRALVAVLDSQLSNYFDNCEDLTDAHSILYCAAVAACRVAHVKFSDDRATRPKPAVPPWQYRIERRIGGARALIGKLICFREGNTRPRVMSFVRRAFSGTDISPRDYMSRITERIEILKQKVYAWASRIRRYKRRVDRYTQNRTFQRDERWVYRTLERPGQGVTDTRIPDDDAMCSFWRSIWSVPVSHTEGEWTREVEQACDLVPEMGAITISPQDVVRAVRPLPNWKSPGPDGLHNFWIKWFTRSHARLAILFQSALESGSLPEFLTTGITHLLHKSGSTAEPKNYRPITCLPTVYKVLTSILRAKINKHIDDNSIMSASQNGCRNGSRGTKELLLIDMAISQQVRRSRRDLSTCWIDYKKAYDSVPHTWLMRVLELYKVDATLRTFLMSCMGQWRTVLRYPGCRQIQRNSEPIRIERGIFQGDSLSPLWFCLALNPLSTLLEDSGLGYQLRRGGQVISHLLYMDDLKLFAPNDLQLMELLKVTETFSSAIRMEFGVDKCAVMHVKRGEIVESVGIQLSDSINLRSLSATETYKYLGMSEALGINVADMKQSLKERFFGRLKKVFNSLLSGGNKVRAFNGWVMPVLMYSFGILKWTQTELDALDRRVRTLLTAYRMHHPRSSVMRLYIPGKCGGRGFLNAKTLHNREICSLREYFLETDVGMHRDVVAVDKGLTPLSLAKENWRKPLVLDTNDRVEVWHSKELHGRFFRALHGPDVDLSASVAWLRSGDLFGETEGFVCAIMDEVMMTNNYRRFIVKDGTVDICRACHRPGESIRHIISGCSRLANGEYLHRHNLVARIIHQQLALKYNLVESEVPYYKYVPDPVLENGSITLYWDQSIITDRTIVANKPDIVVVDRSERRTMIVDITVPHDENLVKAEKDKKIKYLDLAREVVDMWDVDSAIIVPIVVSAHGLIAKNLDQYLRRLSLGSWIKGLIQKAVLLDTARIVRRFLSLEP

SEQ ID NO: 10621 - protein, 1198 aa, Noctua fimbriata
MLTRAAAKRARLSPPDPSLSSASPPPESSPVMSAVTPAVAVASSSSDEYFSPPTTPPPVRRRGGRRPPDGLGPRGPPASDRVPAPGGSVQRMRWTQSINENVMRSYYGATEGGNNLTAYRVRMLSLFQVLEPAVNVSAQRLSDQVRVIQRNRMLDDTVLDRLRTEMQSSHVIATPPPQAVVPPQSTIIPNRDNDVSNDIVTNVSTQCNEEMRSALEGAIREYRFMQPDLRPRIPHLPMHNKNRALVAVLDSQLSNYFDNCEDLTDAHSILYCAAVAACRVAHVKFSNDRATRPKPAVPPWQYRIERRIGGARALIGKLICFREGNTRPRVMRFVRRAFLGTDISPRDYMSRITERIDFLKQKVYAWANRIRRYKRRVDRYTQNRTFQRDERWVYRAWERPDQGVADTRLPDDDAMCSFWRSIWSVPVSHTEGEWTQGVERACDLVPEMGAITISPQDVVRAVRPLPNWKSPGPDGLHNFWIKWFTRSHARLAILFQSALESGSLPEFLTTGITHLLHKSGSTAEPKNYRPITCLPTVYKVLTSILRAKINKHIDDNSIMSASQNGCRNGSRGTKELLLIDMAISQQVRRSRRDLSTCWIDYKKAYDSVPHTWLMRVLELYKVDATLRTFLMSCMGQWRTVLRYPGCRQIQRNSEPIRIERGIFQGDSLSPLWFCLALNPLSTLLEDSGLGYRLRRGGQVISHLLYMDDLKLFAPNDLQLMELLKVTETFSSAIRMEFGVDKCAVMHVKQGEIVESVGTQLSDSINLRSLSATETYKYLGMSEALGINVADMKQSLKERFFGRLKKVFNSLLSGGNKVRAFNGWVMPVLMYSFGILKWTQTELDALDRRVRTLLTAYRMHHPRSSIMRLYIPRKCGGRGFLNAKTLHNREICSLREYFLETDVGMHRDVVAVDKGLTPLSLAKENWRKPLVLDTNDRMEVWQSKELHGRFFRALHGPDVDLSASVAWLRSGDLFGETEGFVCAIMDEVMMTNNYRRFIVKDGTVDICRACHRPGESIRHIISGCSRLANGEYLHRHNLVARIIHQQLALKYNLVESEVPYYKYVPDPVLENGSITLYWDQSIITDRTIVANKPDIVVVDRSERRTMIVDITVPHDENLVKAEKDKKIKYLDLAREVVDMWDVDSAIIVPIVVSAHGLIAKSLDQYLRRLSLGSWIKGLIQKAVLLDTARIVRRFLSLEP

SEQ ID NO: 10622 - protein, 1198 aa, Noctua fimbriata
MLTRSAAARRARLLPPDPSLSSASPPPESSPIVSAVTPAVAVASSSSDEYFSPPTTPPPVRRRGGRRPPDGLGPRGPPASDRVPAPGGSVQRMRWTQSINENVMRSYYGATEGGNNLTAYRVRMLSLFQVLEPAVNVSAQRLSDQVRVIQRNRMLDDTVLDRLRTEMQSSHVITPSAQAVVLPQSSTITNRDNDVSNDMVTNVSTQCNEEMRSALEGAIREYRFMQPDLRPRIPRLPMHNKNRALVAVLDSQLLNYFDNCEDLTDAHSVLYCAAVAACRVAHVNFFDDRATRPKPVVPPWQYRIERRIDGARALIGKLICFREGNTRPRVMRFVRRAFSGTDISPRDYMSRITERIDFLKQKVYAWASRIRRYKRRVDRYTQNRTFQRDERWVYRAWERPDQGVADTRIPDDDAMCSFWRSIWSVPVSHTEGEWTREVERACDLVPEMGAITISPQDVVRAVRPLPNWKSPGPDGLHNFWIKWFTRSHARLAILFQSALESGSLPEFLTTGITHLLYKSGSTAEPKNYRPITCLPTVYKVLTSILRAKINKHIDDNSIMSASQNGCRNGSRGTKELLLIDMAISQQVRRSRRDLSTCWIDYKKAYDSVPHTWLMRVLELYKVDATLRTFLMSCMGQWRTVLRYPGCQQIQRNSEPIRIERGIFQGDSLSPLWFCLALNPLSTLLEDSGLGYQLRRGGQVISHLLYMDDLKLFAPNDLQLMELLKVTETFSSAIRMEFGVDKCAVMHVKRGEIVESVGTQLSDSINLRSLSATETYKYLGMSEALGINVADMKQSLKERFFGRLKKVFNSLLSGGNKVRAFNGWVMPVLMYSFGILKWTQTELDALDRRIRTLLTAYRMHHPRSSVMRLYIPRKCGGRGFLNAKTLHNREICSLREYFLETDVGMHRDVVAVDKGLTPLSLAKENWRKPLVLDTNDRMEVWQSKELHGRFFRALHGPDVDLSASVAWLRSGDLFGETEGFVCAIMDEVMMTNNYRRFIVKDGTVDICRACHRPGESIRHIISGCSRLANGEYLHRHNLVARIIHQQLALKYNLVESEVPYYKYVPDPVLENGSITLYWDQSIITDRTIVANKPDIVVVDRSERRTMIVDITVPHDENLVKAEKDKKIKYLDLAREVVDMWDVDSAIIVPIVVSAHGLIAKSLDQYLRRLSLGSWIKGLIQKAVLLDTARIVRRFLSLEP

SEQ ID NO: 10623 - protein, 1198 aa, Noctua fimbriata
MLTRSAARRARLSPPDPSLSSASPPPESSPVVSAVTPAVAVASSSSDEYFSPPTTPPPVRRRGGRRPPDGLGPRGPPASDRVPAPGGSVQRMRWTQSINANVMRAYYGTTEGGNNLTAYRVRMLSLFQVLEPAVNVSAQRLSDQVRVIQRNRMLDDTVLDRLRTEMQSSHVNATPPPQAVVPPQSTIIPNRDNDVSNDIVTNVSTQCNEEMRSALEGAIREYRFMQLDLRPRVPRLPMHNKNRALVAVLDSQLSNYFDNCEDLTDAHSILYCAAVAACRVAHVKFYDDRATRPKPVVPPWQYRIERRIGGARALIGKLICFREGNTRPRVMRFVRRAFSGTDISPRDYMSRITERIDFLKQKVYAWASRIRRYKRRVDRYTQNRTFQRDERWVYRAWERPDQGVADTRIPDDDAMCSFWRSIWSVPVSHTEGEWTREVERACDLVPEMGAITISPQDVVRAVRPLPNWKSPGPDGLHNFWIKWFTRSHARLAILFQSALESGSLPEFLTTGITHLLHKSGSTAEPKNYRPITCLPTVYKVLTSILRAKINKHIDDNSIMSASQNGCRNGSRGTKELLLIDMAISQQVRRSRSDLSTCWIDYKKAYDSVPHTWLMRVLELYKVDATLRTFLMSCMGQWRTVLRYPGCRQIQRNSEPIRIERGIFQGDSLSPLWFCLALNPLSTLLEDSGLGYRLRRGGQVISHLLYMDDLKLFAPNDLQLMELLKVTETFSSAIRMEFGVDKCAVMHVKRGEIVESVGTQLSDSINLRSLSATETYKYLGMSEALGINVADMKQSLKERFFGRLKKVFNSLLSGGNKVRAFNGWVMPVLMYSFGILKWTQTELDALDRRVRTLLTAYRMHHPRSSVMRLYIPRKCGGRGFLNAKTLHNREICSLREYFLETDVGMHRDVVAVDKGLTPLSLAKENWRKPLVLDTNDRMEVWQSKELHGRFFRALHGPDVDLSASVAWLRCGDLFGETEGFVCAIMDEVMMTNNYRRFIVKDGTVDICRACHRPGESIRHIISGCSRLANGEYLHRHNLVARIIHQQLALKYNLVESEVPYYKYVPDPVLENGSITLYWDQSIITDRTIVANKPDIVVVDRSERRTMIVDITVPHDENLVKAEKDKKIKYLDLAREVVDMWDVDSAIIVPIVVSAHGLIAKSLDQYLRRLSLGSWIKGLIQKAVLLDTARIVRRFLSLEP

SEQ ID NO: 10624 - protein, 1198 aa, Atethmia centrago
MLTRSAAVRARLPPPDSSLSSASPPPVPSPTVCAVTTPTAAVASSSSDEYFSPPTTPPPVRRRGGRRPPDGLESRGPPASDRVPAPGGSVKRMRWTQSVNENVMRSYYGATEGGNNLTAYRVRMLSLFQVLEPAVNVSAQRLSDQVRVIQRNHMLDDTVLDRLRSEMQRSHVIVPPSQTVVLSPQLSTNQADEGSDDRATNVSTQCNVELRSALEDAIREYRLMSPELRPRLPRLPMHKKNRALVAALDSQLSNYFDDCEDLTDTHSILYCAAVAVCRVAHVKFAKDSRTTRPKPTVPAWQCRIESRIGGARALIGKLICFREGNTRPRVTRFVRRAFSGTDIGPQDYMTRVTERIDFLKQKVYAWANRIRRYKRRVERYTQNRTFQSDERWVYRGWERPDQDVTDTRLPDDDVMCSFWRSIWSVPVSHTEGDWAPKVERACDPIPEMGAITICPQDVARAVRPLPNWKSPGPDGLHNFWLKWFLRSHARLAAQYQTALESGSLPQFLTTGVTHLLHKSGSTAEPKNYRPITCLPTVYKLLTSNLRAKINKHIDTNSIMSASQNGCRNGSRGTKELLLIDMTISQQVRHSRKDLSTCWIDYKKAYDSVPHTWLMRVLELYKVDATLRTFLISCMGQWRTVLRYPGCRNIQRNSEPIRIERGIFQGDSLSPLWFCLALNPLSTLLEDSGLGYRMRRGGQVISHLLYMDDLKLFASNNLQLMELLKITESFSSAIRMEFGVDKCAVMHVKRGKIVESVGTQLSDSINLRTLSASETYKYLGMSEALGINVTDMKQSLKEHFFCRPKKVFNSLLSGGNKVRAFNGWVMPVLMYSFGILKWTQTELDALDRRVRTLLTAYRMHHPRSSVMRLYIPRKCGGRGFLNAKTLHNREVCSLREYFLEADVGMHRDVVAVDKGLTPLSLAKENWRKLVVLDTNDRREVWQSKELHGRFFRALHEPDVDFQASVAWLRFGDLFGETEGFVCAIMDEVIMTKNYRRFIVKDGTVDVCRACHRPGESIRHIISGCSRLANEEYLHRHNLVARIIHQQLALKYSLVESEVPYYRYVPDPVLDNGNITLYWDRSIITDRTIVANKPDIVVVDRTERRAMIVDITVPHDGNLVKAEKDKQIKYLDLAREVVDMWDVDSAIIVPIVVSANGLIAKSLDQHLKRLKLDGWIKGLIQKAVLLDTARIVRRFLSLEP

SEQ ID NO: 10625 - protein, 1198 aa, Atethmia centrago
MLTRSAAVRARLPPPDSSLSSASPPPVPSPTVCAVTTPTAAVASSSSDEYFSPPTTPPPVRRRGGRRPPDGLGSRGPPASDRVPAPGGSVKRMRWTQSVNENVMRSYYGATEGGNNLTAYRVRMLSLFQVLEPAVNVSAQRLSDQVRVIQCNHMLDDTVLDRLRSEMQRSHVIVPPSQTVVHSPQLSTNQADEGSDDRATNVSTQCNVELRSALEDAIREYRLMSPELRPRLPRLPMHKKNRALVAALDSQLSNYFDDCEDLTDTHSILYCAAVAVCRVAHVKFAKDSRTTRPKPTVPAWQCRIESRIGGARALIGKLICFREGNTRPRVMRFVRRVFSGTDIGPQDYMTRVTERIDFLKQKVYAWANRIRRYKRRVERYTQNRTFQSDERWVYRGWERPDQDVTDTRLPDDDVMCSFWRSIWSVPVSHTEGDWARKVERACDPIPEMGAITICPQDVARAVRPLPNWKSPGPDGLHNFWLKWFLRSHARLAAQYQTALESGSLPQFLTTGVTHLLHKSGSTAEPKNYRPITCLPTVYKLLTSILRAKINKHIDTNSIMSASQNGCRNGSRGTKELLLIDMTISQQVRRSRKDLSTCWIDYKKAYDSVPHTWLMRVLELYKVDATLRTFLISCMGQWRTVLRYPGCRNIQRNSEPIRIERGIFQGDSLSPLWFCLALNPLSTLLEDSGLGYRMRRGGQVISHLLYMDDLKLFASNNLQLMELLKITESFSSAIRMEFGVDKCAVMHVKRGKIVESVGTQLSDSINLRTLSASETYKYLGMSEALGINVTDMKQSLKERFFGRLKKVFNSLLSGGNKVRAFNGWVMPVLMYSFGILKWTQTELDALDRRVRTLLTAYRMHHPRSSVMRLYIPRKCGGRGFLNAKTLHNREVCSLREYFLEADVGMHRDVVAVDKGLTPLSLAKENWRKLVVLDTNDRREVWQSKELHGRFFRALHEPDVDFQASVAWLRFGDLFGETEGFVCAIMDEVIMTKNYRRFIVKDGTVDVCRACHSPGESIRHIISGCSRLANEEYLHRHNLVARIIHQQLALKYSLVESEVPYYRYVPDPVLDNGNITLYWDRSIITDRTIVANKPDIVVVDRTERRAMIVDITVPHDGNLVKAEKDKQIKYLDLAREVVDMWDVDSAIIVPIVVSANGLIAKSLDQHLKRLTLDGWIKGLIQKAVLLDTARIVRRFLSLEP

SEQ ID NO: 10626 - protein, 1198 aa, Atethmia centrago
MLTRSAAVRARLPPPDSSLSSASPPPVPSPTVCAVTTPTAAVASSSSDEYFSPPTTPPPVRRRGGRRPPDGLGSRGPPASDRVPAPGGSVKRMRWTQSVNENVMRSYYGATEGGNNLTAYRVRMLSLFQVLEPAVNVSAQRLSDQVRVIQRNHMLDDTVLDRLRSEMQRSHVIVPPSQTVVHSPQLSTNQADEGSDDRATNVSTQCNVELRSALEDAIREYRLMSPELRPRLPRLPMHKKNRALVAALDSQLSNYFDDCEDLTDTHSILYCAAVAVCRVAHVKFAKDSRTTRPKPTVPAWQCRIESRIGGARALIGKLICFREGNTRPRVMRFVRRAFSGTDIGPQDYMTRVTERIDFLKQKVYAWANRIRRYKRRVERYTQNRTFQSDERWVYRGWERPDQDVTDTRLPDDDVMCSFWRSIWSVPVSHTEGDWARKVERACDPIPEMGAITICPQDVARAVRPLPNWKSPGPDGLHNFWLKWFLRSHARLAAQYQTALESGSLPQFLTTGVTHLLHKSGSTAEPKNYRPITCLPTVYKLLTSILRAKINKHIDTNSIMSASQNGCRNGSRGTKELLLIDMTISQQVRRSRKDLSTCWIDYKKAYDSVPHTWLMRVLELYKVDATLRTFLISCMGQWRTVLRYPGCRNIQRNSEPIRIERGIFQGDSLSPLWFCLALNPLSTLLEDSGLGYRMRRGGQVISHLLYMDDLKLFASNNLQLMELLKITESFSSAIRMEFGVDKCAVMQVKRGKIVESVGTQLSDSINLRTLSASETYKYLGMSEALGINVTDMKQSLKERFFGRLKKVFNSLLSGGNKVRAFNGWVMPVLMYSFGILKWTQTELDALDRRVRTLLTAYRMHDPRSSVMRLYIPRKCGGRGFLNAKILHNREVCSLREYFLEADVGMHRDVVAVDKGLTPLSLAKENWRKLVVLDTNDRREVWQSKELHGRFFRALHEPDVDFQASVAWLRFGDLFGETEGFICAIMDEVIMTKNYRRFIVKDGTVDVCRACHRPGESIRHIISGCSRLANEEYLHRHNLVARIIHQQLALKYSLVESEVPYYRYVPDPVLDNGNITLYWDRSIITDRTIVANKPDIVVVDRTERRAMIVDITIPHDGNLVKAEKDKQIKYLDLAREVVDMWDVDSAIIVPIVVSANGLIAKSLDQHLKRLTLDGWIKGLIQKAVLLDTARIVRRFLSLEP

SEQ ID NO: 10627 - protein, 1194 aa, Autographa gamma
MLTRSRTRTPARPPSPDPSPSSAAQLPDHVPAPAPAVASSSSDEYYSPPTTPTPVRRQGRRRPPSSLAPAGQPASSRAPAPGGDVRRMKWTLSINENVMRAYYGATEGGTNLTAYRARMLSLFQGLEPGVSVSAQRLSDQVRVIQRNHRLDDATLDRLRSEVQRSPAASTPSPAVVPVTGSPPTNPVDGEEEDGAITVSTQCSENVRSTLEDTIREFRSTPPDIRPRLPRLPMHNRNKAIMGVLDSLLLAYFGSSEDLSDTHSILYCAALAACRVANVKINNHKLDTRPKPAVPAWQCRIERRVAEARALIGKLIAFKDGNSRPRVMRFVRRAFTGTSISPSEYTARVTERIDFFKQKVCAWASRIRRYKCRVDRFHLNRMFQRDQRWVFRTWERPVLGVDDGRLPDEDATNSFWRNIWSVPVSHSEGDWMRDVEESCEPIQEMGAITISPQDVANAIRPMSNWKAPGPDGLQNFWLKWFKSSHGCLASQFQYAIESESLPQFFTTGSTHLLHKTGSTTDPKNYRPITCLPTIYKLLTSILRVKINEHIDSNAIMSASQNGCRNGSRGTKELLLIDMTICQQVRRSKKNLSTCWIDYKKAYDSVPHSWLMRVLELYKINTTLRAFLLSCMRRWTTVLRYPGCRDIQQSGGPIRIERGIFQGDSLSPLWFCLALNPLSTLLENSRLGYSLRRGSQVISHLLYMDDLKLFASNELQLMGLLKITESFSNSIRMEFGVDKCAVMHVKQGGIVESQGIQLSDSINLRSLSAADTYKYLGMSEALGINVADMKQSLLTRFFGRLNKVLKSLLSGGNRVRAFNGWVMPVLMYSFGILKWTQTELDAVDRRVRTLLTANRMHHPRSSVMRLYIPRKCGGRGFLNAKTLHNREVCNLREYFLQVNVGMHRDVVVVDKGFTPLSLGKENWHRPVVLSVKDRKDVWQSKELHGRYYRTLHGPDVDFLASVAWLRFGDLFGETEGFVCAIMDEVVMTNNYRKYIIKDGTVDICRACHCPGESIRHIISGCSRLANGEYLHRHNQVARIIHQQLALRYKLVEAEVPYYRYVPDPVLDNGHVTLYWDRSIITDRTIVANKPDIVVIDRSERRAMIVDVTIPHDENLVKAEKEKQLKYLDLAHEVVDMWEVDSAVIVPIVVTANGIIAKSLDQHLKRLSLGTWVKGLMQKAVLLDTARIVRRFLSLEP

SEQ ID NO: 10628 - protein, 1206 aa, Mesoligia furuncula
MLTRSRARHLLENTHPTSSGSPLSSASQLPDPAPDVSSVRPAAAVASSSSDEYFSPPTTPPPVCRRGRGRPPASLGLRGPPASDRVPAPGGSVQRMRWTQTVNENVMRSYFGATEGGSNLTAYRGRMLSLFQVLEPAVNVSAQRLSDQVRIIQRTHMLDNVVLDRLRLESRNSHVTPASSSVAVHLQNVPSVSPRPDHVHVEDDDEAISVSSQCNARLRSALEDAFREYRSIPPGLRPPLPRLPMHKKNKALVCALDSQLSNCFNNSKDLTDTHSILYCAAVAACRVAHVKFPNSDRAPRPKPAVPAWQCRIECRIGEARALIGKLICFREGNTRPRVMRFVRRAFSGTDISSRDYLSRVTERIDFLKQKIYAWANRIRRYRRRVERYTQNRTFQSDERWVYRAWERPDHGVTDTRLPDDGAMCSFWRNIWSVPVSHTEGDWTAKIERACDLIPEMGVLTISPQDVARAVRPLPNWKSPGPDGLHNFWIKWFQGSHARLASQFQSALESGLLPQFLTTGITHLLHKSGSTADPKNYRPITCLPTVYKVLTSILKAKINKHIDTNSIMSVSQNGCKNGSRGTKELLLIDMTISQQVRRSRKDLSTCWIDYKKAYDSVPHTWLMRVLELYKVDTTLRTFLMSCMRQWRTVLRYPGCRNIQRNSEPIRIERGIFQGDSLSPLWFCLALNPLSTLLEDSGLGYRMRRGGQAISHLLYMDDLKLLAPNNLQLMELLKITETFSSAIRMEFGVDKCAVMHVKRGVIVESVGIQLSDSTNLRALSASETYKYLGMSEALAINVTDMKQSLKERFFGRLKKVFNSLLSGGNKVRAFNGWVMPVLMYSFGILKWTQTELDALDRKVRTLLTANRMHHPRSSVMRLYIPRKCGGRGFLNAKTLHNREICSLREYFLETDVGMHRDVVAVDKGLTPLSLGKENWRKPVVLETNDRMEVWQSKELHGRFFRALHGPDVDLLASVAWLRFGDLFGETEGFVCAIMDEVMMTKNYRRFIVKDGTVDICRACHRPGESIRHIISGCSRLANGEYLHRHNLVARIIHQQLALKYNLVESEVPFYRYVPDPVLENGNITLYWDRSIITDRTIVANKPDIVVVDRSERRAMIVDITVPHDENLVKAEKDKQVKYLDLAREVVDMWDVASAIIVPIVVTANGLIAKSLDQHLKRLSLGSWIKGLIQKAVLLDTARIVRRFLSLEP

SEQ ID NO: 10629 - protein, 1206 aa, Mesoligia furuncula
MLTRSRARYLLENTHPTSSGSPLSSASQLPDPAPDVSSVRPAAAVASSSSDEYFSPPTTPPPVCRRGRGRPPASLGLRGPPASDRVPAPGGSLQRMRWTQTVNENVMRAYFGATEGGSNLTAYRGRMLSLFQVLEPAVNVSAQRLSDQVRVIQRNHMLDNVVLDRLRLESRNSHVTPASSSVAVHLQNVPSVSPRPDHVHVEDDDEAISVSSQCNARLRSALEDAFREYRSIPPGLRPRLPRLPMHKKNKALVCALDSQLSNCFNNSKDLTDTHSILYCAAVAACRVAHVKFPNSDRAPRPKPAVPAWQCRIECRIGEARALIGKLICFREGNTRPRVMRFVRRAFSGTDISSRDYLSRVTERIDFLKQKIYAWANRIRRYRRRVERYTQNRTFQSDERWVYRAWERPDHGVTDTRLPDDGAMCSFWRNIWSVPVSHTEGDWTAKLERACDLIPEMGVLTISPQDVARAVRPLPNWKSPGPDGLHNFWIKWFQGSHARLASQFQSALESGSLPQFLTTGITHLLHKSGSTADPKNYRPITCLPTVYKVLTSILKAKINKHIDTNSIMSVSQNGCKNGSRGTKELLLIDMTISQQVRRFRKDLSTCWIDYKKAYDSVPHTWLMRVLELYKVDTTLRTFLMSCMRQWRTVLRYPGCRNIQRNSEPIRIERGIFQGDSLSPLWFCLALNPLSTLLEDSGLGYRMRRGGQAISHLLYMDDLKLFAPNNLQLMELLKITETFSSAIRMEFGVDKCAVMHVKRGVIVESVGIQLSDSTNLRALSASETYKYLGMSEALAINVTDMKQSLKERFFGRLKKVFNSLLSGGNKVRAFNGWVMPVLMYSFGILKWTQTELDALDRKVRTLLTANRMHHPRSSVMRLYIPRKCGGRGFLNVKTLHNREICSLREYFLETDVGMHRDVVAVDKGLTPLSLGKENWRKPVVLDTNDRMEVWQSKELHGRFFRALHGPDVDLIASVAWLRFGDLFGETEGFVCAIMDEVMMTNNYRRFIVKDGTVDICRACHRPGESIRHIISGCSRLANGEYLHRHNLVARIIHQQLALKYSLVESEVPYYRYVPDPVLENGNITLYWDRAIITDRTIVANKPDIVVVDRSERRAMIVDITVPHDENLVKAEKDKQVKYLDLAREVVDMWDVDSAIIVPIVVTANGLIAKSLDQHLKRLSLGSWIKGLIQKAVLLDTARIVRRFLSLEP

SEQ ID NO: 10630 - protein, 1190 aa, Spilarctia lutea
MLTRARRRAQLSPPDSSLRSALPSPEEAIEVPAGAEASSSSSSDEFFSPPTSPIPLRRQGRGRPPTSLGSRGPLTSNRAPAAGGDVRRMKWTHSINENVMRAYFRATELGTNLTAYRVRLVSLFRELEPAVNVSAQRLSDQVRAIQRCHLLDDDALERIRSDIRNSLTVPSSSHVLNVVTNSPPQVPQNDDISELVDSEIISVSTQYNDRIRSTLEDAIREYRLSRLPIHKRNLALVSALDSLLPKYFSNSEDLSDTHSILYCAAIAVCRVAGVKFAEYTTTTRQENTLPAWQYRIERRIAEARTLIGKLMSFRSGNTRPRVMRFVKRAFLGTTISPQEYMSCVTERIDFLKQKVYAWANRIRRYRKRVDRYNQNRMFQRNEKWVYRKWENLSPCMSDGQVPDENATNSFWRNMWSVPVTHTEGDWYRDVERSCESLLPMEPISIDEEDVSCAVRSLPNWKAPGPDGLHNFWLKWFRSSHACLASQFQTALDSGSLPQFLTTGITHLLYKSGDAMDPKNFRPITCLPTLYKLLTSILRLKITTHINHNSILSISQNGCRSGTRGTKELLIIDMTISQQVRRNRKSLATCWIDYKKAFDSVPHTWLLKVLELYKIDTTLCTFLKVCMGQWRTALRYPGCRQSAMNDVLIKIERGIFQGDSLSPLWFCLALNPLSTLLEGSGLGYRLQKDDRVISHLFYMDDLKLLAPTKLQLTALLKVTENFSNSIKMEFGVDKCAVMYVKKGEIVESEGIELSDSTKLRSLSATETYKYLGFLQSLGMPESDMKQTLRERFFSRLKKVLKSLLSGGNKVRACNGWVMPVLMYSFGVLRWTQTELDAIDRRVRTLLTAFRMHHPRSSVMRLYIPRRLGGRGLLNIKTLHNREVYNLREYFLQTDVGVHRSVVTVDTGLTPLALAKENWRKPVVLGTNDRREVWKGKVLHGRFYRALNGPDIDFKASTSWLRYSDLFGETEGFVCAIMDEVIMTNNYRKYILKDGTVDICRACHRPGDSIRHIISGCSRLANGEYLHRHNQVARIVHQQLALKYNLVISEVPYYRYVPDPVLENGRATLYWDRSIITDRTIVANKPDIVVIDRIERRAMIVDIAVPHDENLVKVEKEKQIKYLDLSHEIVDMWNVDSVIIVPIVVSAHGLIAKSLDQHLKRLTLGGWIKGLIQKAVLLDTARIVRRFLSLEP

SEQ ID NO: 10631 - protein, 1199 aa, Spilarctia lutea
MLTRARLRAQLSPPDSSLRSTLPSPEAITEVPVDAEASSSSSSDEFFSPPTSPIPVRRQGRGRPPTSLGSRGPLTSNRAPATGGDVRRMKWTHSINENVMRAYFRATELGTNLTAYRVRLVSLFQELEPSVNVSAQRLSDQVRAIQRCHLLDDAVLERIRSDIRNVLIVPSSSHAVDLIPINTPQLPHDHYVDELVESEDISVSTQCNNKIRSALEDAIQEYRYVNWNNRPRLPRLPIHKRNLALVSALDSLLSDYFDNSEDLSDTHSILYCAAVAVCRVANVKFRENMTYVRPKNTIPAWQCRIERRIAETRTLIGKLVSFRSGNTRPRVMRFVKHAFSGTTISPGQYMSCVTERIDFLKQKVYAWANRIRRYRKRVDRYNQNRMFQRNEKWVYRKWEEPSPSVSDGQFPDDNATNTFWRSIWSVPVTHTEGDWCRDVERSCESILPMEPLTIGKDDVSCAARSLPNWKSPGPDGLHNFWLKWFRSSHACLASQFQAAVDSSSLPQFLTTGITHLLYKSGGAMDPKNFRPITCLPTVYKLLTSILRLKISTHINNNSIISVSQNGCRSGTRGTKELLIMDMTISQQVRRNRKSLATCWIDYKKAYDSVPHTWLLRVLELYKIDTTLCTFLKSCMGQWRTVLRYPGCRQSAMTDVLIKIERGIFQGDSLSPLWFCLALNPLSTLLEGSELGYRLRKDDRAISHLLYMDDLKLLAPTKLQLTELLKVTENFSNSIKMEFGVDKCAVMYVKKGLIVESEGIELSDSIKLRSLSATESYKYLGFSQSLGIPESDMKQALRERFFGRLKKVLKSLLSGGNKVRAYNGWVMPVLMYSFGVLRWTQTELDALDRRVRTLLTAFRMHHPRSSVMRLYIPRKFGGRGLLNIKTLHNREIYNLREYFLHTDVGIHRSVVAVDSGLTPLALAKENWRKPVVLSTNDRREVWRGKELHGRFYRALHGPDIDFKTSTSWLRYGDLFGETEGFVCAIMDEVIMTNNYRKYILKDGTVDICRACHRPGESIRHIISGCSRLANGEYLHRHNQVARIVHQQLALKYHLVNSEVPYYRYVPDPVLENGRATLYWDRSIITDRTIVANKPDIVVIDRLERRAIIIDIAVPHDENLVKVEKEKQIKYLDLSHEIVDMWNVDSVIMVPIVVSAHGLIAKSLDQHLKRLTLEGWIKGLIQKAVLLDTARIVRRFLSLES

SEQ ID NO: 10632 - protein, 873 aa, Spilarctia lutea
MRPRVMRFVKRAFLGTTISPQEYMSCVTERIDFLKQKVYAWANRIRRYRKRVDRYNQNRMFQRNEKWVYRKWENLRPCLSDGQVPDENATNSFWHSIWSVPVTHTEGDWYRDVERSCESLLPMEPISINEEDVSCAVRSLPNWKAPGPDGLHNFWLKWFRSSHACLASQFQTALDSGSLPQFLTTGITHLLYKSGDAMDPKNFRPITCLPTLYKLLTSILRLKITTHINHNSILSISQNGCRSGTRGTKELLIIDMTISQQVRRNRKSLATCWIDYKKAFDSVPHTWLLRVLELYKIDTTLCTFLKLCMGQWRTALRYPECRQSAMNDVLIKIERGIFQGDSLSPLWFCLALNPLSTLLEGSGLGYRFQKDDRGISHLLYMDDLKLLAPTKLQLTGLLKVTENFSNSIKMEFGVDKCAVMYVKKGEIVESEGIELSDATKLRSLSVTETYKYLGFSQSLGIPEPDMKQTLRERFFSRLKKVLKSLLSGGNRVRACNGWVMPVLMYSFGVLRWTQTELDAIDRRVRTLLTAFRMHHPRSSVMRLYIPRKLGGRGLLNIKTLHNREVYNLREYFLQTDVGVHRSVVTVDTGLTPLALAKENWRKPVVLSTNDRREVWKGKVLHGRFYRALNGPDIDFKASTSWLRYGDLFGETEGFVCAIMDEVIMTSNYRKYILKDGTVDICRACHRPGESIRHIVSGCSRLANGEYLHRHNQVARIVHQQLALKYNLVSSEVPYYRYVPDPVLENGRATLYWDRSIITDRTIVANKPDIVVMDRLERRAMIYDIAVPHDENLVKVEKEKQIKYLDLSHEIVDMWNVDSAIIVPIVVSAHGLIAKSLDQHLKRLTLGGWIKGLIQKAVLLDTARIVRRFLSLEP

SEQ ID NO: 10633 - protein, 1173 aa, Xestia c-nigrum
MLTRSAARRALLPPPDPSLSSASPPPEPSPIVSAVTPAVAVASSSSDEYFSPPTTPPPARRRGGRRPPDGLGPRGPPASDRVPVPGGSVQRMRWTQSNNENVMRAYYGATEGGNNLTAYRVRMLSLFQVLEPAVNVSAQRLSDQVRVIQRNRMLDDTVLDRLRTEVQSSHVTATPPSQAVVPPQSTVITDRDDDVCSDMITNVATQCSEDMRSALEGAIREYRFVTPELRPRLPRLPMNNKNRMLVAVLDSQLSNYFDDCEDLTDVHSVLYCAAVAACRVARVKFSDDRVTRPKPAVPAWQYRIEQRIGGARALIGKLICFREGNTRPRVMRFVRRAFSGTDISPRDYMSRVTERIDFLKQKVYAWASRIRRYKRRVDRYTQNRTFQRDERWVYRAWERPDQGVADTHLPDDDAMCSFWRSIWSVPVSHAEGEWTRVIERACDPVPEMGAITISPQDVACAVRPLPNWKSPGPDGLHNFWIKWFTGSHARLATLFQSALESGSLPEFLTTGLTHLLHKSGSTAEPKNYRPITCLPTVYKVLTSILRTKICKHIDDNSVMSASQNGCRNGSRGTKELLLIDMAISQQVRRSRKDLSTCWIDYKKAYDSVPHTWLMRVLELYKVDATLRTFLMSCMRQWRTVLRYPGCRKIQRNSEPIRIERGIFQGDSLSPLWFCLALNPLSTLLEDSGLGYQLRKDGRVISHLLYMDDLKLFAPNDLQLMELLKVTETFSSAIRMEFGVDKCAVMHVKRGEIVESVGTQLSDSINLRSLSATETYKYLGMSEALGINVADMKQSLKERFFGRLKKVFNSLLSGGNKVRAFNGWVMPVLMYSFGILKWTQTELDALDTKVRKLLTAFRMHHPRSSVMRLYIPRKCGGRGFLNAKTLHNREICSLREYFQEADVEMHRDVVAMDKGLTPLSLAKENWRKPIVLTTDDRRKEWQGKELHGRFYRALHGPDVDFLASVSWLRSGDLFGETEGFGCAIMDEVMMTNNYRRFIVKDGTVDICRACHRPGESIRHIISGCSRLANGEYLHRHNLVARIIHQQLALKYNLVESEVPYYRYVPDPVLVNGNITLYWDQSIITDRTVIANRPDIVVMDRSERRAMIVDITVPHDENLVKAEKDKQIKYLDLAREVVDMWEVVLLSGALTTGSLDPVPDTGGLQFFIFLNVFYI

SEQ ID NO: 10634 - protein, 1199 aa, Xestia c-nigrum
MLTRAAARRARLSPPDPSLSSASPPPEPSPIVSAVTPAVAVASSSSDEYFSPPTTPPPARRRGGRRPPDGLGPRGPPASDRVPAPGGSVQRMRWTQSNNENVMRAYYGATEWGINLTAYRVRMLSLFQVLEPAVNVSAQRLSDQVRVIQRNRMLDDTVLDRLRTEVQSSRVTATPPSQAVVPPQSTVTTPYCDGDVSSDMVTNVSTQCSEDMRSALEGAIREYRFMTPELRPRLPRLPMHNKNKMLMAVLDSQLSNYFDSCEDLTDIHSILYCAAVAACRVAHVKFSDDRATRPKPAVPAWQYRIEQRIGGARALIGKLICFREGNTRPRVMRFVRRAFSGTDISPRDYMFRVTERIDFLKQKVYAWASRIRRYKRRVDRYTQNRTFQRDERWVYRAWERPDQGVADTRLPDDDAMCSFWRSIWSVRVSHAEGEWTRVVERACDPVPEMGAITISPQDVACAVRPLPNWKSPGPDGLHNFWIKWFTRSHARLATLFQSALESGSLQEFLTTGITHLLHKSGSTAEPKNYRPITCLPTVYKVLTSILRAKITKHIDENSVMSASQNGCRNGSRGTKELLLIDMAISQQVRRSRKDLSTCWIDYKKAYDSVPHTWLRRVLELYKVDATLRTFLMSCMGQWRTVLRYPGCRQIQRNSEPIRIERGIFQGDSLSPLWFCLALNPLSTLLEDSGLGYRLRKDGRVISHLLYMDDLKLFAPNDLQLMELLKVTETFSSAIRMEFGVDKCAVMHVKRGGTVESVGTQLSDSINLRSLSATETYKYLGMSEAPGISVADMKQSLKERFVGRLKKVFNSLLSGGNKVRAFNGWVMPVLMYSFGILKWTQTELDALDTKVRKLLTAYRMHHPRSSVMRLYIPRKCGGRGFLNAKTLHNREICSLREYFLAADVGMHRDVVAMDKGLTPLSLAKENWRIPVVFTTDDRRKEWQSKELHGRFYRALHGPDVDFQASVSWLRSGDLFGETEGFVCAIMDEVMMTNNYRRFIVKDGTVDICRACHRPGKSIRHIISGCSRLANGEYLHRHNLVARIIHQQLALKYNLVESEVPYYRYVPDPVLVNGSITLYWDQSIITDRTVIANRPDIVVMDRSERRAMIVDITVPHDENLVKAEKDKQIKYLDLAREVVDMWEVDSAIIVPIVVSAHGLIAKSLDQHLRRLSLGSWIKGLIQKAVLLDTARIVRRFLSLEP

SEQ ID NO: 10635 - protein, 1199 aa, Xestia c-nigrum
MLTRAAARRARLPPPDPSLSSASPPPEPSPIVSAVTPAVAVASSSSDEYFSPPTTPPPARRRGGRRPPDGLGPRGPPASDRVPAPGGSVQRMRWTKSNNENVMRAYYGATERGINLTAYRVRMLSLFQVLEPAVNVSAQRLSDQVRVIQRNRMLDDTVLDRLRTEVQSSRVTATPPSQAVVPPQSTVTTPYCDGDVSSDMVTNVSTQCSEDMRSALEGAIREYRFMTPELRPRLPRLPMHNKNKMLMAVLDSQLSNYFDSCEDLTDIHSILYCAAVAACRVAHVKFSDDRATRPKPAVPAWQYRIEQRIGGARALIGKLICFREGNTRPRVMRFVRRAFSGTDISPRDYMFRVTERIDFLKQKVYAWASRIRRYKRRVDRYTQNRTFQRDERWVYRAWERPDQGVADTRLPDDDAMCSFWRSIWSVPVSHAEGEWTRVVERACDPVPEMGAITISPQDVACAVRPLPNWKSPGPDGLHNFWIKWFTRSHARLATLFQSALESGSLPEFLTTGITHLLHKSGSTAEPKNYRPITCLPTVYKVLTSILRAKITKHIDENSVMSASQNGCRNGSRGTKELLLIDMAISQQVRRTRKDLSTCWIDYKKAYDSVPHTWLRRVLELYKVDATLRTFLMSCMGQWRTVLRYPGCRQIQRNSEPIRIERGIFQGDSLSPLWFCLALNPLSTLLEDSGLGYRLRKDGRVISHLLYMDDLKLFAPNDFQLMELLKVTETFSSAIRMEFSVDKCAVMHVKRGGIVESVGTQLSDSINLRSLSATETYKYLGMSEALGISVADMKQSLKERFFGRLKKVFNSLLSGGNKVRAFNGWVMPVLMYSFGILKWTQTELDALDTKVRKLLTAYRMHHPRSSVMRLYIPRKCGGRGFLNAKTLHNREICSLREYFLAADVGMHRDVVAMDKGLTPLSLAKENWRIPVVFTTDDRRKEWQSKELHGRFYRALHGPDVDFQASVSWLRSGDLFGETEGFVCAIMDEVMMTNNYRRFIVKDGTVDICRACHRPGESIRHIISGCSRLANGEYLHRHNLVARIIHQQLALKYNLVESEVPYYRYVPDPVLVNGSITLYWDQSIITDRTVIANRPDIVVMDRSERRAMIVDITVPHDENLVKAEKDKQIKYLDLAREVVDMWEVDSAIIVPIVVSAHGLIAKSLDQHLRRLSLGSWIKGLIQKAVLLDTARIVRRFLSLEP

SEQ ID NO: 10636 - protein, 1106 aa, Griposia aprilina
MRWTRSINENVMRSYYGATEGGNNLTAYRVRMLSLFQVLEPAVNVSAQRLSDQVRVIQRNHMLDDTVLDRLRNEMQSSHVIAPPSQTVVVLPQSNTSQADEESDDRATNVSTQCNDELRSALEDAIREYRFISPELRPRLPRLPMHNKNRVLVAALDAQLSNYFDDCVDLTDTHSILYCAAVAACRVAHVKFANDSRATRPKPAVPAWQCRIERRIGEARALIGKLICFREGNTRPRVMRFVRRAFAGTNISPQDYMSCVTERIDFLKQKVYAWANRIRRYKRRVERYTQNRTFQRDERWVYRGWERPDQGVADTCLPDDDAMCSFWRNIWSVPVSHTEGDWTREVERACDPIPEMGAITICPQDVTRAVRPLPNWKSPGPDGLHNFWIKWFGRSHARLAAQYQVALESGSLPQFLTTGVTHLLHKSGSTAEPKNYRPIACLPTVYKVLTSILRDKINKHIDTNYIMSPSQNGCRNGSRGTKELLLIDMAISQQVRRSRKDLSTCWIDYKKAYDSVPHTWLMRVLELYKVEATLRTFLMSCMGQWRTVLHYPACRNTQRNSEPIRIERGIFQGDSLSPLWFCLALNPLSTLLEDSGLGYRLRRGGQVISHLLYMDDLKLFAPNNSQLMDLLKVTETFSSAIRMEFGVDKCAVMHVKRGEIVESVGTQLSDSINLRALSASETYKYLGMSEALGINGTDMKQSLKDRFFGRLKKVFNSLLSGGNKVRAFNGWVMPVLMYSFGILKWTQTELDALDRKVRTLLTANRMHHPRSSVMRLYIPRKCGGRGFLNAKTLHNREICSLREYFLEADVGMHRDVVTVDKGLTPLSLAKENWRKPVVLDTNDRMEVWQSKELHGRFFRALHGPDVDQLASVAWLRFGDLFGETEGFVCAIMDEVMMTNNYRRFIVKDGTVDICRACHRPGESIRHIISGCSRLANEEYLHRHNLVARIIHQQLALKYSLVESEVPYYRYVPDPVLENGHITLYWDRSIITDRTIVANKPDIVMVDRLERRAMIVDITVPHDGNLVKAEKDKQIKYLDLAREVVDMWDVDSAIIVPIVVTANGLIAKSLDQHLRRLSLGSWIKGLIQKAVLLDTARIVRRFLSLEP

SEQ ID NO: 10637 - protein, 1198 aa, Griposia aprilina
MLTRSAARRARPPPPDSSLSSASLPPVSSPTVSAVTTPAAVVASSSSDEYFSPPTTPPPVRRRGGHRPPDGLGPRGPPVSDRVPAPGGSVQRMRWTRSINENVMRSYYGATEGGNNLTAYRVRMLSLFQVLEPDVNVSAQRLSDQVRVIQRNHMLDDTVLDRLRNEMQSSHVIAPPSQTVVVLPQSNTSQADEESDDRATNVSTQCNDELRSALEDAIREYRFISPELRPRLPRLPMHNKNRVLVAALDAQLSNYFDDCVDLTDTHSILYCAAVAACRVAHVKFANDSRATRRKPAVPAWQCRIERRIGGARALIGKLICFREGNTRPRVMRFVRRAFAGTNISPQDYMSCVTERIDFLKQKVYAWANRIRRYKRRVERYTQNRTFQRDERWVYRGWERPDQGVADTCLPDDDAMCSFWRNIWSVPVSHTEGDWTREVERACDPIPEMGAITICPQDVTRAVRPLPNWKSPGPDGLHNFWIKWFGRSHARLAAQYQVALESGSLPQFLTTGVTHLLHKSGSTAEPKNYRPIACLPTVYKVLTSILRDKINKLIDTNYIMSPSQNGCRNGSRGTKELLLIDMAISQQVRRSRKDLSTCWIDYKKAYDSVPHTWLMRVLELYKVEATLRTFLMSCMGQWRTVLHYPACRNTQRNSEPIRIERGIFQGDSLSPLWFCLALNPLSTLLEDSGLGYRLRRGGQVISHLLYMDDLKLFAPNNSQLMDLLKVTETFSSAIRMEFGVDKCAVMHVKRGEIVESVGTQLSDSINLRALSASETYKYLGMSEALGINGTDMKQSLKERFFGRLKKVFNSLLSGGNKVRAFNGWVMPVLMYSFGILKWTQTVLDALDRKVRTLLTANRMHHPRSSVMRLYIPRKCGGRGFLNAKTLHNREICSLREYFLEADVGMHRDVVTVDKGLTPLSLAKENWRKPVVLDTNDRMEVWQSKELHGRFFRALHGPDVDQLASVAWLRFGDLFGETEGFVCAIMDEVMMTNNYRRFIVKDGTVDICRACHRPGESIRHIISGCSRLANEEYLHRHNLVARIIHQQLALKYSLVESEVPYYRYVPDPVLENGHITLYWDRSIITDRTIVANKPDIVMVDRLERRAMIVDITVPHDGNLVKAEKDKQIKYLDLAREVVDMWDVDSAIIVPIVVTANGLIAKSLDQHLRRLSLGSWIKGLIQKAVLLDTARIVRRFLSLEP

SEQ ID NO: 10638 - protein, 1198 aa, Griposia aprilina
MLTRSAARQARPPPPDSSLSSASLPPVSSPTVSAVTTPAAVVASSSSDEYFSPPTTPPPARRRGGHRPPDGLGPRGPPASDRVPAPGGSVQRMRWTRSINENVMRSYYGATEGGNNLTAYRVRMLSLFQVLEPAVNVTAQRLSDQVRVIQRNHMLDDTVLDRLRNEMQSSHVIAPPSQTVVVLPQSKTSQADEETDDRATNVSTQCNDELRSALEDAIREYRFISPELRPRLPRLPMQNKNRALVVALDAQLSNYFDDCVDLTDTHSILYCAAVAACRVAHVKFANDSRATRPKPAVPAWQCRIERRIGGARALIGKLICFREGNTRPRVMRFVRRAFAGTDISPQDYMSCVTERIDFLKQKVYAWANRIRRYKRRVERYTQNRTFQRDERWVYRGWERPDQGVADMCLPDDDAMCSFWRNIWSVPVSHTEGDWTREVERACDPIPEMGAITICPQDVTRAVRPLPNWKSPGPDGLHNFWIKWFGGSHARLAAQYQVALESGSLPQFLTTGVTHLLHKSGSTAEPKNYRPIACLPTVYKVLTSILRDKINKHIDTNYIMSPSQNGCRNGSRGTKELLLIDMAISQQVRRSRKDLSTCWIDYKKAYDSVPHTWLMRVLELYKVEATLRTFLMSCMGQWRTVLRYPACRNTQRNSEPIRIERGIFQGDSLSPLWFCLALNPLSTLLEDSDLGYRLRRGGQVISHLLYMDDLKLFAPNNSQLMDLLKVTKTFSSAIRMEFGVDKCAVMHVKRGEIVESVGTQLSDSINLRALSASETYKYLGMSEALGINGTDMKQSLKDRFFGRLKKVFNSLLSGGNKVRAFNGWVMPVLMYSFGILKWTQTELDALDRKVRTLLTANRMHHPRSSVMRLYIPRKCGGRGFLNAKTLHNREICSLREYFLEADVGMHQDVVTVDKGLTPLSLAKENWRKPVVLDTNDRMEVWQSKELHGRFFRALHGPDVDQLASVAWLRFGDLFGETEGFVCAIMDEVMMTNNYRRFIVKDGTVDICRACHRPGESIRHIISGCSRLANEEYLHRHNLVARIIHQQLALKYSLVESEVPYYRYVPDPVLENGHITLYWDRSIITDRTIVANKPDIVMVDRLERRAMIVDITVPHDGNLVKAEKDKQIKYLDLAREVVDMWDVDSAIIVPIVVTANGLIAKSLDQHLRRLSLGSWIKGLIQKAVLLDTARIVRRFLSLEP

SEQ ID NO: 10639 - protein, 1032 aa, Griposia aprilina
MQSSHVIAPPSQTVVVLPQSNTSQADEESDDRATNVSTQCNDELRSALEDAIREYRFISPELRPRLPRLPMHNKNRVLVAALDAQLSNYFDDCVDLTDTHSILYCAAVAACRVAHIKFANDSRPTRPKPAVPAWQCRIERRIGGARALIGKLICFREGNTRPRVMRFVRRAFAGTNISPQDYMSCVTERIDFLKQKVYAWANRIRRYKRRVERYTQNRTFQRDERWVYRGWERPDQGVADTCLPDDDAMCSFWRNIWSVPVSHTEGDWGREVERACDPIPEMGAISICPQDVTRAVRPLPNWKSPGPDGLQNFWIKWFGRSHARLAAQYQVAIESGSLPQFLTTGVTHLLHKSGSTAEPKNYRPITCLPTVYKVLTSILRAKINKHIDTNSIMSPSQNGCRNGSRGTKELLLIDMAISQQVRRSRKDLSTCWIDYKKAYDSVPHTWLVRVLELYKVDATLRTFLKSCMGQWRTILHYPGCRNIQRDNEPIRIERGIFQGDSLSPLWFCLALNPLSTLLEDSGLGYRLRRGGQVISHLLYMDDLKLFAPNNLQLMELLKVTETFSSAIRMEFGVDKCAVMHVKRGEIVESVGTQLSYSINLRALSASDTYKYLGMSEALGINGTDMKQSLKERFFGRLKKVFNSLLSGGNKVRAFNGWVMPVLMYSFGILKWTKTELDALDRKVRTLLTANRMHHPRSSVMRLYIPRRCGGRGFLNAKTLHNREICSLREYFLEADVGMHTDVVKVDKGLTPLSLAKENWRKPVVLDTNDRMEVWQSKELHGRFFRALHEPDVDQLASVAWLRFGDLFGETEGFVCAIMDEVILTNNYRRHIMKDGTVDVCRACHRPGESIRHIISGCSRLANEEYLHRHNLVARIIHQQLALKYSLVESEVPYYRYMPDPVLENGHITLYWDRSIITDRTIVANKPDIVVLDRLERRAMIVDITVPHDGNLVKAEKDKQIKYLDLAREVVDMWDVDSAIIVPIVVTANGLIAKSLDQHLSRLSLGSWIKGLIQKAVLLDTARIVRRFLSLEP

SEQ ID NO: 10640 - protein, 1198 aa, Griposia aprilina
MLTRSAARRARPPPPDSSLSSASLPPVSSPTVSAVTTPAAVVASSSSDEYFSPPTTPPPVRRRGGHRSPDGLGPRGPPASDRVPAPGGSVQRMRWTRSINENVMRSYYGATEGGNNLTAYRVRMLSLFQVLEPAVNVSAQRLSDQVRVIQRNHMLDDTVLDRLRNEIQSSHVIAPPSQTVVVLPQSNTSQADEESDDRATNVSTQCNDELRSALEDAIREYRFISPELRPRLPRLPMHNKNRVLVAALDAQLSNYFDDCVDLTDTHSILYCAAVAACRVAHVKFANDSSATRPKPAVPAWQCRIERRIGEARALIGKLICFREGNTRPRVMRFVRRAFAGTNISPQDYMSCVTERIDFLKQKVYAWANRIRRYKRRVERYTQNRTFQRDERWVYRGWERPDQGVADTCLPDDDAMCSFWRNIWSVPVSHTEGDWTREVERACDPIPEMGAITICPQDVTRAVRPLPNWKSPGPDGLHNFWIKWFGRSHARLAAQYQVALESGSLPQFLTTGVTHLLHKSGSTAEPKNYRPIACLPTVYKVLTSILRDKINKHIDTNYIMSPSQNGCRNGSRGTKELLLIDMAISQQVRRSRKDLSTCWIDYKKAYDSVPHTWLMRVLELYKVEATLRTFLMSCMGQWRTVLHYPACRNTQRNSEPIRIERGIFQGDSLSPLWFCLALNPLSTLLEDSGLGYRLRRGGQVISHLLYMDDLKLFAPNNSQLMDLLKVTETFSSAIRMEFGVDKCAVMHVKRGEIVESVGTQLSDSINLRALSASETYKYLGMSEALGINGTDMKQSLKDRFFGRLKKVFNSLLSGGNKVRAFNGWVMPVLMYSFGILKWTQTELDALDRKVRTLLTANRMHHPRSSVMRLYIPRKCGGRGFLNAKTLHNREICSLREYFLEADVGMHRDVVTVDKGLTPLSLAKENWRKPVVLDTNDRMEVWQSKELHGRFFRALHGPDVDQQASVAWLRFGDLFGETEGFVCAIMDEVMMTNNYRRFIVKDGTVDICRACHRPGESIRHIISGCSRLANEEYLHRHNLVARIIHQQLALKYSLVESEVPYYRYVPDPVLENGHITLYWDRSIITDRTIVANKPDIVMVDRLERRAMIVDITVPHDGNLVKAEKDKQIKYLDLAREVVDMWDVDSAIIVPIVVTANGLIAKSLDQHLRRLSLGSWIKGLIQKAVLLDTARIVRRFLSLEP

SEQ ID NO: 10641 - protein, 1198 aa, Omphaloscelis lunosa
MLTRSAARRARLPPPDSPLSSASSPPVLSPTVNAVMTPAAAVASSSSDEYFSPPTTPPPARRRGRRRPPDGLGPRGPPASDRVPAPGGSVQRMRWTRSINENVMRSYYGATEGGNNLTAYRVRMLSLFQVLEPAVNVSAQRLLDQVRVIQRNHTLDDTVLDRLRSEMQSSHVIAPPVRSVIVPSQIITSQADERIDDRATNVSTQCNEELRSALEGAIHEYRFMSPELRPRLPRLPMHNKNRALVAALDSQLSNYFDDCEDLTDTHSILYCAAVAVCRVAHVKFSNDSRATRPKPAVPAWQCRIERRICGARTLIGKLICFREGNTRPRVMRFVRRAFLGTDISPQDYMTRVTERIDFLKQKVYAWANRIRRYKRRVERYTQNRTFQSDERWVYRAWERPNQGVTDTHLPDEDAMCSFWRSIWSVPVSHTEGDWTREVERACDSIPEMGAITICPQDVARAVRPLPNWKSPGPDGLHNFWIKWFVRSHARLAAQYQTALESGSLPHFLTTGVTHLLHKSGSTAEPKNYRPITCLPTVYKVLTSILRAKINKHIDTNSIMSASQNGCRNGSRGTKELLLIDMAISQQVRRSRKDLSTCWIDYKKAYDSVPHTWLMRVLELYKVDITLRTFLMSCMGQWRTVLRYPGCRNIQRNSEPIRIERGIFQGDSLSPLWFCLALNPLSTLLEDSGLGYRLRRGGQVISHLLYMDDLKLFAPNNLQLMELLKVTETFSSAIRMEFGVDKCAVMHVKRGKIMESVGTQLSDSINLRALSASETYKYLGMSEALGINVTDMKQSLKERFFGRLKKVLNSLLSGGNKVRAFNGWVMPVLMYSFGILKWSQTELDALDRRVRTLLTAYRMHHPRSSVMRLYIPRKCGGRGFLNAKTLHNREICSLREYFLEADVGMHRDVVVVDKGLTPLSLAKENWRKPVVLDTKNRMEIWQSKELHGRYFRALHGPDVDLPASVAWLRCGDLFGETEGFVCAIMDEVMMTNNYRRFIVKDGTVDICRACHRPGESIRHIISGCSRLANEEYLHRHNLVARIIHQQLALKYSLVESEVPYYRYVPDPVLENGNITLYWDRSIITDRTIVANKPDIVVVDRGERSAMIIDITVPHDENLVKAEKDKQIKYLDLAREVVDMWDVDSAIIVPIVVTANGLIAKSLDQHLRRLSLGSWIKGLVQKAVLLDTARIVRRFLSLEP

SEQ ID NO: 10642 - protein, 1198 aa, Omphaloscelis lunosa
MLTRSAARRARLPPPDSPLSSASSPPVLSPTVNAVMTPAAAVASSSSDEYFSPPTTPPPARRRGRRRPPDGLGPRGPPASDRVPAPGGSVQRMRWTRSINENVMRSYYGATEGGNNLTAYRVRMLSLFQVLEPAVNVSAQRLSDQVRVIQRNHMLDDTVLDRLRSEMQSSHVIAPPVRSVIVPSQIITSQADERIDDRATNVSTQCNEELRSALEGAIHEYRFMSPELRPRLPRLPMHNKNRALVAALDSQLSNYFDDCEDLTDTHSILYCAAVAVCRVAHVKFSNDSRATRPKPAVPAWQCRIERRICGARTLIGKLICFREGNTRPRVMRFVRRAFLGTDISPQDYMTRVTERIDFLKQKVYAWANRIRRYKRRVERYTQNRTFQSDERWVYRAWERPNQGVTDTHLPDEDAMCSFWRSIWSVPVSHTEGDWTREVERACDSIPEMGAITICPQDVARAVRPLPNWKSPGPDGLHNFWIKWFVRSHARLAAQYQTALESGSLPQFLTTGVTHLLHKSGSTAEPKNYRPITCLPTVYKVLTSVLRAKINKHIDTNSIMSASQNGCRNGSRGTKELLLIDMAISQQVRRSRKDLSTCWIDYKKAYDSVPHTWLMRVLELYKVDITLRTFLMSCMGQWRTVLRYPGCRNIQRNSEPIRIERGIFQGDSLSPLWFCLALNPLSTLLEDSGLGYRLRRGGQVISHLLYMDDLKLFAPNNLQLMELLKVTETFSSAIRMEFGVDKCAVMHVKRGKIMESVGTQLSDSINLRALSASETYKYLGMSEALGINVTDMKQSLKERFFGRLKKVLNSLLSGGNKVRAFNGWVMPVLMYSFGILKWSQTELDALDRRLRTLLTAYRMHHPRSSVMRLYIPRKCGGRGILNAKTLHNREICSLREYFLEADVGMHRDVVVVDKGLTPLSLAKENWRKPVVLDTKNRMEIWQSKELHGRYFRALHGPDVDLPASVAWLRCGDLFGETEGFVCAIMDEVMMTNNYRRFIVKDGTVDICRACHRPGESIRHIISGCSRLANEEYLHRHNLVARIIHQQLALKYSLVESEVPYYRYVPDPVLENGNITLYWDRSIITDRTIVANKPDIVVVDRGERSAMIIDITVPHDENLVKAEKDKQIKYLDLAREVVDMWDVDSAIIVPIVVTANGLIAKSLDQHLRRLSLGSWIKGLVQKAVLLDTARIVRRFLSLEP

SEQ ID NO: 10643 - protein, 1198 aa, Omphaloscelis lunosa
MLTRSAARRARLPPPDSPLSSASSPPVLSPTVNAVMTPAAAVASSSSDEYFSPPTTPPPARRRGGRRPPDGLGPRGPPASDRVPAPGGSVQRMRWTRSINENVMRSYYGATEGGINLTAYRVRMLSLFQVLEPAVNVSAQRLSDQVRVIQRNHMLDDTVLDRLRSEMQSSHVIAPPVRSVIIPSQIITSQADERIDDRATNVSTQCNEELRSALEGAIQEYRFMSPELRPRLPRLPMHNKNKALVAVLDSQLSNYFDDCEDLTDTHSILYCAAVAACRVAHVKFANDSRATRPKPAAPAWQCRIERRIDGARTLIGKLICFREGNTRPRVMRFVRRAFLGTDISPQDYLTRVTERIDFLKQKVYAWANRIRRYKRRVERYTQNRTFQSDERWVYRAWERPDQGVADTHRPDDDAMCSFWRSIWSVPVNHTEGDWTREVERACDPIPEMGAITICPQDVARAVRPLPNWKSPGPDGLHNFWIKWFLRSHARLAAQYQTALESGSLPRFLTTGVTHLLHKSGSTAEPKNYRPITCLPTVYKVLTSILRAKINKHIDTNSIMSASQNGCRNGSRGTKELLLIDMAINQQVRRSRKDLSTCWIDYKKAYDSVPHTWLMRVLELYKVDTTLRTFLMSCMGQWRTVLRYPGCRNIQRNSEPIRIERGIFQGDSLSPLWFCLALNPLSTLLEASGLGYRLRRGGQVISHLLYMDDLKLFAPNNLQLMELLKVTETFSNAIRMEFGVDKCAVMHVKRGEIVESVGTQLSDSINLRALSASETYKYLGMSEALGINVTDMKQSLKERFFGRLNKVLNSLLSGGHKVRAFNGWVMPVLIYSFGILKWTQTELDALDRRVRTLLTAYRMHHPRSSVMRLYIPRKCGGRGFLNAKTLHNREICSLREYFLGVDVGMHRDVVVVDKGLTPLSLAKENWRKPVVLDTKDRMEIWQSKELHGRYFRALHGPDVDLPASVTWLRFGDLFGETEGFVCAIMDEVMMTNNYRRFIVKDGTVDICRACHRPGESIRHIISGCSRLANEEYLHRHNLVARIIHQQLALKYSLVESEVPYYRYVPDPVLENGNITLYWDRSIITDRTIVANKPDIVVVDRGERRTMIIDITVPHDENLVKAEKDKQIKYLDLAREVVDMWDVDSAIIVPIVVTANGLIAKSLDQHLRRLSLGTWIKGLIQRAVLLDTARIVRRFLSLEP

SEQ ID NO: 10644 - protein, 1198 aa, Omphaloscelis lunosa
MLTRSAARRARLPPPDSPLSSASSPPVLSPTVNAVMTPAAAVASSSSDEYFSPPTTPPPARRRGGRRPPDGLGPRGPPASDRVPAPGGSVQRMRWTRSINENVMRSYYGATEGGNNLTAYRVRMLSLFQVLEPAVNVSAQRLSDQVRVIQRNHMLDDTVLDRLRSEMQSSHVIAPPVRSVIIPSQIITSQADERIDDRATNVSTQCNEELRSALEGAIQEYRFMSPELRPRLPRLPMHNKNKALVAVLDSQLSNYFDDCEDLTDTHSILYCAAVAAYRVAHVKFANDSRATRPKPAAPAWQCRIERRIGGARTLIGKLICFREGNTRPRVMRFVRRAFLGTDISPQDYLTRVTERIDFLKQKVYAWANRIRRYKRRVERYTQNRTFQSDERWVYRAWERPDQGVADTHRPDDDAMCSFWRSIWSVPVNHTEGDWTREVERACDPIPEMGAITICPQDVARAVRPLPNWKSPGPDGLHNFWIKWFLRSHARLAAQYQTALESGSLPQFLTTGVTHLLHKSGSTAEPKNYRPITCLPTVYKVLTSILRAKINKHIDTNSIMSASQNGCRNGSRGTKELLLIDMAINQQVRRSRKDLSTCWIDYKKAYDSVPHTWLMRVLELYKVDTTLRTFLMSCMGQWRTVLRYPGCRNIQRNSEPIRIERGIFQGDSLSPLWFCLALNPLSTLLEASGLGYRLRRGGQVISHLLYMDDLKLFAPNNLQLMELLKVTETFSNAIRMEFGVDKCAVMHVKRGEIVESVGTQLSDSINLRALSASETYKYLGMSEALGINVTDMKQSLKERFFGRLKKVLNSLLSGGHKVRAFNGWVMPVLIYSFGILKWTQTELDALDRRVRTLLTAYRMHHPRSSVMRLYIPRKCGGRGFLNAKTLHNREICSLREYFLGVDVGMHRDVVVVDKGLTPLSLAKENWRKPVVFDTKDRMEIWQSNELHGRYFRALHGPDVDLPASVTWLRFGDLFGETEGFVCAIMDEVMMTNNYRRFIVKDGTVDICRACHRPGESIRHIISGCSRLANEEYLHRHNLVARIIHQQLALKYSLVESEVPYYRYVPDPVLENGNITLYWDRSIITDRTIVANKPDIVVVDRGERRTMIIDITVPHDENLVKAEKDKQIKYLDLAREVVEMWDVDSAIIVPIVVTANGLIAKSLDQHLRRLSLGSWIKGLIQRAVLLDTARFVRRFLSLEP

SEQ ID NO: 10645 - protein, 1205 aa, Omphaloscelis lunosa
MLTRSRARKLIDTHPTSSGSSLSSASQLPDPAPDVSPVIPVAAVASSSSDEYFSPPTTPPPTRQRGRGRPPASLGLRGPPASDRVPAPGGSVQRMRWTQTVNENVMRAYFGATEGGSNLTAYRGRMLSLFQVLEPAVNVSAQRLSDQVRVIQRNHMLDDVVLDRLRLESRNNHVTPASPLVTVQLQNLPSSSPRSDRVGEEDDDGVISVSSQCNVRLRSALEDAFREYRYIPPGLRPQLPRLPMHKKNKALMCTLDSLLSNCFDGSKDLADTHSILYCAAVAACRVAHVKFPNSDRAPRPKPAVPAWQCRIERRIGEARVLIGKLICFREGNTRPRVMRFVKRAFSGTDISFQDYLTRVTERIDFLKQKIYAWANRIRRYRRRVERYTQNRTFQSDERWVYRAWERLDQGVIDTRLPDDDAMCSFWRSIWSAPVSHTEGDWTREIERACELIPEMEALTISPQDIARAVRPLPNWKSPGPDGLHNFWIKWFQRSHARLASQFQSALESGSLPQFLTTGITHLLHKSGSTAEPKNYRPITCLPTVYKVFTSILRTKINKHIDTNSIMSASQNGCRNGSRGTKELLLIDMAINQQVRRSRRDLSTCWIDYKKAYDSVPHTWLMRVLELYKVNATLRTFLMSCMGQWRTVLRYPGCRQILRNSEPIRIERGIFQGDSLSPLWFCLALNPLSTLLEYSGLGYRLRRGGQVISHLLYMDDLKLFAPNNLQLLELLKVTETFSSAIRMEFGVDKCAVMHVKRGEIVESVGTQLSDSIQLRSLSSIETYNYLGMSEALGVNAADMKQSLKERFFNRLNKVLNSLLSGGNKVRAFNGWVMPVLMYSFGILKWTQTELDALDRRVRTLLTANRMHHPRSSVMRLYIPRKCGGRGFLNAKTLHNREVCSLREYFLEADVGMHRDVVTVDKGLTPLSLANENWRKPIVLDTNDRREVWQSKELHGRFYRALHGPDVDLLASVSWLRFGDLFGETEGFVFAIMDEVMMTNNYRKYIVKDGTVDICRACHRPGESIRHIISGCSRLANGDYLHRHNLVARIIHQQLALKYSLVESEVPYYRYVPDPVLENGNITLYWDRSIITDRTIVANKPDIVVIDRLERRTMIIDIAVPHDENLVKAEKDKQIKYLDLAREVVDMWDVDTAIIVPIVVTANGIIAKSLDQHLKRLSLGSWIKGLIQKAVLLDTARIVRRFLSQEP

SEQ ID NO: 10646 - protein, 1201 aa, Omphaloscelis lunosa
MLTRLAARRARLPPPDSPLSSASSPPVRSPTVNAVMTPAAAVASSSSDEYFSPPTTPPPARRRGRRRPPDGLGPRGPPASDRVPAPGGSVQRMRWTRSINENVMRSYYGATEGGNNLTAYRVRMLSLFQVLEPAVNVSAQRLSDQVRVIQRNHMLDDTVLDRLRSEMQSSHVIAPPLRSVIIPSQMSSVITSQADERIDDRATNVSTQCNEDLRSALEGAIQEYRFMSPELRPRLPRLPMHNKNKALVAVLDSQLSNYFDDCEDLTDTHSILYCAAVAVCRVAHLKFSNDSRATRPKPAAPAWQCRIERRIGGARTLIGKLICFREGNTRPRVMRFVRRAFLGTDISPQDYMTRVTERIDFLKQKVYAWANRIRRYKRRVERYTQNRTFQSDERWVYRAWERPDQGVADTHLPDDDAMCSFWRSIWSVPVSHTEGDWTREVERACDPIPEMGAITICPQDVARAVRPLPNWKSPGPDGLHNFWIKWFVRSHARLAAQYQTALESGSLPQFLTTGVTHLLHKSGSTAEPKNYRPITCLPTVYKVLTSILRAKINKHIDTNSIMSASQNGCRNGSRGTKELLLIDMAISQQVRRSRKDLSTCWIDYKKAYDSVPHTWLMRVLELYKVHTTLRTFLMSCMGQWRTVLRYPGCRNIQRNSEPIRIERGIFQGDSLSPLWFCLALNPLSTLLEDSGLGYRLRRGGQVISHLLYMDDLKLFAPNNLQLMKLLKVTETFSSAIRMEFGVDKCAVMHVKRGEIMESVGTQLSDSINLRALSASETYKYLGMSEALGINVTDMKQSLKERFFGRLKKVLNSLLSGGNKVRAFNGWVMPVLMYSFGILKWTQTELDALDRRVRTLLTAYRMHHPRSSVMRLYIPRKCGGRGFLNAKTLHNREICSLREYFLGVDVGMHRDVVVVDKGLTPLSLAKENWRKPVVLDTKDRMEIWQSKELHGRYFRALHGPDVDLPASVTWLRFGDLFGETEGFVCAIMDEVMMTNNYRRFIVKDGTVDICRACHRPGESIRHIISGCSRLANEEYLHRHNLVARIIHQQLALKYSLVESEVPYYRYVPDPVLENGNITLYWDRSIITDRTIAANKPDIVVVDRGERRTMIIDITVPHDENLVKAEKDKQIKYLDLAREVVDMWDVDSAIIVPIVVTANGLIAKSLDQHLRRLSLGSWIKGLIQRAVLLDTARIVRRFLSLEP

SEQ ID NO: 10647 - protein, 983 aa, Sesamia nonagrioides
MLSVSTALLRLNLDLVYLDCPCIKKNKALVCALDSQLSYYLKDSKDLTDTHSILYCGAVAICRVAHVKFPDSDRATRPKSAVPAWQCRIERRIGENRALIGKLTSFREGNTRPRVMRFVRRAFSGTDTSTRDYLFRVTERIDFFKQKIYAWANRIRRYKRRVERYSQNRNFQSDERRVYRAWERSDQGVTDTCLPDDDAMCSFWRNIWSVPVSHTEGSWTRVVERACDPVSEMGAITICPQDVARAVRPLPNWKSPGPDGLHNFWIKWFTGSHARLASQFQTALESGSLPQFLTTGVTHLLHKSGSTAEPKNYRPITCLPTVYKVLTSILKSKINTHIDSNSIMSASQNGCRSGSRGTKELLLIDMAISQQVRRSRKDLSTCWIDYKKAYDSVPHTWLMRVLELYKVDATLRTFLMTCMRTWRTVLRYPGCRNIQRNSEPIRIERGIFQGDSLSPLWFCLALNPLSTLLEDSGLGYRLRRGGQVISHLLYMDDLKLFAHTDSQLKELLKITETFSSSIRMEFGVDKCAVMHVKRGEIMESVGTQLTSSINLRALSASETYKYLGMSEALGINVTDMKQSLKERFFGRLKKVLNSLLSGGNKVRAFNGWVMPVLMYSFGILKWTQTELDALDQRVRTLLTANRLHHPRSSVMRLYIPRKCGGRGFLNAKTLHNREVCSLREYFLETDVGMHRDVVAADKGLTPLSLAKENWRKPVVLDTNDRLEVWKSKELHGRFFRALHGPDVDFRASVAWLRFGDLFGETEGFVFAIMDEVMMTNNYRRFIVKDGTVDICRACHRPGESIRHIISGCSRLANGEYLHRHNLVARIIHQQLALKYNLVESEVPYYRYMPDPVLENGHITLYWDRSIITDRTIVANKPDIVLVDRSERRAMIVDITIPHDENLVKAEKDKQIKYLDLAHEVVDMWEVDSAIIVPIVVTANGLIAKSLDQHLRRLSLGSWIKGLIQKAVLLDTARIVRKFLSLEP

SEQ ID NO: 10648 - protein, 1058 aa, Sesamia nonagrioides
MLTRSAARRARPPSPDSSLSSASPPPVSSPTVNAVMTPAAVVASSSSDEYFSPPTTPPPARRRGGRRPPDRLGPRGPSASDRVPAPGGSVQRMRWTQSINENVMRSYYGATEGGNNLTAYRVRMLSLFQVLEPAVNVSAQRLSDQVRVIQRNHMLGDVVLDRLRLESRNSHVTPASSLVAVQLNSVSPRPNHIDEEDDDRAISVSPQCIEKLRSALEDAFCEYRSTPPELRPRLPRLPMHKKNKALVCALDSQLSNYLKDSKDLNDTHSILYCGAVAICRVAHVKFPDNDRATRPKSAVPAWQCRIERRIGTICPQDVARAVRPLPNWKSPGPDGLHNFWIKWFSGSHARLASQFQTALESGSLPQFLTTGVTHLLHKSGSTAEPRNYRPITCLPTVYKVLTSILKSKINTHIDSNSIMSASQNGCRSGSRGTKELLLIDMAISQQVRRSRKDLSTCWIDYKKAYDSVPHTWLMRVLELYKVDATLRTFLMTCMRTWRTVLRYPGCRNIQRNSEPIRIERGIFQGDSLSPLWFCLALNPLSTLLEDSGLGYRLRRGGQVISHLLYMDDLKLFAHTDSQLKELLKITETFSSSIRMEFGVDKCAVMHVKRGEIMESVGTQLTSSINLRALSASETYKYLGMSEALGINVTDMKQSLKERFFGRLKKVLNSLLSGGNKVRAFNGWVMPVLMYSFGILKWTQTELDALDRRVRTLLTANRLHHPRSSVMRLYIPRKCGGRGFLNAKTLHNREICSLREYFLRTDVGMHRDVVAVDKGLTSLSLAKENWRKPVVLDTNDRMEVWKSKELHGRFFKALHGPDVDLQASVAWLRFGDLFGETEGFVCAITDEVMMTNNYRRFIVKDGTVDICRACHRPGESIRHIISGCSRLANGEYLHRHNLVARIIHQQLALKYNLVESEVPYYRYTPDPVLENDHITLYWDRSIITDRTIIANKPDIVLVDRSERRAMIVDITIPHDENLVKAEKDKQIKYLDLAHEVVDMWEVDSAIIVPIVVTANGLIAKSLDQHLRRLSLGSWIKGLIQKAVLLDTARIVRKFLSLEP

SEQ ID NO: 10649 - protein, 1200 aa, Sesamia nonagrioides
MLTQSAARCARPPPPDSSLSSASPPPVSSPNVNAVMTPAAVVASSSSDEYFSPPTTPPPARRRGGRRPPDRLGPRGPSASDRVPAPGGSVQRMRWTQSINENVMRSYYGATEGGNNLTAYRVRMLSLFQVLEPAVNVSAQRLSDQVRVIQRNHMLDDVVLDRLRLESRNSHVTPASSLVAVQLNSVSPRPNHVDEEDDDRAISVSPQCNEKLRSALEDAFREYRSIPPEFRPRLPRLPMHKKNKALVCALDSQLSNYLKDSNDLNDTHSILYCGAVAICRVAHVKFPDSDRATRPKSAVPAWQCRIERRIGETRALIGKLISFREGNTRPRVMRFVRRAFSGTDTSTRDYLFRVTERIDFFKQKIYAWANRIRRYRRRVERYSQNRNFQSDERRVYRAWERSDQGVTDTCLPDDDATCSFWRNIWSVPVSHTEGSWTRVVERACDPVPEMGAITICPQDVARAVRPLPNWKSPGPDGLHNFWIKWFSGSHARLASQFQTALESGSLPQFLTTGVTHLLHKSGSTAEPKNYRPITCLPTVYKVLTSILKSKINTHIDSNSIMSASQNGCRSGSRGTKELLLIDMAISQQVRRSRKDLSTCWIDYKKAYDSVPHTWLMRVLELYKVDATLRTFLMTCMRTWRTVLRYPGCRNIQRKSEPIRIERGIFQGDSLSPLWFCLALNPLSTLLEDSGLGYRLRRGGQVISHLLYMDDLKLFAHTDSQLKELLKITETFSSSIRMEFGVDKCAVMHVKRGQIMESVGTQLTSSINLRALSASETYKYLGMSEALGINVTDTKQSLKERFFGRLKKVLNSLLSGGNKVRAFNGWVMPVLMYSFGILKWTQTELDALDRRVRTLLTANRLHHPRSSVMRLYIPRKCGGRGFLNAKTLHNREICSLRQYFLTTDVGMHRDVVAVDKGLTPLSLAKENWRKPVVLDTNDRMEVWKSKELHGRFFKALHGPDVDLQASVAWLRFGDLFGETEGFVCAITDEVMMTNNYRRFIVKDGTVDICRACHRPGESIRHIISGCSRLANGEYLHRHNLVARIIHQQLALKYNLVESEVPYYRYTPDPVLENDHITLYWDRSIITDRTIVANKPDIVLVDRSERRAMIVDITIPHDENLVKAEKDKQIKYLDLAHEVVDMWEVDSAIIVPIVVTANGLIAKSLDQHLRRLSLGSWIKGLIQKAVLLDTARIVRKFLSLEP

SEQ ID NO: 10650 - protein, 1200 aa, Sesamia nonagrioides
MLTRSAARRARPPSPDSSPSSASPPPVSSPTVNAVMTPAAAVALSSSDEYFSPPTTPPPVRRRGGRRPPDCLGPRGPPASDRAPATGGNVQRMKWTQSINENVMRAYFGATEGGSNLTAYRGRMLSLFQVLEPAVNVSAQRLSDQVRVIQRNHMLDDVVLDRLRLESRNSHVTPASSLVAVQLNSVPSRPNLVDEEDDDEAISVTPQCNEKVRSALEDAFREYRSTPPELRPRLPRLPMHKKNKALVCALDSQLSNYLKDSKDLADTHSILYCGAVAICRVAHVKFPDSDRATRPKPAVPAWQCRIERRIGETRALIGKLMSFREGNTRPRVMRFVRRAFSGTDVSTRDYLLRVTERIDFLKQKIYAWANRIRRYRRRVERYSQNRNFQSDERWVYRAWERSDQGVTDTCLPDDDATRSFWRNIWSVPVSHTEGGWTRDVERACDPVPEMGAITICPQDVARAVRPLPNWKSPGPDGLHNFWIKWFSGSHACLASQFQTALESGSLPQFLTTGITHLLHKSGSTAEPKNYRPITCLPTVYKVLTSILKAKINTHIDSNSIMSASQNGCRNGSRGAKELLLIDMAISQQVRRSRKDLSTCWIDYKKAYDSVPHTWLMRVLELYKVDATLRTFLMTCMSQWRTVLCYPGCRNIQRNSEPIRIERGIFQGDSLSPLWFCLALNPLSTLLEDSGLGYRLRRGGQVISHLLYMDDLKLFAHTNSQLKELLKITETFSSAIRMEFGVDKCAVMHVQRGEIVESVGTQLTGSINLRSLSASETYKYLGMSEALGINVTDMKQSLKERFFGRLKKVLNSLLSGGNKVRAFNGWVMPVLMYSFGILKWTQTELDALDQRVRTLLTANRLHHPRSSVMRLYIPRKCGGRGFLNAKTLHNREVCSLREYFLETDVGMHRDVVAADKGLTPLSLAKENWRKPVVLDTNDRMEVWKSKELHGRFFRALHGPDVDFQASVAWLRFGDLFGETEGFVFAIMDEVMMTNNYRRFIVKDGTVDICRACHRPGESIRHIISGCSRLANGEYLHRHNLVARIIHQQLALKYNLVESEVPYYRYMPDPVLENGHITLYWDRSIITDRTIVANKPDIVLVDRSERRAMIVDITIPHDENLVKAEKDKQIKYLDLAHEVVDMWEVDSSIIVPIVVTANGLIAKSLDQHLRRLSLGSWIKGLIQKAVLLDTARIVRKFLSLEP

SEQ ID NO: 10651 - protein, 1047 aa, Sesamia nonagrioides
MLDDVVLDRLRLESRNSHVTPASSLVAVQLNSVSPRPNHVDEEDDDRAISVSPQCIEKLRSALEDAFCEYRSTLPELRPRLPRLPMHKKNKALVCALDSQLSYYLKDSKDLTDTHSILYCGAVAICRVAHVKFPDSDRATRPKSAVPAWQCRIERRIGETRALIGKLTSFREGNTRPRVMRFVRRAFSGTDTSTRDYLFRVTERIDFFKQKIYAWANRIRRYKRRVERYSQNRNFQSDERRVYRAWERSDQGVTDTCLPDDDATCSFWRNIWSVPVSHTEGSWTRVVERACDPVPEMGAITICPQDVARAVRPLPNWKSPGPDGLHNFWIKWFSRSHARLASQFQTALESGSLPQFLTTGVTHLLHKSGSTAEPKNYRPITCLPTVYKVLTSILKSKINTHIDSNSIMSASQNGCRSGSRGTKELLLIDMAISQQVRRSRKDLSTCWIDYKKAYDSVPHTWLMRVLELYKVDATLRTFLMTCMRTWRTVLRYPGCRNIQRNSEPIRIERGIFQGDSLSPLWFCLALNPLSTLLEDSGLGYRLRRGGQVISHLLYMDDLKLFAHTDSQLKELLKITETFSSSIRMEFGVDKCAVMHVKRGEIMESVGTQLTSSINLRALSASETYKYLGMSEALGINVTDMKQSLKERFFGRLKKVLNSLLSGGNKVRAFNGWVMPVLMYSFGILKWTQTELDALDQRVRTLLTANRLHHPRSSVMRLYIPRKCGDRGFLNAKTLHNREVCSLREYFLETDVGMHRDVVAADKGLTPLSLAKENWRKPVVLDTNDRLDVWKSKELHGRFFRALHGPDIDFQASVAWLRFGDLFGETEGFVFAIMDEVMMTNNYRRFIVKDGTVDICRACHRPGESIRHIISGCSRLANGEYLHRHNLVARIIHQQLALKYNLVESEVPYYRYMPDPVLEHGHITLYWDRSIITDRTIVANKPDIVLVDRSERRAMIVDITIPHDENLVKAEKDKQIKYLDLAHEVVDMWEVDSAIIVPIVVTANGLIAKSLDQHLRRLSLGSWIKGLIQKAVLLDTARIVRKFLSLEP

SEQ ID NO: 10652 - protein, 1200 aa, Sesamia nonagrioides
MLTRSAARRARPPSPDSLLGSASSPPVSSATASAVTTPAAAVASSSSDEYFSPPTTPPPARRRGGRRPPDRLGPRGPSASDRVPAPGGSVQRMRWTQSINENVMRSYYGATEGGNNLTAYRVRMLSLFQVLEPAVNVSAQRLSDQVRVIQRNHMLDDVVLDRLRLESRNSHVTPASSLVAVQLNSVSPRPNHVDEEDDDRAISVSPQCIEKLRSALEDAFCEYRSTPPELRPRLPRLPMHKKNKALVCALDSQLSYYLKDSKDLTDTHSILYCGAVAICRVAHVKFPDSDRATRPKSAVPAWQCRIERRIGETRALIGKLTSFREGNTRPRVMRFVRWAFSGTDTSTRDYLFRVTERIDFFKQKIYAWANRIRRYKRRVERYSQNRNFQSDERRVYRAWERSDQGVTDTCLPDDDATCSFWRNIWSVPVSHTEGSWTRVVERACDPVPEMGAITICPQDVARAVRPLPNWKSPGPDGLQNFWIKWFSRSHARLASQFQTALESGSLPQFLTTGVTHLLHKSGSTAEPKNYRPITCLPTVYKVLTSILKSKINTHIDSNSIMSASQNGCRSGSRGTKELLLIDMAISQQVRRSRKDLSTCWIDYKKAYDSVPHTWLMRVLELYKVDATLRTFLMTCMRTWRTVLRYPGCRNIQRNSEPIRIERGIFQGDSLSPLWFCLALNPLSTLLEDSGLGYRLRRGGQVISHLLYMDDLKLFAHTDSQLKELLKITETFSSSIRMEFGVDKCAVMHVKRGEIMESVGTQLTSSINLRALSASETYKYLGMSEALGINVTDMKQSLKERFFGRLKKVLNSLLSGGNKVRAFNGWVMPVLMYSFGILKWTQTELDALDQRVRTLLTANRLHHPRSSVMRLYIPRKCGGRGFLNAKTLHNREVCSLREYFLETDVGMHRDVVAADKGLTPLSLAKENWRKPVVLDTNDRLEVWKSKELHGRFFRALHGPDIDFQASVAWLRFGDLFGETEGFVFAIMDEVMMTNNYRRFIVKDGTVDICRACHRPGESIRHIISGCSRLANGEYLHRHNLVARIIHQQLALKYNLVESKVPYYRYMPDPVLEHGHITLYWDRSIITDRTIVANKPDIVLVDRSERRAMIVDITIPHDENLVKAEKDKQIKYLDLAHEVVDMWEVDSAIIVPIVVTANGLIAKSLDQHLRRLSLGSWIKGLIQKAVLLDTARIVRKFLSLEP

SEQ ID NO: 10653 - protein, 958 aa, Sesamia nonagrioides
MHKKNKALVCALDSQLSNYLKDSKDLADTHSILYCGAVAICRVAHVKFPDSDRATRPKPAVPAWQCRIERRIGETRALIGKLISFREGNTRPRVMRFVRRAFSGTDVSTRDYLLRVTERIDFLKQKIYAWANRIRRYRRRVERYSQNRNFQSDERWVYRAWERSDQGVTDTCLPDDDATRSFWRNIWSVPVSHTEGGWTRDVERACDPVPEMGAITICPQDVARAVRPLPNWKSPGPDGLHNFWIKWFSGSHACLASQFQTALESGSLPQFLTTGITHLLHKSGSTAEPKNYRPITCLPTVYKVLTSILKAKINMHIDSNSIMSASQNGCRNGSRGTKELLLIDMAISQQVRRSRKDLSTCWIDYKKAYDSVPHTWLMRVLELYKVDATLRTFLMTCMSQWRTVLRYPGCRNIQRNSEPIRIERGIFQGDSLSPLWFCLALNPLSTLLEDSGLGYRLRRGGQVISHLLYMDDLKLFAHTNSQLKELLKITETFSSAIRMEFGVDKCAVMHVQRGEIVESVGTQLTGSINLRSLSASETYKYLGMSEALGINVTDMKQSLKERFFGRLKKVLNSLLSGGNKVRAFNGWVMPVLMYSFGILKWTQTELDALDQRVRTLLTANRLHHPRSSVMRLYIPRKCGGRGFLNAKTLHNREVCSLREYFLKTDVGMHRDVVAVDKGLTPLSLAKENWRKPVVLETNDRMEVWQSKELHGRFFRALRGPDVDFHASVAWLRYGDLFGETEGFVCAIMDEVMMTNNYRKFIVKDGTVDICRACHRPGESIRHIISGCSRLANGEYLHRHNLVARIIHQQLALKYNLVESEVPYYRYMPDPVLENGHITLYWDRSIITDRTIVANKPDIVMVDRSERRAMIVDITIPHDENLVKAEKDKQIKYLDLARHVGVDSAIIVPIVVTANGLIAKSLDQHLRRLSLGGWIKGLIQKAVLLDTARIVRKFLSLEP

SEQ ID NO: 10654 - protein, 1074 aa, Sesamia nonagrioides
MFSLFQVLEPAVNVSAQRLSDQVRVIQRNHMLDDTVLDRLRNEMQSSRIIAHQSQTAEVPPQPTNYADEGSNDRATNVSTQCNEELINALEAAIREYRFTPAEQRPRLPRLPMHNRNRALMAALDAQLSDYFDTCEDLTDTHSILYCAAVAACRVAHVKFPSDSRATRPKPVVPAWQRRIERRIGGARALIGKLICFREGNTRPRVMRFVRRAFAGTNISPQNYMARVTERIDFLKQKVYAWANRIRRYKRRVERYTQNRTFQSNERRVYRDWERPEQGVTDTCLPDDDAMCSFWRSIWSVPVSHTEGDWARDVERACNPIPEMGAITICPQDVACAVRQLPNWKSPGPDGLHNFWIKWFPRSHARLASQFQTALVSGSLPQFLTTGITHLLHKSGSTAEPKNYRPITCLPTVYKVLTSILKTKINKHIDSNSIMSASQNGCKSGSRGTKELLLIDMAISQQVRRSRKDLSTCWIDYRKAYDSVPHTWLMRVLELYKVDATLRTFLMSCMKTWRTVLRYLGCRNIQRNSEPIRIERGIFQGDSLSPLWFCLALNLLSTLLEDSGLGYRLRRGGQVISHLLYMDDLKLFAPNKSQLRELLKITETFSSSIRMEFGVDKCAVMHVKRGEIMEPVGTQLTSSINLRALSASETYKYLGMSEALGINVTDMKQSLKERFFGRLKKVLNSLLSGGNKVRAFNGWVMPVLMYSFGILKWTQTELDALDQRVHTLLTANRLHHPRSSVMRLYIPRKCGGRGFLNAKTLHNREVCRLRDYFLVTDVGMHRDVVAADKGLTPLSLAKENWRKPVVLDTNDRMEVWKSKELHGRFFRALHGPDVDLQASVAWLRFGDLFGETEGFVFAIMDEVMMTNNYRGFIVKDGTVDICRACHRPGESIRHIISGCSRLANGEYLHRHNLVARIIHQQLALKYNLVESEVPYYRYTPDPVLENGYITLYWDRSIITDRTIVANKPDIVMVDRSERRAMIVDITIPHDENLVKAEKDKQIKYLDLAHEVVDMWEVDSAIIVPIIVTANGLIAKSLDQHLRSLSLGSWIKGLIQKAVILDTARIVRKILSLEP

SEQ ID NO: 10655 - protein, 1206 aa, Drepana arcuata
MFTRSQARRHNARPPPSASPPSSVSQTPADSDSATLDLRVVATAASSSSDEYFSPPTSPRPVRRQGRVQPPPNGLGPRGQSAPDRVLAVGGNVQRMRWTHTINENVMRAYYGATEGGTSLTACRSRMLLLFQELEPTVNVSAQRLSDQVRVIQRNHRLDDNVLDRLRSEMQGSHVTSAPAQSAAQSLVSSMTLPQPSYTDMEGGDRPLNAGTQYNELVRSTLKDAVQQYKFVSPGLRPRLPRLPMHKKNLALVATLDSLLPEYLDCCEDLTETHQILYCAAIAACRLAHVNFPNHERTGQLKPAVPIWQRRIQRRIDDARVLIGKLSCFREGNTRPRVMRYVRKAFSGSDINPRDYVACVTERIDYLKQKVYAWANRIRRYKQRVDRYTQNRMFQNDQKWVYRGWERSEQGVSDEQLPDNDAVCTFWSNIWSVPVTHTEGDWIEEIKRVCESIQEMGEVTISPKDVADAVQSLSNWKSPGPDGLHNFWLKWLRTSHARLASQFQSSLESGSLPSFLMTGITHLLHKSGSTMDPKNYRPITCLPTMYKLLTSILRAKISIHINNNVIMSASQNGCKNGSRGTKELLLTDMTINQQVRRSRKNLSACWIDYKKAYDSVPHTWLMRVLELYKVNSTLRIFLKSIMGQWKTVLHYPRGRQIPGNDEPIRIERGIFQGDSLSPLWFCLALNPLSTLLESSGLGYRLRRVGQVISHLLYMDDLKLFAPSELQLTELLNVTQNFSNSIRMEFGIDKCAVMHVKRGNIVESVGIQLSDSINIRSLTPTENYTYLGMSEALGIHEADMKKSLLDRFYGRLTKVLKSLLTGGNKVRAYNGWVMPVLMYSFGILKWTQRGLEITDRKVRTLLTSYRMHHPRSSIMRLYIPRKCGGRGCLNAKTLHNREVYKLREYFRSTEVGMHRDVVAVDKGLTALSLAKENWRKPVVLTTNDRREIWQSKGLHGRFYRALHGPDVDLEASLAWLRFGDLFGETEGFVCAIMDEVMMTNNYRKYILRDGTVDICRACHRPGESLRHIISGCSHLANGEYLHRHNQVAKIIHQQLALKYNLVDSEVPYYKYSPDPVLENGHVTLYWDRSIITDRCITANKPDIVLIDRLERRTMIVDITVPHDENLVKAEKDKQIKYLDLAHEIVSMWDVDSAIIVPIVITANGLMAKSLDQHLKRLSLDGWIKCLIQRAVLLETARIVRRFLSLGP

SEQ ID NO: 10656 - protein, 1070 aa, Apamea monoglypha
MTRTLNTPIIIITLHYIIHKYNINMRSYYGATEGGNNLTAYRVRMLSLFQVLEPAVNVTAQRLSDQVRVIQRNHMLDDNVLDRLRNEMQSSHVIAPQSQTAAVLPQSNTSHADEGSNDRATNVSIQCNEELRNALEGAIREYRFMSPELRPRLPRLPMHNKNRALVAVLDAQLSNHFDVCEDLTDTHSILYCAAVAACRVAHVKFASDFRATRPKPAIPAWQCRIERRIGGARALIGKLICFREGNTRPRVMRFVRRAFSGIDISFQDYLSRVTERIDFLKQKVYAWANRIRRYKRRVERYTQNRTFQSDERWVYRGWERPDQGVADTGLPDDDAMCSFWRSIWSAPVSHTEGDWAREVERACDPIPEMEAITICPQDVARAVRPLPNWKSPGPDGLHNFWIKWFSRSHARLASQFQTALESGSLPQFLTTGVTHLLHKSGSTAEPKNYRPITCLPTVYNVLTSILRAKINKHIDTNSIMSASQNGCKNGSRGTKELLLIDMAISQQVRRSRKDLSTCWIDYKKAYDSVPHTWLMRVLDLYKVDATLRTFLMSCMRQWRTVLRYPGCRNIQRNSEPIRIERGIFQGDSLSPLWFCLALNPLSTLLEDSGLGYRLRRGGQVISHLLYMDDLKLFAPNNLQLMELLKVTETFSSAIRMEFGVDKCAVMHVKRGEIVESVGTQLSDSTNLRVLSASETYKYLGMSEALGINVTDMKQSLKERFFVRLKKVLNSLLSGGNKVRAFNSWVMPVLMYSFGILKWTQIELDALDRRVRKLLTANRMHHPRSSVMRLYIPRKCGGRGFLNAKTLHNREICSLREYFLETDVGMHRDVVAVDKGLTPLSLAKENWRKPVVLDTNDRLEVWQSKELHGRFYRALHGPDVDLLASVAWLRFGDLFGETEGFVCAIMDEVMMTNNYRRFIVKDGTVDICRACHRPGESIRHIISGCSRLANGEYLHRHNLVARIIHQQLALKYSLVESEVPYYRYVPDPVHENGHITLYWDRSIITDRTIVAKKPDIVVVDRSERRAMIVDITVPHDENLVKAEKDKQIKYLDLAREVVDMWDVWTQRSLCR

SEQ ID NO: 10657 - protein, 925 aa, Apamea monoglypha
MFCNSPAPTGGCPWIHLHGAYRDNRRLVPPHHLKSCIGPLRVGFGPSYAFQRTGTPWSRDMLKHNDNNNNNDQDYLSRVTERIDFLKQKVYAWANRIRRYKRRVERYTQNRTFQSDERWVYRGWERPDQDVADTCLPDDDAMCSFWRSIWSAPVSHTEGDWAREVERACDPIPEMEAITICPQDVARAVRPLPNWKSPGPDGLHNFWVKWFTRSHARLASQFQTALESGSLPQFLTTGVTHLLHKSGSTAEPKNYRPITCLPTVYKVLTSILRAKINKHIDTNSIMSASQNGCKNGSRGTKELLLIDMAISQQVRRSRKDLSTCWIDYKKAYDSVPHTWLMRVLDLYKVDATLRTFLMSCMGQWRTVLRYPGCRNIQRNSEPIRIERGIFQGDSLSPLWFCLALNPLSTLLEDSGLGYRLRRGGQVISHLLYMDDLKLFAPNNLQLMELLKVTETFSSDIRMEFGVDKCAVMHVKRGEIVESVGTQLSDSTNLRALSVSETYKYLGMSEALGINVTDMKQSLKERFFGRLKKVLNSLLSGGNKVRAFNSWVMPVLMYSFGILKWTQTELDALDRKVRTLLTANRMHHPRSSVMRLYIPRKCGGRGFLNAKTLHNREICSLREYFLETDVGMHRDVVAVDKGLTPLSLAKENWRKPVVLDTNDRMEVWQSKELHGRFYRALHGPDVDLLASVAWLRFGDLFGETEGFVCAIMDEVMMTNNYRRFIVKDGTVDICRACHRPGESIRHIISGCSRLANGEYLHRHNLVARIIHQQLALKYNLVESEVPYYRYVPDPVLENGNITLYWDRSIITDRTIVANKPDIVVVDRSERRAMIVDITVPHDENLVKAEKDKQIKYLDLAREVVDMWDVDSTVIVPIVVTANGLIAKSLDQHLRRLSLGSWIKGLIQKAVLLDTARIVRRFLSLEP

SEQ ID NO: 10658 - protein, 925 aa, Furcula furcula
MTACRVARVKFPNSDAATRLRPAVPAWQCRIERRIGEARVLIGKLTCFREGNTRPRVMRFVRCAFSGTGIDPREYLSRVTERIDFLKQKVCAWANRIRRYKARVDRYSQNNMFQRDQRWVYRSWERPSQIGGEVLRPDDDAMIRFWRNIWSVPVTHSEGDWIGDVRQVCEPIPEMGAITIRPQDVADAVRPLPNWKAPGPDGLHNFWLKWLRSSHACLASLFQSAVESGSLPEFLTTGITHLLHKTNSTADPKNYRPITCLPTVYKTLTSILRAKIYRHVESNSIMSASQNGCRSGARGTKELLLIDMAICQQARRNRKDLSTCWIDYKKAYDSVPHTWLMRVLELYKVNTTLRTFLASCMRQWRTVLLYPGSRQTLGDGEPIRIERGIFQGDSLSPLWFCLALNPLSTLLKSSGLGYRLRRGGQVISHLLYMDDLKLFAPTEVQLMDLLKVTETFSSSIRMEFGVDKCAVMHVKRGRLVESRSVQLSDSTDLRTLSATETYKYLGMSQALGINETDMKQSLRERFLGRLRKVLKSLLSGGNRVRAYNGWVMPVLMYSFGILKWTQTELDTLDRTVRTLLTAYRMHHPRSSVMRLYIPRKCGGRGFLNAKTLHNREIYNLREYFLHCGGEMHTDVVAVDSGLTPLSLAKGNWRKPVVLTTGDREAVWQSKELHGRFYRALHGPDVDFSASVAWLRFGDLFGETEGFVCAIMDEVVMTNNYRKYILRDGTIDICRACHRPGESLRHIISGCSRLANGEYLHRHNQVARIIHQQLALKYRLVTSEVPYYRYVPEPVLEDGHITLYWDRSIITDRTVVTNRPDIVLIDRTERRAMIVDVTVPHDENLVKAEKDKECKYLDLAHEVVDLWDIDKAIIVPIVVSAHGLMAKSLDKHLKRLTLDGWIMGQMQKAVLLETARIVRKFLSLEP

SEQ ID NO: 10659 - protein, 1202 aa, Spodoptera exigua
MLTRAAARRARPPPPASSLSSASPPPGSSLTVSEETPAVAAASSSSDEYYSPPTTPPPTRRRGGRRPPAGLGPRGPSASDRVPAAGGSVQRMRWTQAINENVMRAYYGATEGGNNLTAYRARMLSLFQVLEPAINVSAQRLSDQVRVIQRNRMLDNTVLDRLRTEMGSCAGASSSRTVAPAMMPPSNRGIVSTAADEDSTDTVTHVSTQCNDELRSALECAIREYRYMSPEIRPRLPRLPMHNKNRVLVAALDSQLSNHFDDCEDLSDTHSMMYCAAVAACRVAHVKFPTSDVATRLKPAVPAWQRRIERRIAGARALIGKLICFREGNTRPRVMRFVRRAFSGTDISPQDYMSRVTERIDFLKQKVYAWANRIRRYKRRVQRYTQNRTFRSNERWVYRAWERPDQGVTDTRLPDDDAMCSFWRSIWSVPVSHTEGDWIREVKRACDPIPQMGAINISPQDVARAVRPLPNWKSPGPDGLHNFWIKWFTRSHARLASQFQAALESGSLPQFLTTGVTHLLHKSGSTTEPKNYRPITCLPTVYKVLTSILRSKINSHIDKNNIMSTAQNGCKSGSRGTKELLLIDMTISQQVRRSRKDLSTCWIDYKKAYDSVPHTWLMRVLELYKIDTKLRTFLMSCMRQWSTVLRYPGCRHIQTNSETVRIERGIFQGDSLSPLWFCLALNPLSTLLENSGLGYRLKRGGQVISHLLYMDDLKLFAPNRLQLMELLKLTETFSSAIRMEFGVDKCAVMHVKRGEIVESVGTQLTDSINLRSLSPTETYKYLGMSEALGINVTDMKQSLRERFFGRLKKVFNSFLSGGNKVRAFNDWVMPVLMYSFGVLKWSQTELDTLDRRVRTMLTAYRMHHPRSSVMRLYIPRKCGGRGFLNAKTLHNREVCSLREYFLAADVGMHRDVVAVDKGLTPLSLASENWRKPVVLDTNARREVWQSKELHGRFFRALHGPDVDQLASVSWLRSGDLFGETEGFVCAIMDEVIMTNNYRRFIVKDGTADICRACHRPGESIRHIISGCSRLANGEYLHRHNLVARIIHQQLALKYSLVGSEVPYYRYEPDPVLENGHITLYWDRSIITDRTIVANKPDIVVVDRNERRAMIVDIAVPHDENLVKAEKDKLIKYIDLAREVVDMWDVDSAVIVPIVVSANGLIAKSLDQHLKRLSLGGWIKGLIQKVVLLDTARIVRRFLSLEP

SEQ ID NO: 10660 - protein, 1202 aa, Spodoptera exigua
MLTRAAARRARPPPPASSLSSASPPPGSSLTVSEETPAVAAAMSSSDEYYSPPTTPPPTRRRGGRRPPAGLGPRGPSASDRVPAAGGSVQRMRWTQAINENVMRAYYGATEGGNNLTAYRVRMLSLFQVLEPAINVSAQRLSDQVRVIQRNRMLDNTVLDRLRTEMGSCAGASSSRTVAPAMMPPSNRGIVSTAADEESTDTVTHVSTQCNDELRSALECAIREYRYMSPEIRPRLPRLPMHNKNRVLVAALDSQLSNHFDDCEDLSDTHSMMYCAAVAACRVAHVKFPTSDVATRLKPAVPAWQRRIERRIAGARALIGKLICFREGNTRPRVMRFVRRAFSGTDISPQDYMSRVTERIDFLKQKVYAWANRIRRYKRRVQRYTQNRTFRSNERWVYRAWERPDQGVTDTRLPDDDAMCSFWRSIWSVPVSHTEGDWIREVKRACDPIPQMGAINISPQDVARAVRPLPNWKSPGPDGLHNFWIKWFTRSHARLASQFQAALESGSLPQFLTTGVTHLLHKSGSTTEPKNYRPITCLPTVYKVLTSILRSKINSHIDKNNIMSTAQNGCKSGSRGTKELLLIDMTISQQVRRSRKDLSTCWIDYKKAYDSVPHTWLMRVLELYKIDTKLRTFLMSCMRQWSTVLRYPGCRHIQTNSETVRIERGIFQGDSLSPLWFCLALNPLSTLLENSSLGYRLKRGGQVISHLLYMDDLKLFAPNRLQLMELLKLTETFSSAIRMEFGVDKCAVMHVKRGEIVESVGTQLTDSINLRSLSPTETYKYLGMSEALGINVTDMKQTLRERFFGRLKKVFNSFLSGGNKVRAFNDWVMPVLMYSFGVLKWSQTELDTLDRRVRTMLTAYRMHHPRSSVMRLYIPRKCGGRGFLNAKTLHNREVCSLREYFLAADVGMHRDVVAVDKGLTPLSLASENWRKPVVLDTNARREVWQSKELHGRFFRALHGPDVDQLASVSWLRSGDLFGETEGFVCAIMDEVIMTNNYRRFIVKDGTADICRACHRPGESIRHIISGCSRLANGEYLHRHNLVARIIHQQLALKYSLVGSEVPYYRYEPDPVLENGHITLYWDRSIITDRTIVANKPDIVVVDRNERRAMIVDIAVPHDENLVKAEKDKLIKYIDLAREVVDMWDVDSAVIVPIVVSANGLIAKSLDQHLKRLSLGGWIKGLIQKVVLLDTARIVRRFLSLEP

SEQ ID NO: 10661 - protein, 960 aa, Mamestra configurata
MHNKNRALVCALDSQLTNCFDSSEDLADTHSILYCAAAAACRVAHVKFPNSDRATRPAVPAWQCRIGRRIGEARALIGKLICFREGNTRRRVMRFVRRAFSGTDTSPRDYLTRVTERIDFLKQKIYAWANRIRRYKRRVERYTQNRTFQSNERWVYRAWERPDQGVTDTRLPDDDVMCSFWRNIWSVPVSHTEGDWTREVERACDPIPEMGAITISPQDVARAVRPLPNWKSPGPDGLHNFWIKWFKRSHARLASQFQSALESGSLPQFLTTGITHLLHKSGSTAEPKNYRPITCLPTVYKVLTSILRAKINQHIETNSIMSASQNGCRNRSRGTKELLLIDVAISQQVRRSRRDLSTCWIDYKKAYDSVPHTWLMRVLELYKVDAVLRTFLMSCMGQWRTVLRYPGCRQIQANSDPIRIERGIFQGDSLSPLWFCLALNPLSTLLEGSGQGYRLRRGGQVISHLLYMDDLKLFAPNNLQLMKLLKVTETFSSAISMEFGVDKCAVMHVKRGEIMESVGTQLSDSIHLRSLSSTETYKYLGMSEALGINANDVKQSLKERFFGRLNKVLNSLLSGGNKVRAFNGWVMPVLMYSFGILKWTQTELDALDRRVRSLLTANRMHHPRSSVMRLYIPRKCGGRGFLNAKTLHNREICSLREFFLEADVGMHRDVVAVDKGLTALSLANENWRKPVVLDTNDRREVWQSKELHGRFYRVLHGPDVDFLASVAWLRFGDLFGETEGFVCAIMDEVMMTNNYRKYIVKDGTVDICRACHRPGESIRHIISGCSSLANGDYLHRHNLVARIIHQQLALKYNLVESEVPYYRYVPDPVLENGNCTLYWDRSIITDRTIVANKPDIVVIDRLERRAMIVDIAVPHDVNLVKTEKDKQTKYLDLAREVVDMWDVNTAVIVPIVVTANGIIAKSLDQHLKRLSLGSWIKGLIQKAVLLDTARIVRRFLSQGP

SEQ ID NO: 10662 - protein, 1209 aa, Amphipyra berbera
MQTRSRAKATVTQNTRPTPSVSSLSSASQPPDSSIVSDVTPAAAVASSSSDEFYSPPSSPPPSPPPRRRGRGRPPASLGPRGPPVSDRVPAPGGSVQRMRWTPTMNENCMRAYFGATEGGTNLTAYRGRMLSLFQALEPAVNVSAQRLSDQVRVIQRDHRLTDAALDRLRSEVQSNRIISLQSQNAAQPQVPCMVPPRPNHADEESDDRVTNVSTQCNEQLRSALEHAIREYRFTPPNLRPRIPRLPMNKKNRALMCALDSLLSSYFDNSEGLEDTHSILYCAAVAACRVAHAKFDNNDRDTRPKPAVPAWQCRVERRINEARALIGKLICFREGNTRPRVMRFVRRAFSGTDINPRDYMSRVTERIDFLKQKVYAWANRIRRYKRRVERYTQNRMFHSDERRVYRTWERPDHDVSDTHLPDSDVMNTFWRNIWSMPVTHTEGDWMQEVQRACEPIEEMGDVTIVPQDVTSAVRPMSNWKSPGPDGLHNFWLKWLRSSHARLASQFQSSLESGSLPQFLTTGVTHLLHKSGSTVEPKNYRPITCLPTVYKLLTSILRSKISTHITNNFIMSTSQNGCKNGSRGTKELLLIDMTISQQVRRSRKDLSTCWIDYKKAYDSVPHTWLMRVLELYKVNTTLCAFLTSCMGQWRTVLHYPGCRQIQGRGEPIRIKRGIFQGDSLSPLWFCLALNPLSTLLEGSGLGYRLRRGGQVISHLLYMDDLKLFAPNNLQLVKLLKVTETFSNSIRMEFGVDKCAVMHVKRGGIMESVGTQLSDSIHLRSLSSTETYKYLGMSEALGINVADMKQSLRERFYGRLKKVLKSLLSGGNKVRAFNGWVMPVLMYSFGILKWTQTELDALDRRVRTLLTAYRMHHPRSSVMRLYIPRKCGGRGFLNAKTLHNREVCNLREYFLQADVGMHRDVVAVDKGFTPLSLAKENWRKPVVLDTTGRRDVWQSKELHGRFYRALHGPDVDFLASVAWLRFGDLFGETEGFVCAIMDEVIMTNNYRKYIVKDGTVDICRACHCPGESIRHIISGCSRLANGEYLHRHNLVARIIHQQLALKYNLVDAEVPYYKYVPDPVLENGHITLYWDRSIITDRTIIANKPDIVVIDRSERLTMIVDITVPHDENLVKAEKDKEIKYQDLAHEVVDMWEVDSAVIVPIVVTANGLIAKSLDQHLMRLSLGSWVKGLIQKAVLLDTARIVRKFLSLRP

SEQ ID NO: 10663 - protein, 962 aa, Amphipyra berbera
MHNKNRALVCALDSLLANYFESSEDLGDTHSILYCAAVAACRVANVKFNNSERATRPKLAVPAWQCRIERRIDETRALIGKLICFREGNTRPRVMRFVRRAFSGTGISPREYTSRTTERIDFLKQKVCAWASRIRRYKRRVERYTQNRMFQCDQRWVYRAWERPDQSVSGGRLPDDDAMSSFWRSIWSVPVIHTEGDWMRDIERTCESIEEMGEIVISPQDVAGAVRPLPNWKSPGPDGLHNFWIKWLRSSHARLASQFQSSLESGSLPQFLTTGVTHLLHKSGSTAEPKNYRPITCLPTVYKLLTSILRSKINTHIGNNSVLSSSQNGCRNGSRGTKELLLIDTAISQQVRRSQKSLSTCWIDYKKAYDSVPHTWLMRVLELYKINTTLRTFLRSCMGQWRTVLRYPGCQPIRGSGEPIRIERGIFQGDSLSPLWFCLALNPLSTLLEGSGLGYPLRRGGQVVSHLLYMDDLKLFAPTKLQLVDLLKVTETFSNSIRMEFGVDKCAVMHVRRGRIMESEGLQLSDSIHLSPLSANDTYKYLGMSEGLGISEADMKQSLRERFFGRLKKVLKSLLSGGNKVRAFNGWVMPVLMYSFGILKWTQTELDALDRRVRTLLTANRMHHPRSSVMRLYIPRKCGGRGLLNAKTLHNREVCSLREFFLHADAGMHRDVVAVDKGLTPLSLARENWRKPVVLSTNDRREIWQSKELHGRFYRALHGPDVDFLASVSWLRFGDLFGETEGFVCAIMDEVIMTNNYRKYIVKDGTVDICRACHCPGESLRHIISGCSRLANGEYLHRHNQVARIIHQQLALKYNLVESEVPYYRYVPDPVLENGRITLYWDRSIITDRTIVANKPDIVVIDRSERRTMIVDVTIPHDGNLVKAEKDKQIKYLDLAHEVVNMWDVESATIVPIVVTANGLMAKSLDKHLMRLSLGGWIKGLIQKAVLLDTARIVRRFLSLEP

SEQ ID NO: 10664 - protein, 941 aa, Noctua janthe
MITHLQLAIYLIIRKSHTTTIIIIIIIFSDDRATRPKPAVPSWQYRIERRIGEARALIGKLICFREGNTRPRVMRFVRRAFSGTDISARDYMSRVTERIDFLKQKVYAWANRIRRYKRRVDRYTQNRTFQRDKRWVYRAWERPDQGVADTRLPDDDAMSSFWRSIWSVPVSHTEGEWTREVERACDLVPEMGAITISPQDVVRAVRPLPNWKSPGPDGLHNFWIKWFTRSHARLAILFQSALESGSLPEFLTTGITHLLHKSGSTAEPKNYRPITCLPTVYKVLTSILRAKINKHIDDNSVMSASQNGCRNGSRGTKELLLIDMAISQQVRRSRRDLSTCWIDYKKAYDSVPHTWLMRVLELYKVDSTLRIFLMSCMGQWRTVLRYPGCRQIQRNSEPIRIKRGIFQGDSLSPLWFCLALNPLSTLLEDSGLGYRLRRGGQVISHLLYMDDLKLFAPNDLQLMELLKITETFSSAIRMEFGVDKCAVMHVKRGEIVESVGTQLSDSINLRSLSATETYKYLGMSEALGINVADMKQSLKERFFGRLKKVFNSLLSGGNKVRAFNGWVMPVLMYSFGILKWTQTELDALDRRVRTLLTAYRMHHPRSSVMRLYIPRRCGGRGFLNAKTLHNREICSLREYFLETDVGMHRDVVAVDKGLTPLSLAKENWRKPVVLDTNDRMEVWQSKELHGRFFRALHGPDVDLPASVAWLRSGDLFGETEGFVCAIMDEVMMTNNYRRFIVKDGTVDICRACHRPGESIRHIISGCSRLANGEYLHRHNLVARIIHQQLALKYNLVESEVTYYKYVPDPVLENSSITLYWDRSIVTDRTIVANKPDIVVVDRSERRAMIVDITVPHDGNLVKAEKDKQIKYLDLAHEVVDMWDVDSAIIVPIVVSAHGLIAKSLDQYLRRLSLGSWIKGLIQKAVLLDTARIVRRFLSLEP

SEQ ID NO: 10665 - protein, 920 aa, Noctua janthe
MSPHVKFSDDRATRPKPAVPAWQYRIEQRIDGARALIGKLICFREGNTRPRVMRFVRRAFSGTDISPRDYMSRVTERIDFLKQKVYAWANRIRRYKRRVDRYTQNRTFQRDERWVFRAWERPDQGVADTRLPDDDAMCSFWRSIWSVPVSHTEGEWTRRVERACDLVPEMGAINISPQDVVRAVRPLPNWKSPGPDGLHNFWIKWFTRSHARLAILFQSALESGSLPEFLTTGITHLLHKSGSTAEPKNYRPITCLPTVYKVLTSILRAKINKHIDDNSVMSASQNGCRNGSRGTKELLLIDMAISQQVRRSRKDLSTCWIDYKKAYDSVPHTWLMRVLELYKIDATLRTFLMSCMGQWRTALRYPGCRQIQRNSEPIRIERGIFQGDSLSPLWFCLVLNPLSTLLEDSGLGYRLRRGGQVISHLLYMDDLKLFAPNDLQLMELLKVTETFSSAIRMEFGVDKCAVMHVKRGEIVKSVGTQLSDSINLRSLSATETYKYLGMSEALGINVADMKQSLKERFFGRLKKVFNSLLSGGNKVRAFNGWVMPVLMYSFGILKWTQTKLDALDRRVRTLLTAYRMHHPRSSVMRLYIPRRCGGRGFLNAKTLHNREICSLREYFLETDVGMHRDVVAVDKGLTPLSLAKENWRKPVVLDTNDRMEVWQSKELHGRFFRALHGPDVDLSASVAWLRSGDLFGETEGFVCAIIDEVMMTNNYRRFIVKDGTVDICRACHRPGESIRHIISGCSRLANGEYLHRHNLVARIIHQQLALKYNLVESEVPYYKYVSDPVLENGSITLYWDRSIITDRTIVANKPDIVVVDRSERRAMIVDITVPHDENLVKAEKDKQIKYLDLAREVVDMWDVDSAIIVPIVVSAHGLIAKSLDQYLRRLSLGSWIKGLIQKAVLLDTARIVRRFLSLEP

SEQ ID NO: 10666 - protein, 1197 aa, Noctua janthe
MLTRSATRRARLSPPDPSLSSASPPPESSPIVSAVTPAVAVASSSSDEYFSPPTTPPPVRRRGGRRPPDGLGPRGPPASDRVPAPGGSVPRMRWTQSINANVMRAYYGATEGGNNLTAYRVRMLSLFQVLEPAVNVSAQRLSDQVRVIQRNGMLDDTVLDRLRTEMQSSHVIATPPQTVVPPQSTIIPTHDNNVSNDLVTNVSTQCNEEMRCALEGAIREYRFMQPDLRPRVPRLPMHNKNKVLVAVLDSQLSNYFDNCENLTDAHSVLYCAAVAACRVAHVKFSDDRATRPKPAVPSWQYRIERRIGEARALIGKLICFREGNTRPRVMRFVRRAFSGTDISARDYMSRVTERIDFLKQKVYAWANRIRRYKRRVDRYTQNRTFQRDERWVYRAWERPDQGVADTHLPDDDAMCSFWRSIWSVPVSHTEGEWTREVERACDLVPEMGAITISPQDVVRAVRPLPNWKSPGPDGLHNFWIKWFTRSHARLAILFQSALESGSLPEFLTTGITHLLHKSGSTAEPKNYRPIACLPTVYKVLTSILRAKINKHVDDNSVMSASQNGCRNGSRGTKELLLIDMAISQQVRRSRRDLSTCWIDYKKAYDSVPHTWLMRVLELYKVDSTLRIFLMSCMGQWRTVLRYPGCRQIQRNSEPIRIERGIFQGDSLSPLWFCLALNPLSTLLEDSGLGYRLRRGGQVISHLLYMDDLKLFAPNDLQLMELLKVTETFSSAIRMEFGVDKCAVMHVKRGEIVESVGTQLSDSINLRSLSATETYKYLGMSEALGINVADMKQSLKERFFGRLKKVFNSLLSGGNKVRAFNGWVMPVLMYSFGILKWTQTELDALDRRVRTLLTTYRMHHPRSSVMRLYIPRRCGGRGFLNAKTLHNREICSLREYFLETDVGMHRDVVAVDKGLTPLSLAKENWRKPVVLDTNDRMEVWQSKELHGRFFRALHGPDVDLPASVAWLRSGDLFGETEGFVCAIMDEVMMTNNYRRFIVKDGTVDICRACHRPGESIRHIISGCSRLANGEYLHRHNLVARIIHQQLALKYNLVESEVPYYKYVPDPVLENGNITLYWDRSIVTDRTIVANKPDIVVVDRSERRAMIVDITVPHDGNLVKAEKDKQIKYLDLAHEVVDMWDVDSAIIVPIVVSAHGLIAKSLDQYLRRLSLGSWIKGLIQKAVLLDTARIVRRFLSLEP

SEQ ID NO: 10667 - protein, 1169 aa, Noctua janthe
MIMRNLITPAVAVASSSSDEYFSPPTTPPPVRRRGGRRPPDGLGPRGPPASDRVPAPGGSVPRMRWTQSINANVMRAYYGATEGGNNLTAYRVRMLSLFQVLEPAVNVSAQRLSDQVRVIQRNGMLDDTVLDRLRTEMQSSHVIATPAQTVVPPQSTIIPTHDNNVSNDMVTNVSTQCNEEMRCALEGAIREYRFMQPDLRPRVPRLPMHNKNKVLVAVLDSQLSNYFDNCEDLTDAHSILYCAAVAACRVAHVKFSDDRATRPKPAVPSWQYRIERRIGEARALIGKLICFREGNTRPRVMRFVRRAFSGTDISARDYMSRVTERIDFLKQKVYAWANRIRRYKRRVDRYTQNRTFQRDERWVYRAWERPDQGVADTHLPDDDAMCSFWRSIWSVPVSHTEGEWTREVERACDLVPEMGAITISPQDVVRAVRPLPNWKSPGPDGLHNFWIKWFTRSHARLAILFQSALESGSLPEFLTTGITHLLHKSGSTAEPKNYRPIACLPTVYKVLTSILRAKINKHIDDNSVMSAFQNGCRNGSRGTKELLLIDMAISQQVRRSRRDLSTCWIDYKKAYDSVPHTWLMRVLELYKVDSTLRIFLMSCMGQWRTVLRYPGCRQIQRNSEPIRIERGIFQGDSLSPLWFCLALNPLSTLLEDSGLGYRLRRGGQVISHLLYMDDLKLFAPNDLQLMELLKVTETFSSAIRMEFGVDKCAVMHVKRGEIVESVGTQLSDSINLRSLSATETYKYLGMSEALGINVADMKQSLKERFFGRLKKVFNSLLSGGNKVRAFNGWVMPVLMYSFGILKWTQTELDALDRRVRTLLTTYRMHHPRSSVMRLYIPRRCGGRGFLNAKTLHNREIYSLREYFLETDVGMHRDVVAVDKGLTPLSLAKENWRKPVVLDTNDRMEVWQNKELHGRFFRALHGPDVDLPASVAWLRSGDLFGETEGFVCAIMDEVMMTNNYRRFIVKDGTVDICRACHRPGESIRHIISGCSRLANGEYLHRHNLVARIIHQQLALKYNLVESEVPYYKYVPDPVLENGNITLYWDRSIVTDRTIVANKPDIVVVDRSERRAMIVDITVPHDGNLVKAEKDKQIKYLDLAHEVVDMWDVDSAIIVPIVVSAHGLIAKSLDQYLRRLSLGGWIKGLIQKAVLLDTARIVRRFLSLEP

SEQ ID NO: 10668 - protein, 1200 aa, Mythimna ferrago
MLTRAAARRARPPPLASSLSSASLPPEPSLTVSAVTPAAAAASSSSDEYYSPPTTPPPARRRGGRRPPACLGPRGPPVSDRVPAAGGSVPRMRWTQSTNENVMRAYYGATEGGNNLTAYRVRMLSLFQVLEPAVNVSAQRLSDQVRVIQRNNMLDDTVLDRLRTEMSNRVITPPSQPVVPVVVPQSSHISLHNDEVSTDTVTNVSTQCNNELRSALECAIREYRNMPLELRPRLPRLPMHNKNKALVAALDSQLSNYFDDCEDLTDTHSIMYCAAVAACRVAHVKFPNSDVATRPKPAVPAWQYRIERRIGGARALIGKLICFREGNTRPRVMRFVRRAFSGTDISPRDYMSRVTERIDFLKQKVYAWANRIRRYKRRVERYIQNSTFRSNERWVYRAWERPDQGVTDTRPPDDDAMCSFWRNIWSVPVSHTEGGWTREVERACESVTEMGAITISPQDVARAVRPLPNWKSPGPDGLHNFWIKWLQRSHARLASQYQAALESGSLPEFLTTGVTHLLHKSGSTAEPKNYRPITCLPTVYKVLTSILRAKINHHVDNNAIMSASQNGCRNGSRGTKELLLIDMAISQQVRRSRKDLSTCWIDYKKAYDSVPHTWLMRVLELYKVDATLRTFLMSCMRQWKTVLRYPGCRNIQRNSEPVRIERGIFQGDSLSPLWFCLALNPLSTLLENSGLGYRLKRGGQVISHLLYMDDLKLFAPNNLQLMELLKVTETFSSAIRMEFGVDKCAVMHIKRGEIVESVGIQLSDSIHLRSLSPTETYKYLGMSEALGINATDMKQSLRERFFGRLKKVLNSLLSGGNKVRAFNGWVMPVLMYAFGVLKWTQTELDALDRRVRTLLTAYRMHHPRSSVMRLYIPRKCGGRGFLNAKSLHNREVCSLREYFLAADGGMHRDVVAVDKGLTPLSLANENWRKPVVLDTNVRREVWQSKELHGRFFRALHGPDVDQLASVAWLRVGDLFGETEGFVCAIMDEVIMTNNYRRFIVKDGTVDICRACHRPGESIRHIISGCSRLANGEYLHRHNLVARIIHQQLALKYSLVQSEVPYYRYVPDPVLDSGDITLYWDRSIITDRTIVANKPDIVVVDRSERRAMIVDISVPHDENLAKAEKDKQIKYIDLAREVVDMWEVDSAIIVPIVVSANGLIAKSLDQHLRRLSLGDWIKGLIQKAVLLDTARIVRRFLSLEP

SEQ ID NO: 10669 - protein, 1197 aa, Mythimna ferrago
MLTRAAARRARPPPPASSLSSASPPPEPSLNASAVTPAATVASSSSDEFYSPPTSPPPARRRRGRRPPSSLGPRGPPASDRVPAPGGSVQRMRWTQSINENVMRSYYGATEGGNNLTAYRVRMLSLFQVLEPAVNVSAQRLSDQVRVILRNHMLDDSVLDRLRTEMSDRVITPPSQPVVPVVVPPSSHISFHTDEVSTDMVTNVSTQCNNELRSALECAIREYRNIPPELRPRIPRLPMCNKNRALVAALDSQLSNYFDDCEDLTETHSIMYCAAVAACRVAHVKFPDSDEATRPKSAVPAWQCRIESRIGGARALIGKLICFREGNTRPRVMRFVRRAFSGTNISPRDYMSRVTERIDFLKQKVYAWANRIRRYKRRVERYTQNRTFRSNERWVYRAWERPDQGVTDARLPEDDAMCSFWRSIWSVPVSHTEGDWTREVERACDPIPQMGTIDISPQDVARAVRPLPNWKSPGPDGLHNFWIKWFTRSHARLAYQFQSALESGSLPQFLTTGITHLLHKSGSTAEPKNYRPITCLPTVYKVLTSILRSKINSHIDENSIMSPSQNGCRNGSRGTKELLLIDMTISQQVRRSRKDLSTCWIDYKKAYDSVPHTWLMRVLELYKIDTTLRTFLMSCMRQWSTVLRYPGCRNIQRNSEPVRIERGIFQGDSLSPLWFCLALNPLSTLLENSGLGYRLKRGGQVISHLLYMDDLKLFAPNNLQLMELLKVTETFSSAIRMEFGVDKCAVMHVKRGEVVESVGVQLTDSINLRSLSPTETYKYLGMSEALGISTIDMKQSLKERFFGRLKKVFNSLLSGGNKVRAFNGWVMPVLMYSFGVLKWTQTELDALDRRVRTLLTTYRMHHPRSSVMRLYIPRKCGGRGFLNAKTLHNREVCSLREYFLAADVGMHRDVVALDKGLTPLSLANENWRKPIVLDTDDRREVWQSKELHGRFFRALHGPDVDQLASVAWLRFGDLFGETEGFVCAIMDEVIMTNNYRRFIVKDGTVDICRACHRPGESIRHIISGCSRLANGEYLHGHNLVARIIHQQLALKYSLVESEVPYYRYEPDPVLDNGHITLYWDRPIITDRTIVANKPDIVVVDRSERRAMIVDISVPHDENLVKAKQIKYIDLAREVVDMWEVDSAIIVPIVVSANGLIAKSLDQHLRRLSLGDWIKGLIQKAVLLDTARIVRRFLSLEP

SEQ ID NO: 10670 - protein, 1107 aa, Mythimna ferrago
MRWTQSINENVMRSYFGATEGGTNLTAYRGRMLSLFQVLEPAVNVSAQRLSDQVRVIQRNRMLDDAVLDRLRLESRNGRVSPISPPAAVQRQPSVSPRPDHVGEDDDDGAISVSTQCNARLRSALEDAFREYRSIPPELRPRLPRLPMHRKNRALVCALDSQLSNCFDSSEDLTDTHSILYCAAAAACRVAHVKIPNNDRATRPAKPAWQCRIERRIGEARALIGKLICFREGNTRPRVMRFVRRAFSGTDISPRDYLPRITEHIDFLKQKVYAWANRIRRYKRRVERYTQNHTFQSNERWVYRAWERPDQSVIDTRLPDDDAMYSFWRSIWSVPVNHTEGDWTREIERVCELVPEMGAINISPQDVARAVRPLPNWKSPGPDGLHNFWLKWFQSSHARLAFQFQSALESGSLPQFLTTGITHLLHKSGSTVEPKNYRPITCLPTVYKVLTSILRAKINNHIETNSIMSASQNGCRNGSRGTKELLLIDVAISQQVRRSRRDLSTCWIDYKKAYDSVPHTWLMRVLELYKVDATLRAFLMSCMGQWRTVLHYPGCRRVSENSEPLRIERGIFQGDSLSPLWFCLPLNPLSTLLEASGLGYRLRREGQVISHLLYMDDLKLFAFNNLQLMELLKVTETFSSAIRMEFGLDKCAVMHVKRGEIMESVGTQLSDSIHLRSLCSTETYKYLGMSEALGINAADVKQSLRERFFGRLNKVLSSLLSGGNKVRAFNGWVMPVLMYSFGILKWTQTELDALDRRVRTLLTANRMHHPRSSVMRLYIPRKCGGRGFLNAKTLHNREVCSLREYFLETDVGMHRDVVAVDKSLTPLSLANENWRKPIVMDTIERKEVWKGKELHGRFYRALHGRDVDLLASVSWLRFGDLFGETEGFVFAIMDEVMMTNNYRKYIVKDGTVDICRACHRPGESIRHIISGYSHLANGDYLHRHNLVARIIHQQLALKYNLVESEVPYYRYVPDPVLENGSVTLYWDRSIITDRTIVANKPDIVVIDRLERRTMIVDIAVPHDENLVKAEKDKQTKYLDLAREVVDMWEVDRAIIVPIVVTANGLIAKSLDQHLRRLSLSSWIKGLIQKAVLLDTARIVRRFLSQEP

SEQ ID NO: 10671 - protein, 1200 aa, Mythimna ferrago
MLTRAAARRARPPPPASSLSSASPPPEPSLNASAVTPAATVASSSSDDFYSPPTSPPPARRRRGRRPPSSLGPRGPPASDRVPAPGGSVQRMRWTQSINENVMRSYYGATEGGNNLTAYRVRMLSLFQVLEPAVNVSAQRLSDQVRVILRNHMLDDSVLDRLRTEMSDRVITPPSQPVVPVVVPPSSHISFHTDEVSTDMVTNVSTQCNNELRSALECAIREYRNIPPELRPRIPRLPMCNKNRALVAALDSQLSNYFDDCEDLTETHSIMYCAAVAACRVAHVKFPDSDEATRPKSAVPAWQCRIERRIGGARALIGKLICFREGNTRPRVMRFVRRAFSGTNISPRDYMSRVTERIDFLKQKVYAWANRIRRYKRRVERYTQNRTFRSNERWVYRAWERPDQGVTDARLPDDDAMCSFWRSIWSVPVSHTEGDWTRGVERACDPIPQMGAIDISPQDVARAVRPLPNWKSPGPDGLHNFWIKWLTRSHARLAYQFQSALESGSLPQFLTTGITHLLHKSGSTAEPKNYRPITCLPTVYKVLTSILRSKINSHIDENSIMSPSQNGCRNGSRGTKELLLIDMTISQQVRRSRKDLSTCWIDYKKAYDSVPHTWLMRVLELYKIDTTLRTFLMSCMRQWSTVLRYPGCRNIQRNSEPVRIERGIFQGDSLSPLWFCLALNPLSTLLENSGLGYRLKRGGQVISHLLYMDDLKLFAPNNLQLMELLKVTETFSSAIRMEFGVDKCAVMHVKRGEVVESVGVQLTDSINLRSLSPTETYKYLGMSEALGISTIDMKQSLKERFFGRLKKVFNSLLSGGNKVRAFNGWVMPVLMYSFGVLKWTQTELDALDRRVRTLLTAYRMHHPRSSVMRLYIPRKCGGRGFLNAKTLHNREVCSLREYFLAADVGMHRDVVALDKGLTPLSLANENWRKPIVLDTDDRREVWQSKELHGRFFRALHGPEVDQLASVAWLRFGDLFGETEGFVCAIMDEVIMTNNYRRFIVKDGTVDICRACHRPGESIRHIISGCSRLANGEYLHRHNLVARIIHQQLALKYSLVESEVPYYRYEPDPVLDNGHITLYWDRPIITDRTIVANKPDIVVVDRSERRAMIVDISVPHDENLVKAEKDKQIKYIDLACEVVDMWEVDSAIIVPIVVSANGLIAKSLDQHLRRLSLGDWIKGLIQKAVLLDTARIVRRFLSLEP

SEQ ID NO: 10672 - protein, 1200 aa, Mythimna ferrago
MLTRSRARQQQTHPTSSDSSFSSASQPPGPAPAVSPVIPVAAVASSSSDEYFSPPTTPPPARRRGRGRPPACLGPRGPPASGGVPAAGGSVQRMRWTQSINENVMRSYFGATEGGTNLTAYRGRMLSLFQVLEPAVNVSAQRLSDQVRVIQRNRMLDDAVLDRLRLESRNGRVSPVSPPAAVQLQPSVSPRPDHVGEDDDDGAISVSTQCNARLRSALEDAFREYRSIPPELRPRLPRLPMHRKNRALVCALDSQLSNCFDSSEDLTDTHSILYCAAAAACRVAHVKIPNSDRATRPVKPAWQCRIERRIGEARALIGKLICFREGNTRPRVMRFVRRAVSGTDVSPRDYLPRITERIDFLRQKVYAWANRIRRYKRRVERYTQNRAFQSNERWVYRAWERPDQSVIDTRLPDDDAMYSFWRSIWSVPVSHTEGDWTRGVERECELIPEMGAITISPQDVARAVRPLPNWKSPGPDGLHNFWLKWFKSSHARLASQFQSALKSGSLPQFLTTGITHLLHKSGSTAEPKNYRPITCLPTVYKVLTSILRAKINSHIETNSIMSASQNGCRNGSRGTKELLLIDVAISQQVRRSRRDLSTCWIDYKKAYDSVPHTWLMRVLELYKIDVTLRTFLMSCMGQWRTVLHYPGCRRVSENSEPLRIERGIFQGDSLSPLWFCLALNPLSTLLEGSGLGYRLRREGQVISHLLYMDDLKLFASNNLQLMELLKVTETFSSAIRMEFGLDKCAVMHVKRGEIMESVGTQLSDSIHLRSLCSTETYKYLGMSEALGINAADVKQSLRERFFGRLNKVLNSLLSGGNKVRAFNGWVMPVLMYSFGILKWTQTELDALDRRVRTLLTANRMHHPRSSVMRLYIPRKCGGRGFLNAKTLHNREVCSLREYFLETDVGMHRDVVAVDKGLTPLSLANENWRKPIVMDTNERKEVWKGKELHGRFYRALHGPDVDLLASVSWLRFGNLFGETEGFVFAIMDEVMMTNNYRKYIVKDGTVDICRACHRPGESIRHIISGCSHLANGDYLHRHNLVARIIHQQLALKYNLVESEVPYYKYVPDPVLENGSVTLYWDRSIITDRTIVANKPDIVVIDRLERRTMIVDIAVPHDENLVKAEKDKQTKYLDLAREVVDMWEVDRAIIVPIVVTANGLIAKSLDQHLRRLSLGSWIKGLIQKAVLLDTARIVRRFLSQEP

SEQ ID NO: 10673 - protein, 960 aa, Mythimna ferrago
MHRKNRALVCALDSQLSNCFDSSEDLSDTHSILYCAAAAACRVAHVKIPNNDRATRPAKPAWQCRIERRIGETRALIGKLICFREGNTRPRVMRFVRRAFSGTDISPRDYLPRITERIDFLKQKVYAWANRIRRYKRRVERYTQNHTFQSNERWVYRAWERPDQSVIDTRLPDDDAMYSFWRSIWSVPVNHTEGDWTREIERECELIPEMGAINISPQDVACAVRPLPNWKSPGPDGLHNFWLKWFQSSHARLASQFQSALESGSLPQFLTTGITHLLHKSGSTAEPKNYRPITCLPTVYKVLTSILRAKINNHIETNSIMSASQNGCRNGSRGTKELLLIDVAISQQVRRSRRDLSTCWIDYKKAYDSVPHTWLMRVLELYKVDATLRAFLMSCMGQWRTVLHYPGCRRVSENSEPLRIERGIFQGDSLSPLWFCLALNPLSTLLEGSGLGYRLRREGQVISHLLYMDDLKLFASNNLQLMELLKVTETFSSAIRMEFGLDKCAVMHVKRGEIMESVGTQLSDSIHLRSLCSTETYKYLGMSEALGINAADVKQSLRERFFGRLNKVLNSLLSGGNKVRAFNGWVMPVLMYSFGILKWTQTELDALARRVRTLLTANRMHHPRSSVMRLYIPRKCGGRGFLNAKTLHNREVCSLREYFLETDVGMHRDVVAVDKGLTPLSLASENWRKPIVMDTNERKEVWKGKELHGRFYRALHGPDVDLLASVSWLRFGNLFGETEGFVFAIMDEVMMTNNYRKYIVKDGTVDICRACHRPGESIRHIISGCSHLANGDYLHRHNLVAKIIHQQLALKYNLVESEVPYYKYVPDPVLENGSVTLYWDRSIITDRTIVANKPDIVVIDRLERRTMIVDIAVPHDENLVKAEKDKQTKYLDLAREVVDMWEVDRAIIVPIVVTANGLIAKSLDQHLRRLSLGSWIKGLIQKAVLLDTARIVRRFLSQEP

SEQ ID NO: 10674 - protein, 1200 aa, Mythimna ferrago
MLTRSRAQQLNTHLTTSGSSLSSALQPPGPAPAVSPEIPVAAVASSSSDEYFSPPTTPPPTRRRGRGRPPACLGPRGPPASDRVPAAGGSVQRMRWTQSINENVMRSYFGATEGGTNLTAYRGRMLSLFQVLEPAVNVSAQRLSDQVRVIQRNRMLDDAVLDRLRLESRNGRVSPVSPPAAVQRQLSVSPRPDYVGEDDDDEAISVSTQCNARLRSALEDAFREYRSIPPELRPRLPRLPMHRKNRALVCALDSQLSNFFDSSEDLTDTHSILYCAAAAACRVAHVKIPNSDRATRPAKPAWQCRIERRIGEARALIGKLICFREGNTRPRVMRFVRRAFSGTDISPRDYLPRITERIDFLRQKVYAWANRIRRYKRRVERYTQNRAFQSNERWVYRAWERPDQSVIDTHLPDDDAMYSFWRSIWSVHVSHTEGDWTREVERECELIPEMGAITISPQDVARAVRPLPNWKSPGPEGLHNFWLKWFKSSHARLASQFQSALESGSLPQFLTTGITHLLYKSGSTAEPKNYRPITCLPTVYKVLTSILRAKINSHIETNSIMSASQNGCRNGSRGTKELLLIDVAISQQVRRSRRDLSTCWIDYKKAYDSVPHTWLMRVLELYKIDVTLRTFLMSCMEQWRTVLHYPGCRRVSENSEPLRIERGIFQGDSLSPLWFCLALNPLSTLLEGSGLGYRLRREGQVISHLLYMDDLKLFASNNLQLMELLKVTETFSSAIRMEFGLDKCAVMHVKRGKIMESVGTQLSDSIHLRSLCSTETYKYLGMSEALGINAADVKQSLRERFFGRLNKVLKSLLSGGNKVRAFNGWVMPVLMYSFGILKWTQTELDALDRRVRTLLTANRMHHPRSSVMRLYIPRKCGGRGFLNAKTLHNREVCSLREYFLETDVGMHRDVVAVDKGLTPLSLANENWRKPIVMDTNERKEVWKGKELHGRFYRALHGPDVDLLASVSWLRFGDLFGETEGFVFAIMDEVMMTNNYRKYIVKDGTVDICRACHRPGESIRHIISGCSHLANGDYLHRHNLVARIIHQQLALKYNLVESEVPYYRYVPDPVLENGSVTLYWDRSIITDRTIVANKPDIVVIDRLERRTMIVDIAVPHDENLVKAEKDKQTKYLDLAREVVDMWEVDRAIIVPIVVTANGLIAKSLDQHLRRLSLGSWIKGLIQKAVLLDTARIVRRFLSQEP

SEQ ID NO: 10675 - protein, 1107 aa, Mythimna ferrago
MRWTQSINENVMRSYFGATEGGTNLTAYRGRMLSLFQVLEPAVNVSAQRLSDQVRVIQRNRMLDDAVLDRLRLESRNGRVSPVSPPAAVQLQPSVSPRPDHVGEDDDDGAISVSTQCNACLRSALEDAFREYRSIPPELRPRLPRLPMHRKNRALVCALDSQLSNCFDSSEDLTDTHSILYCAAAAACRVAHVKIPNSDRATRPVKPAWQCRIERRIGEARALIGKLICFREGNTRPRVMRFVRRAFSGTDVSPRDYLPRITERIDFLRQKVYAWANRIRRYKRRVERYTQNRAFQSNERWVYRAWERPDQSVIDTRLPDDDAMYSFWRSIWSVPVSHTEGDWTRGVERECELIPEMGAITISPQDVARAVRPLPNWKSPGPDGLHNFWLKWFKSSHARLASQFQSALESGPLPQFLTTGITHLLHKSGSTAEPKNYRPITCLPTVYKVLTSILRAKINSHIETNSIMSASQNGCRNGSRGTKELLLIDAAISQQVHRSRRDLSTCWIDYKKAYDSVPHTWLMRVLELYKIDVTLRTFLMSCMGQWRTVLHYPGCRRVSENSEPLRIERGIFQGDSLSPLWFCLALNPLSTLLEGSGLGYRLRREGQVISHLLYMDDLKLFASNNLQLMELLKVTETFSSAIRMEFGLDKCAVMHVKRGEIMESVGTQLSDSIHLRSLSSTETYKYLGMSEALGINAADVKQSLRERFFCRLNKVLKSLLSGGNKVRAFNGWVMPVLMYSFGILKWTQTELDALDRRVRTLLTANRMHHPRSSVMRLYIPRKCGGRGFLNTKTLHNREVCSLREYFLETDVGMHRDVVAVDKGLTPLSLASENWRKPIVMDTNERKEVWKGKELHGRFYRALHGPDVDLLTSVSWLRFGNLFGETEGFVFAIMDEVMMTNNYRKYIVKDGTVDICRACHRPGESIRHIISGCSHLANGDYLHRHNLVARIIHQQLALKYNLVESEVPYYRYVPDPVLENGSVTLYWDRSIITDRTIVANKPDIVVIDRLERRTMIVDIAVPHDENLVKAEKDKQTKYLDLAREVVDMWEVDRAIIVPIVVTANGLIAKSLDQHLRRLSLGSWIKGLIQKAVLLDTARIVRRFLSQEP

SEQ ID NO: 10676 - protein, 1200 aa, Mythimna ferrago
MLTRAAARRARPPPLASSLSSASLPPEPSLTVSAVTPAAAAASSSSDEYYSPPTTPPPARRRGGRRPPACLGPRGPPVSDRVPAAGGSVPRMRWTQSTNENVMRAYYGATEGGNNLTAYRVRMLSLFQVLEPAVNVSAQRLSDQVRVIQRNNMLDDTVLDRLRTEMSNRVITPPSQPVVPVVVPQSSHISLHTDEVSTDTVTNVSTQCNNELRSALECAIREYRNMPLELRPRLPRLPMHNKNKALVAALDSQLSNYFDDCEDLTDTHSIMYCAAVAACRVAHVKFPNSDVATRPKPAVPAWQYRIERRIGGARALIGKLICFREGNTRPRVMRFVRRAFSGTDISPRDYMSRVTERIDFLKQKVYAWANRIRRYKRRVERYIQNSTFRSNERWVYRAWERPDQGVTDTRPPDDDAMCSFWRNIWSVPVSHTEGGWTQEVERACESVTEMGAITISPQDVARAVRPLPNWKSPGPDGLHNFWIKWLQRSHARLASQYQAALESGSLPEFLTTGVTHLLHKSGSTAEPKNYRPITCLPTVYKVLTSILRAKINHHVDNNAIMSASQNGCRNGSRGTKELLLIDMAISQQVRRSRKDLSTCWIDYKKAYDSVPHTWLMRVLELYKVDATLRTFLMSCMRQWRTVLRYPGCRNIQRNSEPVRIERGIFQGDSLSPLWFCLALNPLSTLLENSGLGYRLKRGGQVISHLLYMDDLKLFAPKNLQLMELLKVTETFSSAIRMEFGVDKCAVMHIKRGEIVESVGIQLSDSIHLRSLSPTETYKYLGMSEALGINATDMKQSLRERFFGRLKKVLNSLLSGGNKVRAFNGWVMPVLMYAFGVLKWTQTELDALDRRVRTLLTAYRMHHPRSSVMRLYIPRKCGGRGFLNAKSLHNREVCSLREYFLAADGGMHRDVVAVDKGLTPLSLANENWRKPVVLDTNVRREVWQSKELHGRFFRALHGPDVDQLASVAWLRVGDLFGETEGFVCAIMDEVIMTNNYRRFIVKDGTVDICRACHRPGESIRHIISGCSRLANGEYLHRHNLVARIIHQQLALKYSLVESEVPYYRYVPDPVLDSGDITLYWDRSIITDRTIVANKPDIVVVDRSERRAMIVDISVPHDENLAKAEKDKQIKYIDLAREVVDMWEVDSAIIVPIVVSANGLIAKSLDQHLRRLSLGDWIKGLIQKAVLLDTARIVRRFLSLEP

SEQ ID NO: 10677 - protein, 1199 aa, Acronicta aceris
MLTRARARYIEHHTRLTTPDSSPSSALQQPQHGRTSPNAAATASSSSDEYYSPPTSPPPVRRRGGRRPPDRLGPRGPLASGGIPASGGSVQRMRWTRSLNENVMRAYYGATEGGTNLTAYRGRMLSLFQALEPTIDVSTQRLSDQVRVIQRNHMLDDSVLDQLRSEVQSSRAIAHPSQSVAPSATLPQTNLAEVGSDDRVTNVSTQYNEKLRSALEGAFREYRSSPPELRPRLPRLPMNNKNLALVCALDSLLSDYFDSSEDLADTHSILYCAAVAACRVAHVKFPESDRATRPKPMIPAWQSRIEQRIGEARALIGKLICFREGNTRPRVMRFVRRAFSGTNIDPRDYASCVTERIDFLKQKVYAWANRIRRYKRRAERYSLNRTFQGDQRWVYRTWDRPDNGVSDVCRPNDDAMNSFWRNIWSVPVNHTEDDWICDVERACESLPAMDEINISPQDVACAVHSVPNWKAPGPDGLHNFWIKWLRSSHARLASQFQSSLESGTLPQFLTTGITHLLHKSGDTADPKNYRPITCLPTVYKLLTSILRAKICYHIDESSIMSASQNGCRNGSRGTKELLLIDMTISQQVRRLRKNLSTCWIDYKKAYDSVPHTWLMRVLELYKVDVSLRTFLRSCMGQWRTVLHYPGCRQIQRISEPIRIERGIFQGDSLSPLWFCLALNPLSTLLEESRLGYRLRRGGQVISHLLYMDDLKLFASSDLHLMELLKITENFSNSIRMEFGVEKCAVMHVKRGGIVESVGIQLSDSTQLRSLAATETYKYLGMAEALGINVADMKQSLQVRFFGRLTKVLKSLLSGGNKVRAFNGWVMPVLMYSFGVLKWTQTELETLDRKVRTLLTAYRMHHPRSSVMRLYIPRKCGGRGFLNAKNLHNREVCSLREHFLKTEMGMHRDVVAVDNGLTPLSMAKENWRKPVVLSTNDRRNVWQGKELHGRYYRALHEPGVDTLASVSWLRFGDLFGETEGFVCAIMDEVMMTNNYRKFIVKDGTVDICRACHRPGESIRHIISGCSRLANGEYLHRHNLVARIIHQQLALKYNLVESEVPYYKYVPDPVLENGHATLYWDRSIITDRTIIANKPDIVVIDRLERRAMIVDITVPHDENLFKAEKEKEIKYLDLAHEVVDMWGVDAAIIVPIVVSANGLIAKSLDRHLKRLSLGGWIKGLIQKVVLLDTARIVRRFLSLGP

SEQ ID NO: 10678 - protein, 1199 aa, Acronicta aceris
MLTRARARYIERHTRLTTPDSSPSSALQQPQHGRTSPDAAATASSSSDEYYSPPTSPPPVRRRGGRRPPDRLGPRGPLASGGIPASGGSVQRMRWTQSLNKNVMRAYYGATEGGTNLTAYRGRMLSLFQALEPTIDVSTQRLSDQVRVIQRNHMLDDSVLDQLRSEVQSSRAIAHPSQSVAPSAMLPQTNLVEVGSDDRVTNVSTQYNEKLRSALEGAFREYRSSPPELRPRLPRLPMNNKNLALVCALDSLLSDYFDSSEDLADTHSILYCAAVAACRVAHVKFPESDRATRPKPMIPAWQSRIEQRIGEARALIGKLISFREGNTRPRVMRFVRQAFSGTNIDPRDYASCVTERIDFLKQKVYAWANRIRRYKRRAERYSLNRTFQGDQRWVYRTWDRPDNGVSDVCRPNDDAMSSFWRNIWSVPVNHTEDDWICDVERACESLPAMEEINISPQDVACAVHSVPNWKAPGPDGLHNFWIKWLRSSHARLASQFQSSLESGTLPQFLTTGITHLLHKSGDTADPKNYRPITCLPTVYKLLTSILRAKICYHIDESSIMSASQNGCRNGSRGTKELLLIDMTISQQVRRLRKNLSTCWIDYKKAYDSVPHTWLMRVLELYKVDVSLRTFLRSCMGQWRTVLHYPGCRQIQRISEPIRIERGIFQGDSLSPLWFCLALNPLSTLLEESRLGYRLRRGGQVISHLLYMDDLKLFASSDLHLMELLKITENFSNSIRMEFGVEKCAVMHVKRGGIVESVGIQLSDSTQLRSLASTETYKYLGMAEALGINVADMKQSLQVRFFGRLTKVLKSLLSGGNKVRAFNGWVMPVLMYSFGVLKWTQTELETLDRKVRTLLTAYRMHHPRSSVMRLYIPRKCGGRGFLNAKNLHNREVFSLREHFLKTEMGMHRDVVAVDNGLTPLSMAKENWRKPLVLSTNDRRNVWQGKELHGRYYRALHEPGVDTLASVSWLRFGDLFGETEGFVCAIMDEVMMTNNYRKFIVKDGTVDICRACHRPGESIRHIISGCSRLANGEYLHRHNLVARIIHQQLALKYNLVESEVPYYKYVPDPVLENGHATLYWDRSIITDRTIIANKPDIVVIDRLERRAMIVDITVPHDENLFKAEKEKEIKYLDLAHEVVDMWGVDAAIIVPIVVSANGLIAKSLDRHLRRLSLGGWIKGLIQKVVLLDTARIVRRFLSLGP

SEQ ID NO: 10679 - protein, 1192 aa, Eilema sororculum
MLTRAQASRNRSAPTTSPDSSLSSAAQPPAVEPAASSSSSSDEFFSPPTSPTPVRRPGRGRPPTCLGPRRPPASNRAPATGGDVHRMRWTTSINENVMRAYFAATEGGTNLSAYRTRMLPLFQALEPSINVSAQRLSDQVRLIQRNRLLNETVLETLRLECLRNICVTPAPAPAPASTVEINDDTCVAPDDTPIPVSIQYNEEIKEALECALREYRSMPVHVRPRLPRLPIHRRNIALVSALDSLLPRYLENSENLGDTHSILYCTAVAACRMAGAKFPNKDPAIRLKSAIPAWQCRIERRVAEARVLIGKLICFRSGNTRARVMRYVTRAFAGTDISPQDYTSRVTERIDFLKQKVYAWANRIRRYKKRVDRYTVNRMFQRDQRWLYRSWERTEESVDDVRRPDAETTNAFWRSIWSVPVNHTEGDWMREVERACETIPEMEKINIDAIDVDCAVRSLSNWKSPGPDGLHNFWLKWLRSSHVVLASQFQSAVESGTLPAFMTTGVTHLLHKTGSTLEPNNYRPITCLPTVYKLLTSILRAKINNHINNNSIMCASQNGCRNGARGTKELLLIDMAISQQARRNRKDLTACWIDYKKAFDSVPHTWLLRVLELYKVNTTLCTFLRSCMGQWRTVLFYPGCRQALGSGEPITIERGIFQGDSLSPLWFCLALNPLSTLLVNSGLGYRLRREGQMVSHLFYMDDLKLFAHTNPQLIVLLKVTETFSNSIKMAFGVDKCAVIHVKRGRVVESEGIQLSDSTNLRSLLVTETYKYLGMSQALCINEVDMKQMLQERFFGRLKKVLNSLLSGGNKVRACNSWVMPLLMYSFGILKWTQTELDTIDRKVRTQLTAFRMHHPRSSVMRLYIPRKCGGRGFLNAKTLHNREVCNLRDYFLKSNVDMHRDVVNVDTRLTPLGLAKENWRRPTIVGTDSRREVWQSKELHGRFYRALHRPEVDLLASVSWLRFSDLFGETEGFVCAIADEVIKTNNYRKYIMRDGTIDICRACHQPGESLRHITSGCSRLANGEYLHRHNQVARIIHQRLALKYNLVEVEVPYYRYVPEPVLENSHITLYWDRSIITDRTVVANKPDIVVIDRSERRALIVDVTISHDENLVKAEKDKQVKYLDLAHEVVDMWNVDSAIIVPIVVSVNGLIAKSLDQHLKRLGLDGWVKGQMQKAVLLDTARIVRKFLSLEP

SEQ ID NO: 10680 - protein, 1076 aa, Eilema sororculum
MLPLFRVLEPGVNVSAQRLSDQVRVIQRNQLLDGDALERLRLECLRSNPVISPTPALLQSESTQVLNSVNVVGDDRVITVVTECNEEVKVALECAIREYRSMPINIRPRLPRLPMHKKNLMLMSALDSLLPVYFDSSESLSDTHSILYCAAVAACRLARVKFSAHAPAPRQKPAVPAWQRRIEERIAEARVLIGKLTCFRSGNARPRVMRFVNRAFSGTGISPPEYIARVTERIDLLKQKIYAWANRVRRYKKRVDRFSVNRTFQRDQRWVYRSWDRPNKDVSSGCLPSADETNMFWRSIWSAPVAHVEGDWTRDVERACAGIPDMEFVNIDDSDVASAVRPLSNWKSPGPDGLHNFWIKWLRSSHARLASQFQAAIESGSLPIFMTTGVTHLLHKTGSTSNPSNYRPITCLPSVYKLLTSILRDKITKHISTNTVMSASQNGCRSGARGTKELLLIDMAISQQVRRSRKNLSICWIDYKKAFDSVPHTWLLRVLELYKVDTTLCIFLASCMRQWRTVLSYPGCREVCSNGEPINIERGIFQGDSLSPLWFCLALNPLSTLLGNSGLGYRLRGGGQIISHLLYMDDLKLFATSSSQLVDLLKITKSFSDSIKMEFGVDKCAVMHVKRGRTVESEGIQLSDAIHLKSLLVTDTYKYLGMSQALGINEADMKQSLRERFFGRLKKVLNSLLSGGNKVRAYNGWVMPLLIYSFGILKWTQTELDAIDRRVRTLLTTYRMHHPRSSVMRLYIPRKCGGRGFLNAKNLHNREVYNLREYFLRVNEDMHRDVVAVDVSLTPLKLAKENWCKPVVLSISDRQEVWQSKELHGRFYRALHGPDVDLLASVAWLRFGDLFGETEGFACAIADEVIMTKNYRKYILRDGTVDICRACHQPGESLRHIVSGCSRLANSEYLHRHNQVARIIHQQLALLYQLVDAEVPYYRYVAEPVLENGHITLYWDRSIITDRTVVANKPDIVVIDRSERRAMIVDVTIPHDENLVKAEKDKQIKYLDLAHEIVDMWEVDSAIIVPIVITVNGLVAKSLDQHLKRLALGSWIKGLIQKAVLLDTARIVRKFLSLEP

SEQ ID NO: 10681 - protein, 1196 aa, Eilema sororculum
MLTRAKTKIIIQDAHLTPTDSSCSSASQAPGTTSPRPTPVEASSSDEYFSPPTSPTPVRRPGRGRPPTCLGPRRPPASNRAPAAGGNVHRMRWTNSINENVMRAYFAATEGGTNLSAYRSRMLPLFQALEPSVNTSAQRLSDQVRVIQRNHMLNETVLETLRQECLRNICVTPALAPAPASTTALNEDSHVTRDDTPIPVSIQYNEEIKEALEYALREYRSMPIHVRPRLPRLPIHRRNIALVSALDSLLPKYLENSENLGDTHSILYCTAVAACRMAGAKFPIKDPAIRPKPAIPAWQCRIERRVAEARVLIGKLICFRSGNTRPRVMRYVTRAFAGTNISPQDYTSRVTERIDFLKQKVCAWANRIRRYKKRVDRYTVNRMFQRDQRWVYRSWERTDESVDDLRRPDAEATNAFWRSIWSVPVSHTEGDWMREVERACETIPEMEEIYIDATDVDCAVRSLSNWKSPGPDGLHNFWLKWLRSSHVVLASQFQSAIESGTLPAFMTTGVTHLLHKTGSTLEPNNYRPITCLPTVYKLLTSILRAKINNHINNNSIMCTSQNGCRNGARGTKELLLIDMTISQQARRNRKDLVACWIDYKKAFDSVPHTWLLRVLELYKVNTTLCTFLRSCMGQWRTVLLYPGCRQALGSGEPITIERGIFQGDSLSPLWFCLALNPLSTLLVNSGLGYRLRREGQMVSHLFYMDDLKLFAHTNPQLIALLKVTETFSNSIKMAFGVDKCAVIHVKRGRVVESEGIQLSDSTNLRSLLVTETYKYLGMSQALCINEVGMKQMLQERFFGRLKKVLNSLLSGGNKVRACNSWVMPLLMYSFGILKWTQTELDTIDRKVRTQLTAFRMHHPRSSVMRLYIPRKCGGRGFLNAKTLHNREVCNLRDYFLKSNVDMHRDVVNVDTGLTPLGLAKENWRRPTIVGTDSRREVWQSKELHGRFYRALHRPEVDLLASVSWLRFGDLFGETEGFVCAIADEVIKTNNYRKYIMRDGTIDICRACHQPGESLRHITSGCSRLANGEYLHRHNQVARIIHQRLALKYNLVEVEVPYYRYVPEPVLENSHITLYWDRSIITDRTVVANKPDIVVIDRSERRALIVDVTIPHDENLVKAEKDKQVKYLDLAHEVVDMWNVDSAIIVPIVVSVNGLIAKSLDQHLKRLGLDGWVKGQMQKAVLLDTARIVRKFLSLEP

SEQ ID NO: 10682 - protein, 975 aa, Eilema sororculum
MPVHVRPRLPRLPIHRRNIALVSALDSLLPKYLENSENLGDTHSILYCTAVAACRMAGAKFPIKDPAIRPKPAIPAWQCRIERRVAEARVLIGKLICFRSGNIRPRVMRYVTRAFAGTNISPQDYTSRITERIDFLKQKVCAWANRIRRYKKRVDRYTVNRMFQRDQRWVYRSWERTDESVDDVRRPDAEATNAFWRSIWSVPVSHTEGDWMREVERACETIPAMEEIYIDATDVDCAVRSLSNWKSPGPDGLHNFWLKWLRSSHVVLASQFQSAVESGTLPTFMTTGVTHLLHKTGSTLEPNNYRPITCLPTVYKLLTSILRAKINNHISNNSIMCASQNGCRNGARGTKELLLIDMTISQQARRNRKDLAACWIDYKKAFDSVPHTWLLRVLELYKVNTTLCTFLRSCMGQWRTVLFYPGCRQALGSDEPITIERGIFQGDSLSPLWFCLALNPLSTLLVNSGLGYRLRREGQMVSHLFYMDDLKLFAHTNPQLIALLKVTETFSNSIKMAFGVDKCAVIHVKRGRVVESEGIQLSDSTNLRSLLVTETYKYLGMSQALCINEADMKQMLQDRFFGRLKKVLNSLLSGGNKVRACNSWVMPLLMYSFGILKWTQTELDTIDRKVRAQLTAFRMHHPRSSVMRLYIPRKCGGRGFLNAKTLHNREVCNLRDYFLKSNVDMHRDVVNVDTGLTPLGLAKENWRRPTIVGTDSRREVWQSKELHGRFYRALHRPEVDLLASVSWLRFSDLFGETEGFVCAIADEVIKTNNYRKYIMRDGTIDICRACHQPGESLRHITSGCSRLANGEYLHRHNQVARIIHQRLALKYNLVDVEVPYYRYVPEPVLENSHITLYWDRSIITDRTVIANKPDIVVIDRSERRALIVDVTIPHDENLVKAEKDKQVKYLDLAHEVVDMWNVDSAIIVPIVVSVNGLIAKSLEQHLKRLGLDGWVKGQMQKAVLLDTARIVRKFLSLEP

SEQ ID NO: 10683 - protein, 975 aa, Eilema sororculum
MPINIRPRLPRLPMHKKNLMLMSALDSLLPVYFDSSESLSDTHSILYCAAVAACRLARVKFSAHAPAPRQKPAVPAWQRRIEARIAEARVLIGKLTCFRSGNARPRVMRFVNRAFSGTGISPPEYIARVTERIDLLKQKIYAWANRVRRYKKRVDRFSVNRTFQRDQRWVYRSWDRPNKDVSSGCLPSADETNMFWRSIWSALVAHVEGDWTRDVERACAGIPDMEFVNIDDSDVASAVRPLSNWKSPGPDGLHNFWIKWLRSSHARLASQFQAAIESGSLPIFMTTGVTHLLHKTGSTSNPSNYRPITCLPSVYKLLTSILRDKITKHISTNTVMSASQNGCRSGARGTKELLLIDMAISQQVRRSRKNLSICWIDYKKAFDSVPHTWLLRVLELYKVDTTLCIFLASCMRQWRTVLSYPGCREVCSNGEPINIERGIFQGDSLSPLWFCLALNPLSTLLGNSGLGYRLRGGGQIISHLLYIDDLKLFATSSSQLVDLLKITKSFSDSIKMEFGVDKCAVMHVKRGRTVESEGIQLSDAIHLKSLLVTDTYKYLGMSQALGINEADMKQSLRERFFGRLKKVLNSLLSGGNKVRAYNGWVMPLLIYSFGILKWTQTELDAIDRRVRTLLTTYRMHHPRSSVMRLYIPRKCGGRGFLNAKNLHNREVYNLREYFLRVNGDMHRAVVAVDVSLTPLKLAKENWCKPVVLSISDRQEVWQSKELHGRFYRALHGPDVDLLASVAWLRFGDLFGETEGFACAIADEVIMTKNYRKYILRDGTVDICRACHQPGESLRHIVSGCSRLANSEYLHRHNQVARIIHQQLALLYQLVDAEVPYYRYVAEPVLENGHITLYWDRSIITDRTVVANKPDIVVIDRSERRAMIVDVTIPHDENLVKAEKDKQIKYLDLAHEIVDMWEVDSAIIVPIVITVNGLVAKSLDQHLKRLALGSWIKGLIQKAVLLDTARIVRKFLSLEP

SEQ ID NO: 10684 - protein, 1194 aa, Eilema sororculum
MLTRAQASRNRSAPTTSPDSSLSSAAQPPAVEPAASSSSSSDEFFSPPTSPTPVRRPGRGRPPTCLGPRRPPASNRAPAAGGDVHRMRWTITINENVMRAYFAATEGGTNLSAYRTRMLPLFQALEPSINVSAQRLSDQVRVIQRNRMLNETVLETLRLECLRNICVTPAPAPAPAPASTVEINDDTCVAPDDTPIPVSIQYNEEIKEALECALREYRSMPVHVRPRLPRLPIHRRNIALVSALDSLLPRYLENSENLGDTHSILYCTAVAACRMAGAKFPNKDPAIRLKSAIPAWQCRIERRVAEARVLIGKLICFRSGNTRPRVMRYVTRAFAGTDISPQDYTSRVTERIDFLKQKVYAWANRIRRYKKRVDRYTVNRMFQRDQRWVYRSWERTEESVDDVRRPDAETTNAFWRSIWSVPVNHTEGDWMREVERACETIPEMEKINIDAIDVDCAVRSLSNWKSPGPDGLHNFWLKWLRSSHVVLASQFQSAVEFGTLPAFMTTGVTHLLHKTGSTLEPNNYRPITCLPTVYKLLTSILRAKINNHINNNSIMCASQNGCRNGARGTKELLLIDMAISQQARRNRKDLTACWIDYKKAFDSVPHTWLLRVLELYKVNTTLCTFLRSCMGQWRTVLFYPGCRQALGSGEPITIERGIFQGDSLSPLWFCLALNPLSTLLVNSGLGYRLRREGQLVSHLFYMDDLKLFAHTNPQLIALLKVTETFSNSIKMAFGVDKCAVIHVKRGRVVESEGIQLSDSTNLRSLLVTETYKYLGMSQALCINEVDMKQMLQERFFGRLKKVLNSLLSGGNKVRACNSWVMPLLMYSFGILKWTQTELDTIDRKVRTQLTAFRMHHPRSSVMRLYIPRKCGGRGFLNAKTLHNREVCNLRDYFLKSNVDMHRDVVNVDTGLTPLGLAKENWRRPTIVGTDSRREVWQSKELHGRFYRALHRPEVDLLASVSWLRFSDLFGETEGFVCAIADEVIKTNNYRKYIMRDGTIDICRACHQPGESLRHITSGCSRLANGEYLHRHNQVARIIHQRLALKYNLVEVEVPYYRYVPEPVLENSHITLYWDRSIITDRTVVANKPDIVVIDRSERRALIVDVTIPHDENLVKAEKDKQVKYLDLAHEVVDMWNVDSAIIVPIVVSVNGLIAKSLDQHLKRLGLDGWIKGQMQKAVLLDTARIVRKFLSLEP

SEQ ID NO: 10685 - protein, 1191 aa, Eilema sororculum
MLTRAQARNRNAQITSPDSSLSSAAQPPAMEPAASSSSSSDEFFSPPTSPTPVRRPGRGRPPTCLGPRRPPASNRAPAAGGNVHRMRWTNSINENVMRAYFAATEGGTNLSAYRTRMLPLFQALEPSINTSAQRLSDQVRVIQRNRMLNETVLETLRQECLRNICVTPAPAPAPASTAEINNDTCVAPDDTPIPVSIQYNEEIKEALECALREYRSVPVPVRPRLPRLPIHRRNIALVSALDSLLPRYLENSENLGDTHSVLYCTAVAACRMAGAKFPIKDPAIRPKSAIPAWQCRIERRVAEARVLIGKLICFRSGNTRPRVMRYVTRAFTGTDISPQDYTSRVTERIDFLKQKVYAWANRIRRYKRRVDRYTVNHMFQRDQRWVYRSWERTDESVDDVRRPDAEATNAFWRSIWSVPVSHTEGDWMREVERACETIPEMEEIYIDATDVDCAVHSLSNWKSPGPDGLHNFWLKWLRSSHVVLASQFQSAIESGTLPAFMTTGVTHLLHKTGSTLEPNNYRPITCLPTVYKLLTSILRAKINNHINNNSIMCASQNGCRNGARGIKELLLIDMAISQQARRNRKDLTACWIDYKKAFDSVPHTWLLRVLELYKVNTTLCTFLRSCMGQWRTVLFYPGCRQALGGGVPITIERGIFQGDSLSPLWFCLALNPLSTLLVNSGLGYRLRREGQMVSHLFYMDDLKLFAHTNPQLIALLKVTETFSNSIKMAFGVDKCAVIHVKRGRVVESEGIQLSDSTNLRSLLVTETYKYLGMSQALCINEVDMKQMLQERFFGRLKKVLNSLLSGGNKVRACNSWVMPLLMYSFGILRWTQTELDTIDRKVRTQLTAFRMHHPRSSVMRLYIPRKCGGRGFLNAKTLHNREVCNLRDYFLKSNVDMHRDVVNVDTGLTPLGLAKENWRRPTIVSTDSRREVWQSKELHGRFYRALHRPEVDLLASVSWLRFSDLFGKTEGFVCAIADEVIKTNNYRKYIMRDGTIDICRACHQPGESLRHITSGCSRLANGEYLHRHNQVARIIHQRLALKYNLVEVEVPYYKYVPEPVLQNSHITLYWDRSIITDRTVVANKPDIVVIDRSERRALIVDVTIPHDENLVKAEKDKQVKYLDLAHEVVDMWNVDSAIIVPIVVSVNGLIAKSLDQHLKRLGLDGWVKGQMQKAVLLDTARIVRKFLSLEP

SEQ ID NO: 10686 - protein, 1193 aa, Eilema depressum
MLTRAQARRNASAPATPPDSSLSSAAQPPPTEPAASSSSSSDEFFSPPTSPTPVRRPGRGRPPICLGPRRPPASNRAPAAGGDVHRMRWTPSINENVMRAYFAATEGGTNLSAYRTRMLPLFQALEPSVNTSSQRLSDQVRVIQRNRMLNETVLETLRQECLRNICVTPAPAPASTPAPVPVSHMNEETGDDTLIPVSIQYNEQIKEALECALREYRSMPLNDRPRLPRLPIHRRNMALVGALDSLLPGYLDNSENLGDTHSILYCTAVAACRMAGVKFPNKDPAIRPKSTIPAWQCRIERRVAEARVLISKLICFRSGNTRPRVMRYVTRAFAGTGISPQEYTSRITERIDFLKQKVCAWANRIRRYRKRVDRFTVNRMFRRDQRWVYRSWEQPDESVDDVRRPEAAATNTFWRSIWSVPVSHIEGDWMCEVERACESIPEMEDIYIDAIDVDCAVRPLSNWKSPGPDGLHNFWLKWLRSSHALLASQFQSAVESGTLPAFMTTGVTHLLHKTGSTLEPNNYRPITCLPTVYKLLTSILRVKINNHINNNSIMCASQNGCRNGARGTKELLLIDMAISQQARRRTKDLAACWIDYKKAFDSVPHTWLLRVLELYKVNATLCTFLRSCMRQWRTVLFYPGCCQALGDGEPITIERGIFQGDSLSPLWFCLALNPLSTLLVNSGLGYRLRREGQMVSHLLYMDDLKLFAHTNPQLMALLKITENFSNSIKMGFGVEKCAVIHVKRGRVVESQGIQLSDSTSLRSLLVTETYKYLGMSQALCINEAGMKQMLQERFFGRLKKVLNSLLSGGNKVRACNSWVMPLLMYSFGILKWTQTELDTIDRRVRTQLTAFRMHHPRSSVMRLYIPRKCGGRGFLNAKTLHNREVCNLRDYFLKSNVDMHRDVVSVDTGLTPLGLAKENWRRPIVVGTDSRREVWQSKELHGRFYRALHRPEVDLLASVSWLRFGDLFGETEGFVCAIADEVIKTNNYRKYIMRDGTIDICRACHQPGESLRHITSGCSRLANGEYLHRHNQVARIIHQRLALKYNLVELEVPYYRYVPEPVLENSHITLYWDRSIITDRTVVANKPDIVVIDRSERRALIVDVTIPHDENLVKAEKDKQVKYLDLAHEIVDMWNVDSAIIVPIVVTVNGLIAKSLDQHLKRLGLDGWVKGQMQKAVLLDTARIVRKFLSLEP

SEQ ID NO: 10687 - protein, 1193 aa, Eilema depressum
MLTRAQARRNASAPATPPDSSLSSATQPPPTEPAASSSSSSDEFFSPPTSPTPVRRPGRGRPPICLGPRRPPASNRAPAAGGDVHRMRWTPSINENVMRAYFAATEGGTNLSAYRTRMLPLFQALEPSVNTSSQRLSDQVRVIQRNRMLNETVLETLRQECLRNICVTPAPAPASTPAPVPVSHMNEETGDDTLIPVSIQYNEQIKEALECALREYRSMPLNDRPRLPRLPIHRRNMALVGALDSLLPSYLDNSENLGDTHSILYCTAVAACRMAGVKFPNKDPAIRPKSTIPAWQCRIERRVAEARVLISKLICFRSGNTRPRVMRYVTRAFAGTGISPQEYTSRITERIDFLKQKVYAWANRIRRYRKGVDRFTVNRMFRRDQRWVYRSWEQPDESVDDVRRPEAAATNTFWRSIWSVPVSHIEGDWMCEVERACESIPEMEDIYIDAIDVDCAVRPLSNWKSPGPDGLHNFWLKWLRSSHALLASQFQSAVESGTLPAFMTTGVTHLLHKTGSTLEPNNYRPITCLPTVYKLLTSILRVKINNHINNNSIMCASQNGCRNGARGTKELLLIDMAISQQARRRTKDLAACWIDYKKAFDSVPHTWLLRVLELYKVNATLCTFLRSCMRQWRTVLFYPGCRQALGDGEPITIERGIFQGDSLSPLWFCLALNPLSTLLVNSGLGYRLRREGQMVSHLLYMDDLKLFAHTNPQLMALLKITENFSNSIKMGFGVEKCAVIHVKRGRVVESQGIQLSDSTSLRSLLVTETYKYLGMSQALCINEAGMKQMLQERFFGRLKKVLNSLLSGGNKVRACNSWVMPLLMYSFGILKWTQTELDTIDRRVRTQLTAFRMHHPRSSVMRLYIPRKCGGRGFLNAKTLHNREVCNLRDYFLKSNVDMHRDVVSVDTGLTPLGLAKENWRRPIVVGTDSRREVWQSKELHGRFYRALHRPEVDLLASVSWLRFGDLFGETEGFVCAIADEVIKTNNYRKYIMRDSTIDICRACHQPGESLRHITSGCSRLANGEYLHRHNQVARIIHQRLALKYNLVELEVPYYRYVPEPVLENSHITLYWDRSIITDRTVVANKPDIVVIDRSERRALIADVTIPHDENLVKAEKDKQVKYLDLAHEIVDMWNVDSAIIVPIVVTVNGLIAKSLDQHQKRLGLDGWVKGQMQKAVLLDTARIVRKFLSLEP

SEQ ID NO: 10688 - protein, 1211 aa, Ptilodon capucinus
MTDAPRRNPRRLCRQRTVNEPNAQSTPPDPSPRSASPSPASIIRTSVTAVASSESDEYFSPPTSPPPVRQQRGRPPGHLGLLGQPAPNRVLVPSGVVRRMRWTSSINENVMRAYYEATEGGTNLTAYRNRMLPLFQSLEPAVNVSAQRLSDQVRVIQRGNMLADTVLDRLRSEMQSRRVVPVASSQPAAQPVASATVTSRLAADSDVDRDNAPINVSNQYNELLRSTLEDVVRVYRSMPNHLRPRIPRLPMHKGNRALVGALDSLLSIYFNSSDNLADTHSILYCAAITVCRVARVKVFNTDTATRPKPAVPAWQCRIERRISEARALIGKLSCFREGNTRPRVMRFVKRAFAGTDVSPREYISRVTERIDFLKQKIYAWANRIRRYNRVDRYSQNSMFQRDQRWVYRSWERPSEPVSELQRPDDNATTTFWRDIWSVPVTHYEGDWIGDVERMCEPIKEMEAISIGPLDVANAVRSLPNWKAPGPDGLHNFWLKWLRSSHVRLASQFQSALQSGSLPEFITTGVTHLLHKTGSTTGPKNYRPITCLPTIYKTLTSILRAKIARHVEDNSIMSASQNGCRSGSRGTKELLLIDMTICQQARRNRKDLSTCWIDYKKAYDSVPHTWLVRVLELYKIDTTLRTFLESCMRQWKTVLLCPGSRQILGNGEPIRIERGIFQGDSLSPLWFCLALNPLSTLLEESGFGFRLRRGGQVISHLLYMDDLKLFAPTALQLTGLLKVTETFSNSIRMEFGVDKCAVMHAKQGRLVESEGIQLSDSIQLRTLAATETYKYLGMSQGLGISETDMKQLLRDRFLGRLKKVLKSLLSGGNKVRAYNGWVMPVLMYSFGILKWTQTELDTLDRTVRTTLTSYRMHHPRSSVMRLYIPRKCGGRGFLNVKTLHNREICSLREYFLRADGEMHVDVVAVDNGLTPLSLAKENWRKPVVLTTDDRRLVWQGKELHGRYYRALHGPDVDLAASVAWLRFGDLFGETEGFVCAIMDEVVMTNNYRKYILRDGTIDICRACHRPGESLRHIISGCSRLANGQYLHRHNQVARIIHQQLALKYRLVTSEVPYYRYEPQPVLEEGHISLYWDRSIITDRTIVANKPDIVLIDRQERRAMIVDITVPHDENLVKAEKDKESKYLDLAHEVVDMWDIDAAIIVPIVVSAHGLLAKSLDKHLKRLALGGWIKGQIQKAVLLETARIVRKFLSLEP

SEQ ID NO: 10689 - protein, 1212 aa, Ptilodon capucinus
MTDAPRRNPRRLCRQRTVNEPNAQSTPPDPSPRSASPSPASIIRTSVTAVASSESDEYFSPPTSPPPVRQQRGRPPGHLGLLGQPAPNRVLVPSGVVRRMRWTSSINENVMRAYYEATEGGTNLTAYRNRMLPLFQSLEPAVNVSAQRLSDQVRVIQRGNMLADTVLDRLRSEMQSRRVVPVASSQPAAQPVASATVTSRLAADSDVDRDNAPINVSNQYNELLRSTLEDVVRVYRSMPNHLRPRIPRLPMHKGNRALVGALDSLLSIYFDSSDNLADTHSILYCAAITVCRVARVKVFNTDTATRPKPAVPAWQCRIERRISEARALTGKLSCFREGNTRPRVMRFVKRAFAGTDVSPREYISRVTERIDFLKQKIYAWANRIRRYKVRVDRYSQNSMFQRDQRWVYRSWERPSEPMSELQRPDDNATTTFWRDIWSVPVTHYEGDWIGDVKRMCEPIKEMEAISIGPLDVANAVRSLPNWKAPGPDGLHNFWLKWLRSSHVRLASQFQSALQSGSLPEFITTGVTHLLHKTGSTTDPKNYRPITCLPTIYKTLTSILRAKIARHVEDNSIMSASQNGCRSGSRGTKELLLIDMTICQQARRNRKDLSTCWIDYKKAYDSVPHTWLVRVLELYKIDTTLRTFLESCMRQWKTVLLCPGSRQILGNGEPIRIERGIFQGDSLSPLWFCLALNPLSTLLEESGFGFRLRRGGQVISHLLYMDDLKLFAPTALQLTGLLKVTETFSNSIRMEFGVDKCAVMHAKQGRLVESEGIQLSDSIQLRSLAATETYKYLGMSQGLGISETDMKQLLRDRFLGRLKKVLKSLLSGGNKVRAYNGWVMPVLMYSFGILKWTQTELDTLDRTVRTTLTSYRMHHPRSSVMRLYIPRKCGGRGFLNVKTLHNREICSLREYFLRADGEMHVDVVAVDNGLTPLSLAKENWRKPVVLTTDDRRLVWQGKELHGRYYRALHGPGVDLAASVAWLRFGDLFGETEGFVCAIMDEVVMTNNYRKYILRDGTIDICRACHRPGESLRHIISGCSRLANGQYLHRHNQVARIIHQQLALKYRLVTSEVPYYRYEPQPVLEEGHISLYWDRSIITDRTIVANKPDIVLIDRQERRAMIVDITVPHDENLVKAEKDKESKYLDLAHEVVDMWDIDAAIIVPIVVSAHGLLAKSLDKHLKRLALGGWIKGQIQKAVLLETARIVRKFLSLEP

SEQ ID NO: 10690 - protein, 1212 aa, Ptilodon capucinus
MTDAPRRNPRRQCRQRSAVPHYAQSTPPDQSPRSASPSPASIIRTSVTAVASSESDEYFSPPTSPPPVRRQRGRPPGHLGLLGQPAPNRVLVPSGVVRRMRWTSSMNENVMRAYYEATEGGTNLTAYRDRMLPLFQSLEPAVNVSAQRLSDQVRVIQRGNMLADTVLDRLRSEVQSRRVVPVASSQPAAQPVANATVTSRLAADSDVDRDNAPIDVSTQYNDLLRSTLEDVVREYRSMPNHLRPRIPRLPMHKGNRALVGALDSLLSIYFDSSDDLVDTHSILYCAAITVCRVARVKVFNTDTATRPKPAVPAWQCRIERRISEARALIGKLSCFREGNTRPRVMRFVKRAFAGTDVSPREYISRVTERIDFLKQKIYAWANRIRRYKARVDRYSQNSMFQRDQRWVYRSWERPNEPVSELQRPDDNAMTTFWRDIWSVPVTHYEGNWIGDVERMCEPIKEMEAISIGPLDVANAVRSLPNWKAPGPDGLHNFWLKWLRSSHVRLASQFQSALQSGSLPEFITTGVTHLLHKTGSTTDPKNYRPITCLPTIYKTLTSILRVKIARHVEDNSIMSASQNGCRSGSRGTKELLLIDMTICQQARRNRKDLSTCWIDYKKAYDSVPHTWLVRVLELYKIDTTLRTFLESCMRQWKTVLLCPGSRQILGNGEPIRIERGIFQGDSLSPLWFCLALNPLSTLLEGSGFGFRLRRGGQVISHLLYMDDLKLFAPTALQLSGLLKVTETFSNSIRMEFGVDKCAVMHAKQGRMVESEGIQLSDSIQLRSLAATETYKYLGMSQGLGISETDMKQLLRDRFLGRLKKVLKSLLSGGNKVRAYNGWVMPVLMYSFGILKWTQTELDALDRTVRTTLTAYRMHHPRSSVMRLYIPRKCGGRGFLNVKTLHNREICSLREYFLRADGEMHVDVVAVDNGLTPLSLAKENWRKPVVLTTDDRRVVWQGKELHGRYYRALHGPDVDLAASVAWLRFGDLFGETEGFVCAIMDEVVMTNNYRRYILRDGTIDICWACHRPGESLRHIISGCSRLANGQYLHRHNQVARIVHQQLALKYRLVTSEVPYYRYEPQPVLEEGHITLYWDRSIITDRTIVANKPDIVLIDRQERRAMIIDITVPHDENLVKAEKDKESKYLDLAHEVVDMWDIDAAIIVPIVVSAHGLLAKSLDKHLKRLALGSWIKGQIQKAVLLETARIVRKFLSLEP

SEQ ID NO: 10691 - protein, 1203 aa, Agrochola circellaris
MLTRSATRRARPPPPDSSLSSALPPPVSSPIISAVTTPVAVVASSSSDEYFSPPTSPTPVRRQGRGRPPRSLGLRGQPAPNRVPAAGGCVRRMRWTQNVNENVMRAYFGATEGGSNLTAYRGRMLSLFQVLEPAVDVSAQRLSDQVRVIQRNHMLDDAVLDRLRLESRNNRVTPASPLVAVQLQNSPSATPRADHVGEEDDDGVISVSSQCNARLRNALEDAFRDYRSTPPGLRPRLPRLPMHKKNKALVCTLDSLLSNYFDGSKDLADTHSILYCAAVAACRVAHVKFPSSDRAPRPKPAVLAWQCRIERRIGEARVLIGKLICFREGNTRPRVMRFVKRAFSGTDTSSRDYLARVTERIDFLKQKICAWANRIRRYRRRVERYTQNRTFQSDERWVYRAWERLDQGVIDTRLPDDEAMCSFWRSIWSAPVNHTEGDWTGKIERACERIPEMGAITISPQDVACAVRPLPNWKSPGPDGLHNFWIKWFQRSHARLASQFQSALESGSLPQFLTTGITHLLHKSGSTAEPKNYRPITCLPTVYKVFTSILRTKINKHIDTNSIMSASQNGCKNGSRGTKELLLIDMAISQQVRRSRRDLSTCWIDYKKAYDSVPHTWLMRVLELYKVDATLRTFLISCMGQWRTVLRYPGCRQIQRNSEPIRIERGIFQGDSLSPLWFCLALNPLSTLLEDSGLGYRLRRGGQVISHLLYMDDLKLFAPNNLQLVELLKVTETFSSAIRMEFGVDKCAVMHVKRGGIVESGGTQLSDSIHLRSLSSIETYKYLGMSEALGISTADMKQSLKERFFNRLNKVLNSLLSGGNKVRAFNGWVMPVLMYSFGILKWTQTELDALDRRVRTLLTVNRMHHPRSSVMRLYIPRKCGGRGFLNAKTLHNREVCSLREYFLEADVGMHRDVVSVDKGLTPLSLANENWRKPIVLDTKDRREVWQSKELHGRFYRALHGPDVDLLASVSWLRFGDLFGETEGFVFAIMDEVMMTNNYRKYIVKDGTVDICRACHRPGESIRHIISGCSRLANGDYLHRHNLVARIIHQQLALKYSFVESEVPYYRYMPDPVLENGNITLYWDRSIITDRTIVANKPDIVVIDRLERRTMIIDIAVPHDENLVKAEKDKQIKYLDLAREVVDMWDVDTAVIVPIVVTANGIIAKSLDQHLRRLSLGSWIKGLIQKAVLLDTARIVRRFLSQEP

SEQ ID NO: 10692 - protein, 913 aa, Agrochola circellaris
MLNFPAVTELHDQNQQCRIERRIGEARVLIGKLICFREGNTRPRVMRFVKRAFSGTDTSSRDYLTRVTERIDFLKQKICAWANRIRRYRRRVERYTQNRTFQSDERWVYRAWERLDQGVIDTRLPDDDAMCSFWRSLWSAPVNHTEGDWTGKIERACERIPEMGAINISPQDVACAVRPLPNWKSPGPDGLHNFWIKWLQRSHARLASQFQSALESGSLPQFLTTGITHLLHKSGSTAEPKNYRPITCLPTVYKVFTSILRTKINKHIDTNSIMSVSQNGCKNGSRGTKELLLIDMAINQQVRRSRRDLSTCWIDYKKAYDSVPHTWLMRVLELYKVDATLRTFLISCMGQWKTVLRYPGCRQIQRNSEPIRIERGIFQGDSLSPLWFCLALNPLSTLLEDSGLGYRLRRGGQVISHLLYMDDLKLFAPNNLQLVELLKVTETFSSAIRMEFGVDKCAVMHVKRGGIVESGGTQLPDSIHLRSLSSIETYKYLGMSEALGINTADMKQSLKERFFDRLNKVLNSLLSGGNKVRAFNGWVMPVLMYSFGILKWTQTELDALDRRVRTLLTVNRMHHPRSSVMRLYIPRKCGGRGFLNAKTLHNREVCSLREYFLEADVGMHRDVVSVDKGLTPLSLASENWRKPIVLETNDRREVWQSKELHGRFYRALHGPDVDLLASVSWLRFGDLFGETEGFVFAIMDEVMMTNNYRKYIVKDGTVDICRACHRPGESIRHIISGCSRLANGDYLHRHNLVARIIHQQLALKYNLVESEVPYYRYVPDPVLENGNITLYWDRSIITDRTIVANKPDIVVIDRLERRTMIIDIAVPHDENLVKAEKDKQIKYLDLAREVVDMWDVDTAVIVPIVVTANGIIAKSLDQHLRRLSLGSWIKGLIQKAVLLDTARIVRRFLSQEP

SEQ ID NO: 10693 - protein, 1198 aa, Agrochola circellaris
MLTRSATRRARLLPPDSSLSSASPPPVPSPTVSAGTTPAAAVASSSSDEYFSPPTTPPPARRRGGHRPPVGLGPRGPPASDRVPASGGSVQRMRWTQSINENVMRSYYGATEGGNNLTAYRVRMLSLFQVLEPAVNVSAQRLSDQVRVILRNHMLDDTVLDRLRSEMRNSHATAPPSQTVMVAPQFTINQVDEGIDDMATNVSTQYNEELRSALERAIREYRSMSPELRPRLPRLPMHNKNRALVAALDSQLSNYFDDCEDLTDTHSILYCAAVAACRVAHVKFANDSRATRPKPAVPAWQCRIERRIGGARALIGKLICFSEGNTRPRVMRFVRRAFSGTDISPEDYVSRATERIDFLKQKVYAWANRIRRYKRRVERYTQNRTFQSDERRVYRAWEQPDQGVADARLPDDDAMCSFWRSIWSAPVSHTEGDWTREVERACDPIPEMGAITICPLDVARAVRPLPNWKSPGPDGLHNFWIKWFKRSHARLAAQYQIALESGSLPEFLTTGVTHLLHKSGSTADPKNYRPITCLPTVYKVLTSILRAKINKHIDTNSIMSASQNGCRNGSRGTKELLLIDMTISQQVRRSRKDLSTCWIDYKKAYDSVPHTWLMRVLELYKVDATLRTFLLSCMGQWRTVLRYPGCRNIQRNSEPIRIERGIFQGDSLSPLWFCLALNPLSTLLEGSDLGYRLRRGGQVISHLLYMDDLKLFAPNNFQLMELLKVTETFSRAIRMEFGVDKCAVMHVKRGEIVESVGTQLTDSINFRALSASETYKYLGMSETLGINVTDMKQSLKERFFGRLKKVFNSFLSGGNKVRAFNGWVMPVLMYSFGVLKWTQTELDALDRRVRTLLTGYRMHHPRSSVMRLYIPRKCGGRGFLNAKTLHNREICSLREYFLEADVGMHRDVVAVDKGLTPLSLAKENWRKPAVLDTNDRKEVWQNKELHGRYFRALHGPDVDLLASVAWLRFGDLFGETEGFVCAIMDEVMMTNNYRRFIVKDGTVDICRACHRPGESIRHIISGCSRLANEEYLHRHNLVARIIHQQLALKYSLVESEVPYYRYVPDPVLESGHITLYWDRSIITDRSIVANKPDIVVVDRAERRTMIIDITVPHDGNLVKAEKDKQIKYLDLAREVVDMWDVDSAIIVPIVVSANGLIAKSLDQHLRRLSLGGWIKGLIQKAVLLDTARIVRRFLSLEP

SEQ ID NO: 10694 - protein, 1204 aa, Hydraecia micacea
MLTRSRTRRLPNITHPTSSGSSLSSASQLPEPAPDVSPISPAAAVASSSSDEYFSPPTTPPPVCRRGRGRPPASLGLRGPPASERVPAPGGSVQRMRWTQTVNENVMRAYFGATEGGSNLTAYRGRMLSLFQVLEPAVNVSAQRLSDQVRVIQRNHMLDNVVLDRLRLESRNSHVTPASSLVAVQLQPSVPLRPDCVDVEDDDEAISVSSQCNARLRSALEDAFREYRSIPPGLRPRLPRLPMHKKNKALVCALDSQLSNCFNDSKDLADTHSILYCAAVAACRVAHVKFPNSDRAPRPKPAVPAWQCRIECRIGEARALIGKLICFREGNTRPRVMRFVRRAFSGTDISSRDYLSRVTERIDFLKQKICAWANRIRRYRRRVERYTQNRRFQSDERWVYRAWERPDQGVTDTRLPDDDAMCSFWRNIWSVPVSHTEGDWTGKIERACDLIPEMEALIISPQDVARAVRPLPNWKSPGPDGLHNFWIKWFKRSHVRLASQFQSALESGSLPQFLTSGITHLLYKSGSTADPKNYRPITCLPTVYKVLTSILRAKINKHIDTNSIMSVSQNGCKNGSRGTKELLLIDMTINQQVRRSRKDLSTCWIDYKKAYDSVPHTWLMRVLELYKVNTTLCTFLMSCMGQWRTVLRYPGCRNIQRNSEPIRIERGIFQGDSLSPLWFCLALNPLSTLLEDSGLGYRLRRGGQVISHLLYMDDLKLFAPNNLQLMELLKITETFSSAIRMEFGVDKCAVMHVKRGEIVESVGNQLSDSTNLRALSASDTYKYLGMSEALGINVTDMKQSLKERFFGRLKKVFNSLLSGGNKVRAFNDWVMPVLMYSFGILKWTQTELDALDRKVRTLLTANRMHHPRSSVMRLYIPRKCGGRGFLNAKTLHNREICSLREYFLETDVGMHRDVVVVDNGLTPLSLGKENWRKPVVLDTNDRMEVWQSKELHGRFFRALHGPDVDLLASVAWLRFGDLFGETEGFVCAIMDEVMMTNNYRRFIVKDGTVDICRACHRPGESIRHIISGCSRLANGEYLHRHNLVARIIHQQLALKYSLVESEVPYYRYVPDPVLENGNITLYWDRSIITDRTIVANKPDIVVMDRLERRAMIVDITVPHDENLVKAEKDKQIKYLDLAREVVDMWDVDSAIIVPIVVTANGLIAKSLDQHLRRLSLASWIKGLIQKAVLLDTARIVRRFLSLEP

SEQ ID NO: 10695 - protein, 929 aa, Eupsilia transversa
MKVYDTSSAKLFSEYLEDNNHIIIILIVPAWQCRIERRIGEARTLVGKLFCFREGNTRPRVMRFVRRAFSGTDISPQDYMARVTERIDFLKQKVYAWANRIRRYKRRVDRYTQNRTFQSDERWVYRAWEQPDQGVTDTHLPDDNAMCSFWRSIWSVPVSHTEGDWTREVERACDPIPEMGAITICPQDVARAVRPLPNWKSPGPDGLHNFWIKWFQRSHARLAAQYQAALESGSLPQFLTTGVTHLLHKSGSTAEPKNYRPITCLPTVYKVLTSILRAKINKHIDTNSIMSVAQNGCKNGSRGTKELLLIDMAISQQVRRSRKDLSICWIDYKKAYDSVPHTWLMRVLELYKVDATLRTFLMACMGQWRTVLRYPGCRNIQRNSEPIRIERGIFQGDSLSPLWFCLALNPLSTLLEDSGLGYRLRRGGQVISHLLYMDDLKLFAPNNLQLMELLKVTETFSSAIRMEFGVDKCAVMHVKRGKIVESVGAQLSDSINLRALSATETYKYLGMSEALGINVTDMKQSLKERFFGRLKKVFNSLLSGGNKVRAFNGWVMPVLMYSFGILKWTQTELDALDRRVRTLLTAYRMHHPRSSVMRLYIPRRCGGRGFLNAKTLHNREICSLREYFLETDVGMHRDVVAVDKGLTPLSLAKENWRKPVVLDTNDRSEVWQSKELHGRFFRALHGPDVDLLASVAWLRFGDLFGETEGFVCAIMDEVIMTNNYRRFIVKDGTVDICRACHRPGESIRHIISGCSRLANEEYLHRHNLVARIIHQQLALKYSLVESEVPYYRYVPDPVLENGNITLYWDRSIITDRTIVANKPDIVVVDRIERRTMIIDITVPHDGNLVKAEKDKQIKYLDLAREVVDMWDVDSAIVVPIVVTANGLIAKSLDQHLRRLSLGSWIKGLIQKAVLLDTARIVRRFLSLEP

SEQ ID NO: 10696 - protein, 1205 aa, Amphipyra tragopoginis
MLTRSRAKTQQSTHPPPSASSLSSASQPPEPASIVSDVTPAAAVASSSSDEYYSPATTPPPARRRGRGRPPTCLGPRGPPASDRVPAPGGSVQRMRWTQSMNENCMRAYFGATEGGTNLTAYRGRMLSLFQALEPAVNVSAQRLSDQVRVIQRDHRLDDAALDRLRNEMQNSHVTPLPAQIRTQPLVPTAVPLEPNRVDEEEEDRAISAGTQYSELMRSALEDALREFRSTPPELRPRLPRLPMHNKNRALVCALDSLLSNVFESSEDLGDTHSILYCAAVAACRVAHVKFPNDNRATRPKSAVPAWQSRIERRVDEARVLIGKLTCFREGNRRPRVMRFVRRAFSGTDIGPGEYVSRITERIDFLKQKVYVWANRIRRYRRRVDRYTQNRNFQSDQRWVYRTWERPDQDVSDTHLPDIDVMNAFWRNIWSVPVTHTEGDWMQEVQRACEPIQEMGAVTIGPQDVASAVRPMPNWKSPGPDGLHNFWIKWLRSSHARLASQFQSSLESGSLPSFLTTGVTHLLFKSGSTAEPKNYRPITCLPTVYKLLTSILRAKLNHHIDSNGIMCATQNGCKNGSRGTKELLLIDMAISQQVRRSRKDLSTCWIDYKKAYDSVPHTWLMRVLELYKINATLRAFLMSCMGQWRTVLHYPGCRQIQGSGELIRIERGIFQGDSLSPLWFCLALNPLSTLLEGSGLGYRLRRGGQVKSHLLYMDDLKLFAPNNLQLLELLKVTETFSNSIRMEFGVDKCAVMHVKRGRIMESVGTQLSDSIHLRSLSSTETYKYLGMSEALGINEADMKQSLKERFFGRLIKVLKSLLSGGNKVRAFNGWVMPVLMYSFGILRWTQTELDALDRRVRTLLTAYRMHHPRSSVMRLYIPRKCGGRGFLNAKTLHNREVCSLREYFSQADVGVHRDVVAVDKGLTPLSLAKENWRKPVVLDTNGRREVWRSKELHGRFYRALHGPDVDFLASVAWLRFGNLFGETEGFVCAIMDEVMMTNNYRKYIVKDGTVDICRACHCPGESIRHIVSGCSRLANGEYLHRHNLVARIIHQQLALKYNLVDTEVPYYRYVPDPVLENDHVTLYWDRSIITDRTIVANKPDIVVIDRLERRTMIVDITVPHDENLVKAENDKKIKYLDLAHEVVDMWDVDSAVVVPIVVTANGLIAKSLDQHLMRLSLGSWIKGLIQKAVLLDTARIVRKFLSLEP

SEQ ID NO: 10697 - protein, 1205 aa, Amphipyra tragopoginis
MLTRSRAKTLQRTHPTPSASSLSSASQPPEPASIVSDVTPAAAVASSSSDEYYSPATTPPPARRRGRGRPPACLGPRGPPASDRVPAPGGSVQSMRWTQSMNENCMRAYFGATEGGTNLTAYRGRMLSLFQTLEPAVNVSAQRLSDQVRVIQRDHRLDDAALDRLRDEMQNSHATPPPSQIRTQPLVPPAVQLQPNHADEEEEDRAISAGTQYSEIMRSALEDALREFRSTPPELRPRLPRLPMHNKNRALVCALDSLLSNVLESSEDLGDTHSILYCAAVAACRVAHVKFPNDNRATRPKSTVPAWQCRIERRIDEARVLIGKLTCFREGNRRPRVMRFVRRAFSGTDISPGEYVSRITERVDFLKQKVCAWANRIRRYRRRVDRYTQNRIFQGDQRWVYRMWERPDQGVSDTHLPDNDVMNAFWRNIWSVPVTHTEGDWMQEVQRACEPIQEMGAVTIGPQDVTSAVRPMPNWKSPGPDGQHNFWIKWLRSSHARLASQFQSSLESGSLPSFLTTGVTHLLFKSGSTAEPKNYRPITCLPTVYKLLTSILRAKINNHIDNNAIMSDSQNGCRNGSRGTKELLLIDMAISQQVRRSRKDLSTCWIDYKKAYDSVPHTWLMRVLELYKINATLRAFLMSCMGQWRTVLHYPGCRQIQGNGELIRIERGIFQGDSLSPLWFCLALNPLSTLLEGSGLGYRLRRGGQVISHLLYMDDLKLFAPNNLQLLELLKVTESFSNSIRMEFGVDKCAVMHVQRGRIMESVGTQLSDSIHLRSLSSTETYKYLGMSEALGINEADMKQSLKERFFGRLIKVLKSLLSGGNKVRAFNGWVMPVLMYSFGILRWTQTELDALDRRVRTLLTAYRMHHPRSSVMRLYIPRKCGGRGFLNAKTLHNREVCSLREYFSQADVGMHRDVVAVDKGLTPLSLAKENWRKPVVLDTNGRREVWRSKELHGRFYRALHGPDVDFLASVAWLRFGDLFGETEGFVCAIMDEVMMTNNYRKYIVKDGTVDICRACHCPGESIRHIVSGCSRLANGEYLHRHNLVARIIHQQLALKYNLVDTEVPYYKYVPDPVLENGHVTLYWDRSIITDRTIVANKPDIVVIDRLERRTMIVDIAVPHDENLVKAENDKKIKYLDLAHEVVDMWDVDSAVIVPIVVTANGLIAKSLDQHLMRLSLGGWIKGLIQKAVLLDTARIVRKFLSLEP

SEQ ID NO: 10698 - protein, 1201 aa, Amphipyra tragopoginis
MLTRSRSRIARPPPPDSPLSSASQPPESSPTMSAVTPAAAVASSSSDEYFSPPTSPTPVRRQGRRRPPNSLGPRGPPAPSRVLATGGCVQRMKWTQKINENVMRAYYGSTEGGTNLTAYRVRMLTLFQELEPAINVSAQRLSDQVRVIQRNHRLDDAALDRLRSEVQNSRVTPIPSQTAVHQVNISVVPPRSDSVDGDMDGRAVTVCSQYNDRLRSALEDAIREYRANPELRPRLPRLPMHNKNRALVCALDSLLSSYFESSEDLGDTHSILYCAAVAACRVANVKFNNSERATRPKPAVPAWQCRIERRIDGARALIGKLICFREGNTRPRVMRFVRRAFSGTGISPREYMSRVTERIDFLKQKVCAWASRIRRYKRRVERYAQNRMFQCDQRWVYRAWERPDQGVSDGRLPDDEAMSSFWRSIWSVPVTHTEGDWTRDIERACEPIEEMGEILISPQDVASAARPLPNWKSPGPDRLHNFWIKWLRSSHARLASQFQSSLESGSLPQFLTTGVTHLLHKSGSTAEPKNYRPITCLPTVYKLLTSILRSKINTHIENNSVMSSSQNGCRNGSRGTKELLLIDMAISQQVRRSRKNLSTCWIDYKKAYDSVPHTWLTRVLELYKINATLRTFLTSCMGQWRTVLRYPGCRQIRGSGEPIRIERGIFQGDSLSPLWFCLALNPLSTLLEGSGLGYPLRRGGQVVSHLLYMDDLKLFAPTKLQLVELLKVTETFSNSIRMEFGVDKCAVMHVRRGGIMESEGLQLSDSIHLRSLSANDTYKYLGMSEGLGISEADMKQSLKERFFGRLKKVLKSLLSGGNKVRAFNGWVMPVLMYSFGILKWTQTELDALDRRVRTLLTANRMHHPRSSVMRLYIPRKCGGRGLLNAKTLHNREVCSLREYFLHADAGMHRDVVAVDKGLTPLSLAKENWRKPVVLSTNDRREVWQSKELHGRFYRALHGPDVDFLASVSWLRFGDLFGETEGFVCAIMDEVIMTNNYRKYIVKDGTVDICRACHCPGESLRHIISGCSRLANGEYLHMHNQVARIIHQQLALKYNLVESEVPYYKYVPDPVLEKGHITLYWDRSIITDRTIVANKPDIVVIDRSERRTMIVDVTIPHNENLVKAEKDKQIKYLDLAHEVVSMWDVESATIVPIVVTANGLMAKSLDQHLKRLSLGGWIKGLIQKAVLLDTARIVRRFLSLEP

SEQ ID NO: 10699 - protein, 1200 aa, Amphipyra tragopoginis
MLTRSKARARDAHPPPPDSSPSSASQQQGLDPASPAAAVASSSSDEYYSPPSSPPPARRRGGTRPPGGLGLRGPLASDRVPAPGGIVPRMKWTQKINESVMRAYYGATEGGTNLTAYRGRMLSLFQVLEPAVNVSAQRLSDQVRVIQRGHMLDDTVLDRIRSEVQSSPVISPSPQVLEQSQNLAATLPRPNPADEEDDDRATSVSTQCNEELRSALEDAMREYRYTRSDLRPRIPRLPMHRKNRALVCALDSLLSNYFDGSEDLGDTHSILYCAAVAACRVAHVKFIDNERVTRPKNAVPAWQCRIERRIAEARALIGKLVCFREGNTRPRVMRFVRRAFSGTDVSPREYMSHVTERIDFLKQKVYAWASRIRRYRRRVDRYTQNRLFQSDERWVYRTWERPDQRVSDTHLPDNDVISAFWRNIWSVPVTHTEGDWMQEVQRACEPIQEMGDIIISPQDVASAVRPMSNWKSPGPDGLHNFWLKWLRSSHACLASQFQSSLESESLPQFLTTGVTHLLHKSGSTAEPKNYRPITCLPTVYKLLTSILRSKINFHIENNCIMSPSQNGCRNGSRGTKELLLIDVAISQQVRRSRKDLSTCWIDYKKAYDSVPHTWLMRVLELYKVNTTLCAFLTSCMRQWRTVLRYPGCRQIQGIGEPIRIERGIFQGDSLSPLWFCLALNPLSTLLEGSGLGYRLRRGGQVISHLLYMDDLKLFAPNKLQLLELLKVTETFSNSIRMEFGVDKCAVMHVKRGRIMESAGTQLTDSIHLRSLSSTETYKYLGMSEALGINGTDMKQSLRERFCGRLKKVLNSLLSGGNKVRAFNGWVMPVLMYSFGILKWTQTELDALDRRVRSLLTANRMHHPRSSVMRLYIPRKCGGRGFLNAKTLHNREVCSLREYFSQADVGMHRDVVAVDKGFTPLSLAKENWRKPVVLDTNDRREVWRSKELHGRFYRALHGPDVDFLASVAWLRFGDLFGETEGFVCAIMDEVMMTNNYRKYIVKDGTVDICRACHCPGESIRHIVSGCSRLANGEYLHRHNLVARIIHQQLALKYNLVDAEVPYYKYVPDPVLENGHITLYWDRSIITDRTIVANKPDIVVIDRSERLTMIVDITVPHDENLVKAEKDKEIKYQDLAHEVVAMWDVDSAIIVPIVVTANGLIAKSLDQHLKRLSLGSWIKGLVQKAVLLDTARIVRKFLSLRP

SEQ ID NO: 10700 - protein, 1111 aa, Amphipyra tragopoginis
MRWTQSMNENCMRAYFGATEGGTNLTAYRGRMLSLFRALEPAVNVSAQRLSDQVRVIQRGHMLDDTVLDRLRSEVQSSPVVSPSSQVLAQQQNLAAALPRPNHAGEEDDDRATNVSTQYNEELRSALEDAMREYRYTRSDLRPRIPRLPMNRKNRALVCALDSLLSNYFDGSEDLGDTHSILYCAAVAACRVAHVKFIDNERATRPKNAVPAWQCRIERRIAEARALIGKLICFREGNIRPRVMRFVRRAFSGTDVSPREYMSRVTERIDFLKQKVCAWANRIRRYRRRVDRYTQNRLFQSDERWVYRTWERPDQRVSDTHLPDNDVMNAFWRNIWSVPVTHTEGDWMQEVQRACEPIQEMGDIIISPQDVASAVRPMSNWKSPGPDGLHNFWLKWLRSSHARLASQFQSSLESGSLPQFLTTGVTHLLHKSGSTAEPKNYRPITCLPTVYKVLTSILRAKINNHIDENSIMSASQNGCRNGSRGTKELLLIDMAISQQVRRSRKDLSTCWIDYKKAYDSVPHTWLMRVLELYKVNTTLCAFLTSCMGQWRTVLHYPGCRQIQRMGEPIRIERGIFQGDSLSPLWFCLALNPLSTLLEGSGLGYRLRRGGQVISHLLYMDDLKLFAPNNLQLLELLKVTETFSNSIRMEFGVDKCAVMHVKRGRIMESVGTQLSDSIHLRSLSSTETYKYLGMSEALGVNETDMKQSLKERFFGRLKKVFNSLLSGGNKVRAFNGWVMPVLMYSFGILKWTQTELDALDRRVRSLLTANRMHHPRSSVMRLYIPRKCGGRGFLNAKTLHNREVCSLREYFSQADVGMHRDVVAVDKGFTPLSLAKENWRKPVVLDTNDRREVWRSKELHGRFYRALHGPDVDFLASVAWLRFGDLFGETEGFVCAIMDEVMMTNNYRKYIVRDGTVDICRACHCPGESIRHIVSGCSRLANGEYLHRHNLVARIIHQQLALKYNLVDSEVPYYRYVPDPVLENGHVTLYWDRSIITDRTIVANKPDIVVIDRSERLTVIVDIAVPHDENLVKAEKDKEIKYQDLAHEVVAMWDVDSAIIVPIVVTANGLIAKSLDQHLKRLSLGGWIKGLIQKAVLLDTARIVRKFLSLRP

SEQ ID NO: 10701 - protein, 1198 aa, Amphipyra tragopoginis
MLTRARSKAARPPPPDSPLSSASQPPELGPPVTPAAAAASSSSDEYFSPPTSPRPVRRQGRHRPPTSLGPRGPPAPSRVLATGGCVQRMKWTQSINENVMRAYYGSTEGGTNLTAYRVRMLTLFQELEPAINVSAQRLSDQVRVIQRNHRLDDAALDRLRLEVQNSRVTPFPSQTAVHEVNINIVPPRSDYVDGDMDDRAVTVSSQYNDQLRSALEDAIREYRANPELRPRLPRLPMHNKNRALVCALDSLLSSYFESSEDLGDTHSILYCAAVAACRVANVKFNNSERATRPKPAVPAWQCRIERRIDGARALIGKLICFREGNTRPRVMRFVRRAFSGTGISPREYMSQVTERIDFLKQKVCAWASRIRRYKRRVERYTQNRMFQCDQRWVYRAWERPDQGVSDGRLPDDDAMNSFWRSIWSVPVIHTEGDWMRDIERACEPIEEMGEILISPQDVASAARPLPNWKSPGPDGLHNFWIKWLRSSHARLATQFQSSLESGSLPQFFTTGVTHLLHKSGSTAEPKNYRPITCLPTVYKLLTSILRSKINTHIENNSVMSSAQNGCRNGSRGTKELLLIDMAISQQVRRSRKNLSTCWIDYKKAYDSVPHTWLMRVLELYKINATLRAFLMSCMGQWRTVLRYPGCRPIRESGEPIRIERGIFQGDSLSPLWFCLALNPLSTLLEGSGLGYPLRRGGQVVSHLLYMDDLKLFAPTKLQLVELLKVTETFSNSIRMEFGVDKCAVMHVRRGGIMESEELQLSDSIHLRPLSANDTYKYLGMSEGLGISEADMKQSLRERFFGRLKKVLKSLLSGGNKVRAFNGWVMPVLMYSFGILKWTQTELDALDRRVRSLLTANRMHHPRSSVMRLYIPRKCGGRGLLNAKTLHNREVCSLREYFLHADAGMHRDVVAVDKGLTPLNLAKENWRKPVVLSTNDRREIWQSKELHGRFYRALHGPDVDFQASVSWLRFGDLFGETEGFVCAIMDEVIMTNNYRKYIVRDGTVDICRACHCPGESLRHIISGCSRLANGEYLHRHNQVARIIHQQLALKYNLVESEVPYYKYVPDPVLENGHITLYWDRSIITDRTIVANKPDIVVIDRSERRTMIVDVTIPHDENLVKAEKDKQIKYLDLAHEVVNMWDVDSATIVPIVVTANGLMAKSLDQHLKRLSLGGWIKGLIQKAVLLDTARIVRRFLSLEP

SEQ ID NO: 10702 - protein, 1198 aa, Amphipyra tragopoginis
MLTRARSKAARPPPPDSPLSSASQPPELGPPVTPAAAAASSSSDEYFSPPTSPTPVRRQGRHRPPTSLGPRGPPAPSRVLATGGCVQRMKWTQSINENVMRAYYGSTEGGTNLTAYRVRMLTLFQELEPAINVSAQRLSDQVRVIQRNHRLDDAALDRLRLEVQNSRVTPFPSQTAVHEVNINIVPPRSDYVDGDMDDRAVTVSSQYNDQLRSALEDAIREYRANPELRPRLPRLPMHNKNRALVCALDSLLSSYFESSEDLGDTHSILYCAAVAACRVANVKFNNSERATRPKPAVPAWQCRIERRIDGAGALIGKLICFREGNTRPRVMRFVRRAFSGTGISPREYMSQVTERIDFLKQKVCAWASRIRRYKRRVERYTQNRMFQCDQRWLYRAWERPDQGVSDGRLPDDDAMNSFWRSIWSVPVIHTEGDWMRDIERACEPIEEMGEILISPQDVASAARPLPNWKSPGPDGLHNFWIKWLRSSHARLATQFQSSLESGSLPQFFTTGVTHLLHKSGSTAEPKNYRPITCLPTVYKLLTSILRSKINTHIENNSVMSSAQNGCRNGSRGTKELLVIDMAISQQVRRSRKNLSTCWIDYKKAYDSVPHTWLMRVLELYKINATLRTFLMSCMGQWRTVLRYPGCRPIRESGEPIRIERGIFQGDSLSPLWFCLALNPLSTLLEGSGLGYPLRRGGQVVSHLLYMDDLKLFAPTKLQLVELLKVTETFSNSIRMEFGVDKCAVMHVRRGGIMESEGLQLSDSIHLRPLSANDTYKYLGVSEGLGISGADMKQSLRERFFGRLKKVLKSLLSGGNRVRAFNGWVMPVLMYSFGILKWTQTELDALDRRVRSLLTANRMHHPRSSVMRLYIPRKCGGRGLLNAKTLHNREVCSLREYFLHADAGMHRDVVAVDKGLTPLNLAKENWRKPVVLSTNDRREIWQSKELHGRFYRALHGPDVDFQASVSWLRFGDLFGETEGFVCAIMDEVIMTNNYRKYIVKDGTVDICRACHCPGESLRHIISGCSRLANGEYLHRHNQVARIIHQQLALKYNLVESEVPYYKYVPDPVLENGHITLYWDRSIITDRTIVANKPDIVAIDRSERRTVIVDVTIPHDENLVKAEKDKQIKYLDLAHEVVNMWDVDSATIVPIVVTANGLMAKSLDQHLKRLSLGGWIKGLIQKAVLLDTARIVRRFLSLEP

SEQ ID NO: 10703 - protein, 1206 aa, Amphipyra tragopoginis
MLTRSRAKAQNTRPPSSASSLSSASQPPEPVSIVSDVTPAAAVASSSSDEYFSPATSPSPPPARRRGRGRPPTCLGPRGPPASDRVPAPGGSVQRMRWTQSMNENCMRAYFGATEGGTNLTAYRGRMLSLFRALEPAVNVSAQRLSDQVRVIQRDHRLDDAALDRLRAEMQNSHAAPLPSQIRTQTLVPPAVPLESNYADEEGEDRAISAGTQYSEIMRSALEDALREFRSTPPELRPRLPRLPMHNKNRALVCALDSLLPNVFESSEDLGDTQSILYCAAVAACRVAHVKFPNDNRATRPKSAVPAWQCRIERRIDEARVLIGKLTCFREGNRRPRVMRFVRRAFSGTDIGPGEYASRVTERIDFLKQKVYAWANRIRRYRRRVDRYTQNRIFQSDQRWVYRTWERPDQGVSDTHLPDNDVMNAFWRNIWSVPVTHTEGDWMQEVQRACEPIQEMGAVTIGPQDVTSAVRPMLNWKSPGPDGLHNFWIKWLRSSHARLASQFQSSLESGSLPAFLTTGITHLLFKSGSTAEPKNYRPITCLPTVYKLLTSILRAKLNHHIDSNAIMCATQNGCKNGSRGTKELLLIDMAISQQVRRSRKDLSTCWIDYKKAYDSVPHTWLMRVLELYKINATLRTFLMSCMGQWRTVLHYPGCRQIQGNGELIRIERGIFQGDSLSPLWFCLALNPLSTLLEGSGLGYRLRRGGQVISHLLYMDDLKLFAPNNLQLVELLKVTETFSNSIRMEFGVDKCAVMHVKRGRIMESVGTQLSDSIHLRSLSSTETYKYLGMSEALGINEADMKQSLRERFFGRLIKVLKSLLSGGNKVRAFNGWVMPVLMYSFGILRWTQTELDALDRRVRTLLTAYRMHHPRSSVMRLYIPRKCGGRGFLNAKTLHNREVCSLREYFSQADVGMHRDVVAVDKGLTPLSLAKENWRKPVVLDAKGRMEVWRSKELHGRFYRALHGPDVDFLASVAWLRFGDLFGETEGFVCAIMDEVMMTNNYRKYIVKDGTVDICRACHCPGESIRHIVSGCSRLANGEYLHKHNLVARIIHQQLALKYNLVDTEVPYYKYVPDPVLENGHVTLYWDRSIITDRTIVANKPDIVVIDRLERRTMIVDITVPHDENLVKAENDKKIKYLDLAHEVVDMWDVDSAVIVPIVVTANGLIAKSLDQHLMRLSLGGWIKGLIQKAVLLDTARIVRKFLSLEP

SEQ ID NO: 10704 - protein, 1200 aa, Amphipyra tragopoginis
MLTRSKARARDAHPPPPDSSPSSASQQQGLDPASPAAAVASSSSDEYYSPPSSPPPARRRGGTRPPGGSGLRGPLASDRVPAPGGIVPRMKWTQKINESVMRAYYGATEGGTNLTAYRGRMLSLFQVLEPAVNVSAQRLSDQVRVIQRGHMLDDAVLDRIRSEVQSSPVISPSPQVLEQSQNLAATLSRPNPADEEDDDRATNVSTQCNEELRSALEDAMREYRYTRSELRPRIPRLPMHRKNRALMCALDSLLSNYFDGSEDLGDTHSILYCAAIAACRVAHVKFMDNERVTRPKNAVPAWQCRIERRIAEARALIGKLVCFREGNTRPRVMRFVRRAFSGTDVSPREYMSRVTERIDFLKQKVYAWANRIRRYRRRVDRYTQNRMFQRDQRWVYRAWERSDQGVGDVHLPDDDAMNSFWRSIWSVPVSHTEGGWIRDVERVCEPILDMGAISISPQDVASAVRPLPNWKSPGPDGLHNFWLKWLRSSHARLASQFQSSLETGTLPQFLTTGVTHLLHKSGSTAEPKNYRPITCLPTVYKLLTSILRSKINFHIENNCIMSPSQNGCRNGSRGTKELLLIDMAISQQVRRSRKDLSTCWIDYKKAYDSVPHTWLMRVLELYKVNTTLCAFLTSCMRQWRTVLRYPGCRQIQGIGEPIRIERGIFQGDSLSPLWFCLALNPLSTLLEESGLGYRLRRGGQVISHLLYMDDLKLFAPNKLQLLELLKVTETFSNSIRMEFGVDKCAVMHVKRGRIMESVGTQLTDSIHLRSLSSTETYKYLGMSEALGINETDMKQSLRERFYGRLKKVLNSLLSGGNKVRAFNGRVMPVLMYSFGILKWTQTELDALDRRVRSLLTANRIHHPRSSVMRLYIPRKCGGRGFLNAKTLHNREVCSLREYFSQADVGMHRDVVAVDKGFTPLSLAKENWRKPVVLDTNDRREVWRSKELHGRFYRALHGPDVDFLASVAWLRFGDLFGETEGFVCAIMDEVMMTNNYRKYIVKDGTVDICRACHCPGESIRHIVSGCSRLANGEYLHRHNLVARIIHQQLALKYNLVNAEVPYYKYVPDPVLENGHVTLYWDRSIITDRTIVANKPDIVVIDRTERLTMIVDITVPHDENLVKAEKDKEIKYQDLAHEVVAMWDVDSAIIVPIVVTANGLIAKSLDQHLKRLSLGGWIKGLIQKAVLLDTARIVRRFLSLRP

SEQ ID NO: 10705 - protein, 1204 aa, Noctua pronuba
MLTRRRAKLLETHPPSPGSSLSSASQPPGRATSVSAASPVAAVASSSSDEFFSPPSTPPSPRRRGRRPPAGLGPRGQQAPNRVPAAGGNVSRIRWTQSMNENVMRAYYGATEGGINLTAYRCRMLSLFQALEPAVNVSAQRLSDQVRVIQNNHRLDDATLDRLRSELRISPASNPLPSQNVTHVPAALPLRANQHAEEEDDRAVSAENLCNVELRSALEGAIREYRFMSPDLRPRLSRLPMNKKNRALVCALDALLPNFIESSANLCDTHSILYCTAVAACRVANVKFPKTDSATRPKSAVPVWQCRIERRINEARALIGKLICFREGNTRPRVMRFVRRAFSGTDISPREYISRVTERIDFLKQKVYAWANRIRRYRRRVDRYTQNRMFQSDERWVYRTWERPVTIQGVTDAHLPENDAMSAFWRSIWSVPVSHTEGDWMRVVEQACDSIPEMEAISISPLDVARAVRPLPNWKSPGPDGLHNFWIKWLQRSHACLASQFQSSLETGSLPSFFTTGVTHLLHKSGSTAEPKNYRPITCLPTVYKVLTSILRAKIVRHIDSNSIMSVSQNGCRNGSRGTKELLLIDMAISQQVRRSRRDLSTCWIDYKKAYDSVPHTWLRRVLELYKIDATLRTFLVSCMGQWSTVLLYPGCRQVLGNDEPIRIERGIFQGDSLSPLWFCLALNPLSTLLEDSGLGYRLRRGGQDISHLLYMDDLKIFAPSNLRLMELLKVTETFSSAIRMEFGVDKCAVMHVKRGEIMESVGTQLSDSIYLRSLSSTETYKNLGMSEALGINAADMKQSLKERFFGRLNKVLKSLLSGGNKVRAFNGWVMPVLMYSFGILKWTQTELDALDRKVRTLLTANRMHHPRSSVMRLYIPRKCGGRGFLNAKTLHNREVCSLREYFLETDVGMHRDVVSVDKGLTPLSLANENWRKPVVLDTNDRKEVWQSKELHGRFFRALHGPDVDLLASVSWLRFGDLFGETEGFVCAIMDEVIMTNNYRKYIVKDGTVDICRACHRPGESIRHIVSGCSRLANGEYLHRHNLVARIIHQQLALQYNLVGTEVPYYKYVPDPVLENGHATLYWDRSIITDRTILANKPDIVVIDRRERRAMIVDITVPHDENLVKAENDKKIKYLDLAHEVVDMWDVDSAIIVPIVVTVNGLIAKSLDQHLRRLSLRGWVKGLIQKAVLLDTARIVRRFLSLEP

SEQ ID NO: 10706 - protein, 1202 aa, Noctua pronuba
MLTKQLAHPPSPGSSLSSASQPPGRATFVSTLSPVAAVASSSSDEFFSPPSTPPPPPPQRRRGRGRPPAGLGPRGQQAPNRVPAAGGNVSRMRWTQSINEQVMRAYYGATEGGSNLTAYRGRMLSLFQVLEPAVSVSAQRLSDQVRVIQRNHMLDDTVLDRLRSESRSNPVTPASPMIAVQLQSATSASPRSDHGGEEDDSEVISVSTQCNAQLRSALEGAFREYRSTPPELRPRLPRLPMHKKNKALMCALDSQLSNYFDSSKDLADTHSMLYCGAVAACRVAHVKFPNNDRATRPKLAVPAWQCRIERRIGEARALIGKLICFREGNTRPRVMRFVRRAFSGTDISFRDYLARVTERIDFLKQKICAWASRIRRYKRRVERYTQNRTFQSDERWVYRAWERPDQGVTDTHLPDDDAICSFWRSIWSVPVSHIEGDWTREVERACDPIPQMGAINISPQDVACAVRPLPNWKSPGPDGLHNFWIKWFQRSHVRLASQFQSALESGSLPQFLTTGITHLLHKSGSTAEPKNYRPITCLPTVYKVLTSILRAKINHHIDSNSIMSASQNGCRNGSRGTKELLLIDMAISQQVRRSRKNLSTCWIDYKKAYDSVPHTWLMRVLELYKVDATLRTFLMSCMGHWRTVLRYPGCRQIQGNSEPIRIERGIFQGDSLSPLWFCLALNPLSTLLEGSGLGYRLRRGGQVISHLLYMDDLKLFAPNNLQLMKLLKVTETFSSAISMEFGVDKCAVMHVKRGEIMESVGTQLSDSIQLRSLSSTDTYKYLGMSEALGINTADMKQSLRERFFGRLNKVLSSLLSGGNKVRAFNGWVMPVLMYSFGILKWTQSELDALDRRVRALLTANRMHHPRSSVMRLYIPRKCGGRGFLNAKTLHNREVCSLREYFLEANVGMHRDVVSVDKGLTPLSLANENWRKPRVLDTNDRKEVWQGKELHGRFYRALHGPDVDFLASVSWLRFGDLFGETEGFVCAIMDEVMMTNNYRKYIVKDGTVDICRACHRPGESIRHIISGCSRLANGEYLHRHNLVARIIHQQLALKYNLVESEVPYYKYAPDPVLDNGNITLYWDRSIITDRTIVANKPDIVVIDRLERRAMIVDITVPHDENLVKAEKDKQFKYLDLAREVVDMWDVNTAVIVPIVVSANGLIAKSLDQHLRRLELGSWIKGLIQKAVLLDTARIVRRFLSQEP

SEQ ID NO: 10707 - protein, 868 aa, Noctua pronuba
MRFVRRAFSGTDISPRDYMSRVTERIDFLKQKVYAWANRTRRYKRRVDRYTQNRTFQRDERWVYRAWERPDQGVADTRLPDDDAMCSFWRSIWSVPVSHTEDEWTREVERACDPVQEMGAITISPQDVVCAVRPLPNWKSPGPDGLHNFWIKWFTRSHARLATLFQSALESGSLPEFLTTGITHLLHKSGSTAEPKNYRPITCLPTVYKVLTSILRTKISKHINDNSIMSPSQNGCRNGSRGTKELLLIDMAISQQVRRFRRDLSTCWIDYKKAYDSVPHTWLMRVLELYKVDTTLRTFLMSCMGQWRTVLRYPGCRQIQRDSEPIRIERGIFQGDSLSPLWFCLALNPLSTLLEDSGLGYRLRRGGQVISHLLYMDDLKLFAPNDLQLMELLKVTETFSSAIRMEFGVDKCAVMHVKRGEIVESVRTQLSDSINLRSLSATETYKYLGMSEALGINVADMKQSLKERFFGRLKKVFNSLLSGGNKVRAFNGWVMPVLMYSFGILKWTQTELDALDRRVRTLLTAYRMHHPRSSVMRLYIPRRCGGRGFLNAKTLHNREICSLREYFLEADVGMHRDVVAVDKGLTPLSLAKENWRKPVVLDTNDRREVWQSKELHGRFFRALHGPDVDLSASVAWLRSGDLFGETEGFVCAIMDEVMMTNNYRRFIVKDGTVDICRACHRPGESIRHIISGCSRLANGEYLHRHNLVARIIHQQLALKYNLVESEVPYYKYVPDPVLENGCVTLYWDRSIITDRTIVANKPDIVVVDRSERRAMIVDITVPHDENLVKAEKDKQIKYLDLAHEVVDLWDVDSAIIVPIVVSAHGLIAKSFDQHLRRLSLGSWIKGLIQKAVLLDTARIVRRFLSLEP

SEQ ID NO: 10708 - protein, 1106 aa, Noctua pronuba
MRWTQSINENVMRSYYGATEGGNNRTAYRVRMLSLFQVLEPAVNVSAQRLSDQVRVIQRNRMLDDTVLDRLRTEMQSSHVITPSAQAVVLPQSNTIPNRANDESNDMVTNVSTQCNEEIRSALEGAIREYRSMQPDLRPRIPRLPMHNKNRALVAVLDSQLSNYFDNCEDLTDAHSILYCAAVAACRVAHVKFSDDRATRPKPAVPAWQYRIERSIGGARALIGKLICFREGNTRPRVMRFVRRAFSGTDISPRDYMSRVTERIDFLKQKVYAWANRIRRYKRRVDRYTQNRTFQRDERWVYRAWERPDQGVADTRLPDDDAMCSFWRSIWSVPVSHTEDEWTREVERACDPVQEMGAITISPQDVVCAVRPLPNWKSPGPDGLHNFWIKWFTRSHARLATLFQSALESGSLPEFLTTGITHLLHKSGSTAEPKNYRPITCLPTVYKVLTSILRTKISKHINDNSIMSPSQNGCRNGSRGTKELLLIDMAISQQVRRFRRDLSTCWIDYKKAYDSVPHTWLMRVLELYKVDTTLRTFLMSCMGQWRTVLRYPGCRQIQRDSEPIRIERGIFQGDSLSPLWFCLALNPLSTLLEDSGLGYRLRRGGQVISHLLYMDDLKLFAPNDLQLMELLKVTETFSSAIRMEFGVDKCAVMHVKRGEIVESVRTQLSDSINLRSLSATETYKYLGMSEALGINVADMKQSLKERFFGRLKKVFNSLLSGGNKVRAFNGWVMPVLMYSFGILKWTQTELDALDRRVRTLLTAYRMHHPRSSVMRLYIPRRCGGRGFLNAKTLHNREICSLREYFLEADVGMHRDVVAVDKGLTPLSLAKENWRKPVVLDTNDRREVWQSKELHGRFFRALHGPDVDLSASVAWLRSGDLFGETEGFVCAIMDEVMMTNNYRRFIVKDGTVDICRACHRPGESIRHIISGCSRLANGEYLHRHNLVARIIHQQLALKYNLVESEVPYYKYVPDPVLENGCVTLYWDRSIITDRTIVANKPDIVVVDRSERRAMIVDITVPHDENLVKAEKDKQIKYLDLAHEVVDLWDVDSAIIVPIVVSAHGLIAKSFDQHLRRLSLGSWIKGLIQKAVLLDTARIVRRFLSLEP

SEQ ID NO: 10709 - protein, 1200 aa, Tinea trinotella
MLIRSRARNQSAQLTSSGSSLSSASQPPRSTPTVSPVISVAAVASSSSDECFSPPMTPPSARRRGGGRPPASLEPRGPSASGGVPATSGRVQRMRWTQSINENVMRSYFGATEGGSSLTAYRGRMLTLFQVLEPAVNVSAQRLSDQVRVIQRNRMLDDVVLDRLRLESRSSHVSPVSPPVAVQLQPSALPRPNNIEENDDDVTISVSNQYNEQLRSALEDAFREYRSTPPGLRPRIPRLPMHKKNRALVCALDSQLVNHFKSSKDLADTHSILYCAAVAVCRVAHVKFPNNDRAARLAVPAWQCRIERRIGEARALIGKLISFREGNTRPRVMRFVRRAFSGTDISSRDYQTRVTERIDFLKQKIYAWANRIRRYKRRVERYTQNRTFQSNERWVYRAWERPDQDVSDMCLPDDDAMSLFWRNIWSVPVGHTEGEWTREVERACDLIPEMGAIIISPQDVACAVRPLSNWKSPGLDGLHNFWIKCFQRSHARLAAQFQSALELGSLPQFLTTGITHLLHKSGSTAEPKNYRPITCLPTVYKVLTSILRAKIDKHIDTNCIMSASQNGCRSGSRGTKELLLIDVAISQQVRRSRRDLSTCWIDYKKAYDSVPHTWLMRVLELYKVDAALRTFLVSCMGQWRTVLHYPGCRRILGNGEPIKIERGIFQGDSLSPLWFCLALNPLSTLLDGSGQGYRLRRDGQVISHLLYMDDLKLFAPNNLQLMKLLKVTETFSSAISMEFGVDKCAIMHVKRGEIMESVGTQLSDSIHLRSLCSTETYKYLGMSEALGINAVDVKQSLRDRFFGRLNKVLNSLLSGGNKVRAFNGWVMPVLMYSFGILKWTQTELDALDRRVRTMLTANRMHHPRSSVMRLYIPRKCGGRGFLNAKTLHNREVCSLREYFLKTDVGMHRDVVAVDKGLTSLSMANENWRKPVVLDANDRREVWQSKELHGRFYRALHGPDVDFLASVSWLRFGDLFGETEGFVCAIMDEVMMTNNYRKYIVKDGTVDICRACHRPGESIRHIISGCSRLANGDYLHRHNLVARIIHQQLALKYNLVESEVPYYRYVPDPVLENGNITLYWDRSIITDRTIVANKPDIVVIDRLERRTIIVDVAVPHDENLVKAEKDKQIKYLDLAREVVDMWEVDTAIIVPIVVTANGLIAKSLDEHLKRLSLGSWIKRLIQKAVLLDTARIVRRFLSQEP

SEQ ID NO: 10710 - protein, 1194 aa, Autographa pulchrina
MLTRSRSRRPARPPSPDSSPSSASQLPDHVPAPAPAVASSSSDEYYSPPTSPTPVRRQGRRRPPSSLVPSGQPASNRAPAPGGDVRRMKWTQGINENVMRAYYGATEGGTNLTAYRARMLSLFQSLEPDVNVSAQRLSDQVRVIQRNHRLDDITLDRLRSEVQRSPAASTPSPAVVPVIGSPPTNPADGEEEDGAITVSTQCSEHIRSTLEDTIREFRSTPPGLRPRLPRLPMHNRNKAIMGVLDSLLLVYFGSSEDLSDTHSILYCAALTACRVSNVKINNINLDTRPKPAVPAWQCRIERRVAEARALIGKLIAFKDGNSRPRVMRFVRRAFTGTNISPSEYTARVTERIDFFKQKVCAWASRIRRYKCRVDRFHQNRMFQRDQRWVFRTWERPVLGMDDRRLPDEDATNSFWRNIWSVPVSHSEGDWMRDVEESCEPIQEMGAITISPQDVANAIRPMSNWKAPGPDGLQNFWLKWFRSSHGCLASQFQYAIESDALPQFFTTGSTHLLHKTGSTTDPKNYRPITCLPTIYKLLTSILRVKINEHIDSHSIMSASQNGCRNGSRGTKELLLIDMTICQQVRRSKKNLSTCWIDYKKAYDSVPHSWLMRVLELYKINTTLRAFLSSCMRRWTTVLRYPGCRDIQQSGEPIRIERGIFQGDSLSPLWFCLALNPLSTLLENSRLGYSLRRGSQVISHLLYMDDLKLFASNELQLMGLLKITESFSNSIRMEFGVDKCAVMHVKQGGIVESQGIQLSDSINLRSLSAADTYKYLGMSEALGINVADMKQSLLTRFFGRLNKVLKSLLTGGNRVRAFNGWVMPVLMYSFGILKWTQTELDALDRRVRTLLTANRMHHPRSSVMRLYIPRKCGGRGFLNAKTLHNREVCNLREYFLQVDVGMHRDVVAVDKGFTPLSLGKENWHKPVVLSVKDRRDVWQSKELHGRFYRSLHGPDVDFLASVAWLRFGDLFGETEGFVCAIMDEVIMTNNYRKYIIKDGTVDICRACHCPGESIRHIISGCSRLANGEYLHRHNQVARIIHQQLALRYKLVEAEVPYYRYVPDPVLDNGHVTLYWDRSIITDRTIVANKPDIVVIDRSERRAMIVDVTIPHDENLVKAEKEKQMKYLDLAHEVVDMWEVDSAIIVPIVITANGIIAKSLDQHLKRLSLDIWVKGLIQKAVLLDTARIVRRFLSLEP

SEQ ID NO: 10711 - protein, 1198 aa, Ochropleura plecta
MLTRAAQARNARHPPPGSSLSSASPPPEPSLVVSAVTPAVAVASSSSDEYFSPPTTPPPVRRRGRHRPPDGLGPRGPPASDRVPAPGGSVQRMRWTQSINENVMRSYYGATEGGNNLTAYRVRMLSLFQVLEPAVNVSAQRLSDQVRVIQRNRMLDDTVLDRLRTEMQSSQVITSSSQAVVPPQPHQLINRVNEVSNDVATNVSTQCSEEMRSTLEGAIREYRYISPELRPRLPRLPMHNKNRALVAALDSQLSSYFDNCENLTDAHSILYCAAVTVCRVAHVKFPDDRATRPKPAIPFWQCRIERRIGAARALIGKLTCFREGNTRPRVMRFVRRAFAGTDISPPDYISRIAERIDFLKQKVYAWANRIRRYKRRVERYTQNRTFQSDERWVYRAWERPDQGVSDTRLPDDDAMSLFWRSIWSVPVSHTEGEWTREVERACDPIPEMGALTISPQDVACAVRPLPNWKSPGPDGLHNFWIKWIQRSHVRLAALFQSALESGSLPKFLTTGITHLLHKSGSTAEPKNYRPITCLPTLYKVLTSILRAKITKHIDDNSIMSASQNGCRNGSRGTKELLLIDMAISQQVRRSRRHLSTCWIDYKKAYDSVPHTWLMRVLDLYKIDATLRTFLISCMRQWSTVLRYPGCRQIQRNSEPIRIERGIFQGDSLSPLWFCLALNPLSTLLENSGLGYRLKRGGQVISHLLYMDDLKLFAPNDLQLMELLKVTETFSSAIRMEFGVDKCAVMHVKRGEIVESVGTQLSDSINLRSLSATETYKYLGMSEALGINVADMKQLLKERFFGRLRKVFNSLLSGGNKVRAFNGWVMPVLMYSFGILKWTQTELDALDRKVRTLLTAFRMYHPRSSVMRLYIPRSCGGRGFLNAKTLHNREICSLREYFLETDVGMHRDVVAVDKGLTPLSLAKENWRKPVVLDTNDRREVWQSKELHGRFFRALHGPDVDQSASVAWLRSGDLFGETEGFVCAIMDEVMMTNNYRRFIVKDGTVDICRACHRPGESIRHIISGCSRLANGEYLHRHNLVARIIHQQLALKYNLVESEVPYYRYEPDPVLEHGYITLYWDRSIITDRTVVANKPDIVVVDRSERRAMIVDITVPHDENLVKAEKDKQIKYIDLAREVVDMWDVDSAIIVPIVVSANGLIAKSLDQHLRRLSLGSWIKGLIQKAVLLDTARIVRRFLSLEP

SEQ ID NO: 10712 - protein, 1196 aa, Hecatera dysodea
MLTRAAARRARLPPPASSLSSASPPPEPSPTVSAATPAVAVASSSSDEYFSPPTSPPPARRRRGRRPPDGLGPRGPPVSDRVPAPGGSVQRMRWTQTINENVMRSYYGATEGGTNLTAYRGRMLSLFQVLEPAVNVSAQRLSDQVRVIQRNRMLDDSVLDRLRTEICSHVIVPSPQTVAPPQLTQIPCHADEENNDRVMNVSTQCNDELRSALESAIREYRYVSPELRPRIPRLPMHNKNRALVAALDSQLSNYFDNCGDLTDAHSIMYCAAVAACRVAHVKMPSDRVTRPKVAVPAWQCRIERRIGGARALIGKLICFREGNTRPRVMRFVRRAFSGTDISPSDYLSRVTERIDFLKQKVYAWANRIRRYKRRVERYTQNRTFRSNERWVYKAWERPDQDVTDMHPPDDDAMCSFWRNIWLVPVSHTEGDWIREVERACDPLPEMGAIIISPQDVARAVRPLPNWKSPGPDGLHNFWIKWFKGSHACLASRYQAALESGSLPEFFMTGVTHLLHKSGSTTEPKNYRPITCLPTVYKVLTSILRDKINQHINSNNIMSASQNGCRNGSRGTKELLLIDMVISQQVRRSRKDLSTCWIDYKKAYDSVPHSWLMRVLELYKIDTTLRTFLMSCMGQWRTVLRYPGCRNIQRNSEPVRIERGIFQGDSLSPLWFCLALNPLSTLLENSGLGYRLRRGGQVISHLLYMDDLKLFAPTNLQLMELLKVTETFSNAIRMEFGVDKCAVMHVKRGEIMESVGTQLSDSINLRSLSSTETYKYLGMSEALGINVTDMKQSLRERFFGRLKKVLNSLLSGGNKVRAFNGWVMPVLMYSFGVLKWTQTELDALDRRVRTLLTAYRMHHPRSSVMRLYIPRKCGGRGFLNAKTLHNREICSLREYFLAVDVGMHRDVVAVDKGLTPLSLANENWRKPAVLDTNDRRAVWQSKELHGRFFRALHGPDVDQLASVAWLRFGDLFGETEGFVCAIMDEVIMTRNYRRFIVKDGTVDICRACHRPGESIRHIVSGCSSLANGEYLHRHNLVARIIHQQLALKYSLVESEVPYYRYVPDPVLDNGNITLYWDRSIITDRTIVANKPDIVVVDRIVRRAMIVDITVPHDENLVKAEKDKQIKYLDLAREVVDMWDVDSAIIVPIVVSVNGLIAKSLDQHLRRLTLGGWIKGLIQKAVLLDTARIVRRFLSLEP

SEQ ID NO: 10713 - protein, 1200 aa, Hecatera dysodea
MLTRSRTRCQNTRLTPSDSSLSSASQPPGPTPAVSPEIPVAAVASSSSDEYFSPPTTPPPARRRGRGRPPNSLGPRGPPASDRVPAIGGSVQRMRWTHSINENVMRSYFGATEGGTNLTAYRGRMLSLFQVLEPAVNVSAQRLSDQVRVIQRNRMLDDAVLDRLRLESRSSRVSPASPPAAVQIQPSISPRPDHVSEDVDDGTISVSTQCNERLRSALEDAFREYRSTPPELRPRLPRLPMHNKNRALVCALDSQLSIYFDSSENLTDTHSILYCGAAAACRVAHVKLPNSDRVARPAVPAWQCRIERRIAEARALIGKLICFREGNTRRRVMRFVRRAFSGTDISPRDYLTRVTERIDFLKQKVYAWANRIRRYKRRVERYTQNRIFQNNERWVYRAWERPDQGVTDTRLPDDEAMLSFWRNIWSVPVSHTEGDWTREVERACDSIPEMGAINISPQDVARAVRPLPNWKSPGPDGLHNFWIKWLTRSHARLASQFQSALESRSLPQFFTTGITHLLHKSGSTAEPKNYRPITCLPTVYEVLTSILRAKINDHIESNSIMSTSQNGCRSGARGTKELLLIDVAISQQVRRSRKDLSTCWIDYKKAYDSVPHTWLMRVLELYKVDAVLRAFLMSCMGQWRTVLHYPGCRQTQVNSEPIRIERGIFQGDSLSPLWFCLALNPLSTLLEGSGQGYRLRRGGQVISHLLYMDDLKLFAPNNLQLMKLLKVTETFSSDISMEFGVDKCAVMHVKRGEIMESVGTQLSDSIHLRSLCSTETYKYLGMSEALGINATSVKQSLKERFFGRLNKVLNSLLSGGNKVRAFNGWVMPVLMYSFGILKWTQTELDALDRRVRSLLTANRMHHPRSSVMRLYIPRKCGGRGFLNAKTLHNREVCSLREYFLEADVGMHRDVVAVDKGFTPLSLANENWRKPVVLDTNDRREVWQSKELHGRFYRVLHGPDVDFLASVAWLRFGDLFGETEGFICAITDEVMMTNNYRKYIVKDGTVDICRACHRPGESIRHIISGCSSLANGDYLHRHNLVARIIHQQLALKYNLVESEVPYYRYAPDPVLENGNCTLYWDRSIITDRTIVANKPDIVVIDRLERRAMIVDIAVPHDENLVKAEKDKQSKYLDLAREVVDMWDVNTAVIVPIVVTANGIIAKSLDQHLKRLSLGSWIKGLIQKAVLLDTARIVRRFLSREP

SEQ ID NO: 10714 - protein, 1199 aa, Mythimna impura
MLTRAAARRARLPPPASSLSSASPPPESSPTVSAVTPAVAVASSSSDEYFSPPTSPPPARRRRGRRPPSGLGPRGPPASDRVPAPGGSVQRMRWTQSINENVMRAYYGATEGGNNLTAYRVRMLSLFQVLEPAVNVSAQRLSDQVRVIQRNHMLDDTVLDRLRTEMSNHAIAPSSQPVIPVMVPPSYHLSDHADEEITDMVTHVSTQCNNELRSALECAIREYHNMPLELRPRLPRLPMHNKNKALVAALDLQLSNYFDDCEDLTDTHSIMYCAAVAACRVAHVKFPSCDVSTRPKPAVPAWQCRIERRIGGARALIGKLICFREGNTRPRVMRFVRRAFSGTDISPRDYMSRVTERIDFLKQKVYAWANRIRRYKRRVERYTQNRTFRSNERWVYRAWERPDQGVTDTRLPDDDAMSSFWRSIWSVPVSHTEGDWTREVERACDPIPQMGAIDISPQDVARAVRPLPNWKSPGPDGPHNFWIKWFTRSHARLAYQFQSALESGSLPQFLTTGITHLLHKSGSTAEPKNYRPITCLPTVYKVLTSILRSKINSHIDKNLIMSPSQNGCRNGSRGTKELLLIDMTISQQVRRFRKDLSTCWIDYKKAYDSVPHTWLMRVLELYKIDTTLRTFLMSCMRQWSTVLRYPGCRHIQRNSEPVRIERGIFQGDSLSPLWFCLALNPLSTLLENSGLGYRLKRGGQVISHLLYMDDLKLFAPNNLQLMELLKVTETFSSAIRMEFGVDKCAVMHVKRGEVVESVGTQLTDSINLRSLSPTETYKYLGMSEALGINITDMKQSLKERFFGRLKKVFNSLLSGGNKVRAFNGWVMPVLMYSFGVLKWTQTELDALDRRVRTLLTAYRMHHPRSSVMRLYIPRKCGGRGFLNAKTLHNREVCSLREYFLATDVGMHRDVVTVDKGLTPLSLANENWRKPVVLDTNDRREVWQSKELHGRFFRAFHGPDVDQLASVAWLRFGDLFGETEGFVCAIMDEVIMTNNYRRFIVKDGTVDICRACHRPGESIRHIISGCSRLANGEYLHRHNLVARIIHQQLALKYSLVESEVPYYRYEPDPVLDNGHITLYWDRSIITDRTIVANKPDIVVVDRSERRAMIVDISVPHDENLVKAEKDKQIKYIDLAREVVDMWDVDSAIIVPIVVSANGLIAKSLDQHLRRLALGGWIKALIQKAVLLDTARIVRFLSLEP

SEQ ID NO: 10715 - protein, 1048 aa, Mythimna impura
MLDDTVLDRLRTEMGSHAIASSSQTVAPSQVSPSNHLPNHADEESTDMVTHVSTQCSNELRSALECAIREYRNMPLKLRPRLPCLPMCNKNKALVAALDSQLSNYFDDCEDLTDTHSIMYCVAVAACRVAHVKFPNSDVATRPKPAVPAWQCRIERRIGGARALIGKLICFREGNTRPRVMRFVRRAFSGTDISPRDYLSCVTERIDFLKQKVYAWANRIRRYKRRVERYTQNRTFRSNERWVYRAWEQPDQGVADSRLPDDDVMSSFWRNIWSVPVSHTEGGWTREVERACEPIPEMGAITISPQDVARAVRPLPNWKSPGPDGLHNFWIKWLQRSHARLASQYQTALESGSLPEFLTTGVTHLLHKSGSTAEPKNYRPITCLPTVYKVLTSILRAKINHHIDNNAIMSASQNGCRNGSRGTKELLLIDMAISQQVRRSRKDLSTCWIDYKKAYDSVPHTWLMRVLELYKIDATLRTFLMSCMRQWRTVLRYPGCRHIQRNSEPVRIERGIFQGDSLSPLWSCLALNPLSTLLENSGLGYRLKRGGQVISHLLYMDDLKLFAPNNLQLMELLKVTETFSSAIRMEFGVDKCAVMHVKRGEIVESVGTQLSDSINLRSLSPTETYKYLGMSEALGINATDMKQTLRERFFGRLKKVFNSLLSGGNKVRAFNGWVMPVLMYTFGVLKWTQTELDALDRRVRTLLTAYRMHHPRSSVMRLYIPRKCGGRGFLNAKTLHNREVCSLREYFLTADLGMHRDVVAVDKGLTPLSLANESWRKPVVLDTNDRREVWQSKELHGRFFRALHGPDVDQLASVAWLRVGDLFGETEGFVCAIMDEVIMTNNYRRFIVKDGTVDICRACHRPGESIRHIISGCSRLANGEYLHRHNLVARIIHQQLALNYSLVESEVHYYRYVPDPVLDNGDITLYWDRSIITDRTTVANKPDIVVVDRRERRTMIVDISVPHDENLVKAEKDKQIKYIDLAREVVDMWDVDSAIIVPIVVSANGLIAKSLDQHLRRLALGGWIKGLIQKAVLLDTARIVRRFLSLEP

SEQ ID NO: 10716 - protein, 868 aa, Mythimna impura
MRFVRRAFLGTDISPQNYLPCITERIDFLKQKVYAWASRIRRYKRRVERYTQNRTFQSNERWVYRTWERPDQDVTDTRLPDDDAMCSFWRRIWSVPVSHIEGDWIREVERTCDLLPEMGAITISPQDVARAVRPLPNWKSPGPDGLHNFWIKWFQGSHARLASQFQSALESGSLPEFLTTGITHLLHKSGSTVDPKNYRPITCLPTVYKVLTSILRAKINTHIETNSIMSASQNGCRNGSRGTKELLLIDMAISQQVRRSRKDLSTCWIDYKKAYDSVPHTWLMRVLELYKVDTTLRTFLMSCMRQWRTVLHYPGCRQIRENSEPIRIERGIFQGDSLSPLWFCLALNPLSTLLEGSGLGYRLKRGGQVISHLLYMDDLKLFAPNNLHLMELLKVTETFSNAIRMEFGVDKCAVMHVKRGEIMESVGTQLSDSIYLRSLCSTETYKYLGMSEALGINATDVKQSLKERFFGRLNRVLKSLLSGGNKVRAFNGWVMPVLMYSFGILKWTQTELDALDRRVRTLLTANRMHHPRSSVMRLYIPRKCGGRGFLNAKTLHNREVCSLREYFLETDVGMHRDVVAVDKGLTPLSLANGNWRKPIILDTNDRREVWQSKELHGRFYRALHGPDVDLLASVSWLRFGDLFGETEGFVCAIMDEVVMTNNYRKYIVKDGTADICRACHRPGESIRHIISGCSHLANGDYLHRHNLVAKIIHQQLALRYNLVESEVPYYKYVPDPVLDNGSITLYWDRSIITDRTIVANKPDIVVIDRLERRTVIVDIAVPHDDNLVKAEKDKQTKYLDLAREVVDMWEVDTAVIVPIVVTANGLISKSLDQHLRRLSLGSWIKGLIQKAVLLDTARIVRRFLSQEP

SEQ ID NO: 10717 - protein, 1098 aa, Mythimna impura
MTFWFNAAKIQAYFFFAIIIIIIMFQVLEPAVNVSAQRLSDQVRVIQRNHMLDDTVLDRLRTEMSNHAIAPSSQSVVPVMVPPSYHLSGHVDEEITDMVTHVSTQCNNELRSALECAIREYRNMPLELRPRLPRLPMHNKNKALVAALDLQLSNYFDDCKDLTDTHSIMYCAAVAACRLAHVKFPNCDVATRPKPAVPAWQCRIERRIGGARALIGKLICFREGNTRPRVMRFVRRAFSGTDISPRDYMSRVTERIDFLKQKVYAWANRIRRYKRRVDRYTQNRTFRSNERWVYRAWERPDQGVTDACLPDDDAMSSFWRSIWSVPVSHTEGDWTREVERACDPIPQMGAIDISPQDVARAVRPLPNWKSPGPDGLHNFWIKWFTRSHARLAYQFQSALESGSLPQFLTTGITHLLHKSGSTAEPKNYRPITCLPTVYKVLTSILRSKINSHIDKNLIMSPSQNGCRNGSRGTKELLLIDMTISQQVRRSRKDLSTCWIDYKKAYDSVPHTWLMKVLELYKIDTTLRTFLMSCMRQWSTVLRYPGCRHTQRNSEPVRIERGIFQGDSLSPLWFCLALNPLSTLLENSGLGYRLKRGGQVISHLLYMDDLKLFAPNNLQLMELLKVTETFSSAIRMEFGVDKCAVMHVKRGEVVESVGTQLTDFINLRSLSPTETYKYLGMSEALGINITDMKQSLKERFFGRLKKVFNSLLSGGNKVRAFNGWVMPVLMYSFGVLKWTQTELDALDRKVRTLLTAYRMHHPRSSVMRLYIPRKCGGRGFLNAKTLHNREVCSLREYFLAADVGMHRDVVTVDKGLTPLSLANENWRKPVVLDTNDRREVWQSKELHGRFFRALHGPDVDQLASVAWLRSGDLFGETEGFVCAIMDEVIMTNNYRRFIVKDGTVDICRACHRPGESIRHIISGCSRLANGEYLHRHNLVARIIHQQLALKYSLVESEVPYYRYEPDPVLDNGHITLYWDRSIITDRTIVANKPDIVVVDRSERRAMIVDISVPHDENLVKAEKDKQIKYIDLAREVVDMWDVDSAIIVPIVVSGNGLIAKSLDQHLRRLALGDWIKGLIQKAVLLDTARIVRRFLSLEP

SEQ ID NO: 10718 - protein, 1046 aa, Mythimna impura
MLDDAVLDRLRLESQRSRASSATPPAAVQLQPSALPRPDHVGDADDDAAISVSTQCNERLRSALEDAFREYRSTPPGLRPRLPRLPMHKRNRALVCALDSQLSNCFDSSKDLADTHSILYCAAAAACRVAHVKFPNCDRATRPAVPAWQRRIERRIGEARALIGKLICFREGNTRPRVMRFVRRAFLGTDISPQNYLPCVTERIDFLKQKVYAWASRIRRYKRRVERYTQNRTFQSNERWVYRTWERPDQDVTDTRLPDDDAMCSFWRRIWSVPVSHIEGDWIREVERTCDLLPEMGAITISPQDVARAVRPLPNWKSPGPDGLHNFWIKWFQGSHARLASQFQSALESGSLPEFLTTGITHLLHKSGSTADPKNYRPITCLPTVYKVLTSILRAKINTHIETNSIMSASQNGCRNGSRGTKELLLIDMAISQQVRRSRKDLSTCWIDYKKAYDSVPHTWLMRVLELYKVDTTLRTFLMSCMGQWRTVLHYPGCRQIRENSEPIRIERGIFQGDSLSPLWFCLALNPLSTLLEGSGLGYRLKRGGQVISHLIYMDDLKLFAPNNLHLMELLKVTETFSSAIRMEFGVDKCAVMHVKRGEIMESVGTQLSDSIYLRSLCSTETYKYLGMSEALGINAADVKQSLKERFFGRLNRVLKSLLSGGNKVRAFNGWVMPVLMYSFGILKWTQTELDALDRRVRTLLTANRMHHPRSSVMRLYIPRKCGGRGLLNAKTLHNREVCSLREYFLETDVGMHRDVVAVDKGLTPLSLANGNWRKPIILDTNDRREVWQSKELHGRFYRALHGPDVDLLASVSWLRFGDLFGETEGFVCAIMDEVVMTNNYRKYIVKDGTADICRACHRPGESIRHIISGCSHLANGDYLHRHNLVARIIHQQLALKYNLVESEVPYYKYVPDPVLDNGSITLYWDRSIITDRTIVANKPDIVVIDRLERRTVIVDIAVPHDENLVKAEKDKQTKYLDLAREVVDMWEVDTAVIVPIVVTANGLISKSLDQHLRRLSLGSWIKGLIQKAVLLDTARIVRRFLSQEP

SEQ ID NO: 10719 - protein, 1200 aa, Mythimna impura
MLTRAAARRARPPPPASSLSSASPPPEPCLTVSAVTPAVAAASSSSDEYYSPPTTPPPTRRRGERRPPACLGSRGPPASDRVPATGGCVSRMRWTQSINENVMRAYYGATEGGNNLTAYRVRMLSLFQVLEPAVNVSAQRLSDQVRVIQRNHMLDDTVLDRLRTEMGSHAIASSSQTVVPSQVSPPNHLSNHADEESTDMVTHVSTQCSNELRSALECAIREYRNMPLELRPRLPRLPMCNKNKALVAALDSQLSNYFDDCEDLTDTHSIMYCAAVAACRVAHVKFPNSDVATRPKPAVPAWQCRIERRIGGARALIGKLICFREGNTRPRVMRFVRRAFSGTDISPRDYMSCVTERIDFLKQKVYAWANRIRRYKRRVERYTQNRTFRSNERWVYRAWEQPDQGVADMRLPDDDAMSSFWRNIWSVPVSHTEGGWTREVERACEPIPEMGAITISPQDVARAVRPLSNWKSPGPDGLHNFWIKWLQRSHARLASQYQTALESGSLPEFLTTGVTHLLHKSGSTAEPKNYRPITCLPTVYKVLTSILRAKINHHVDNNAIMSASQNGCRNGSRGTKELLLIDMAIRQQVRRSRKDLSTCWIDYKKAYDSVPHTWLMRVLELYKIDATLRTFLMSCMRQWRTVLRYPGCRHIQRNSEPVRIERGIFQGDSLSPLWFCLALNPLSTLLENSGLGYRLKRDGQVISHLLYMDDLKLFAPNNLQLMELLKVTETFSSAIRMEFGVDKCAVMHVKRGEIVESVGTQLSDSINLRSLSPTETYKYLGMSEALGINATDMKQTLRERFFGRLKKVFNSLLSGGNKVRAFNGWVMPVLMYSFGVLKWTQTELDALDRRVRTLLTAYRMHHPRSSVMRLYIPRKCGGRGFLNAKTLHNREVCSLREYFLTADVGMHRDVVAVDKGLTPLSLANESWRKPVVLDTNDRREVWQSKELHGRFFRALHGPDVDQLASVAWLRVGDLFGETEGFVCAIMDEVIMTNNYRRFIVKDGTVDICRACHRPGESIRHIISGCSRLANGEYLHRHNLVARIIRQQLALNYSLVESEVPYYRYVPDPVLDNGDITLYWDRSIITDRTIVANKPDIVVVDRRERRTMIVDISVPHDENLVKAEKDKQIKYIDLAREVVDMWDVDSAIIVPIVVSANGLIAKSLDQHLRRLALGGWIKGLIQKAVLLDTARIVRRFLSLEP

SEQ ID NO: 10720 - protein, 1200 aa, Mythimna impura
MLTRAAARRARPPPPASSLSSASPPPEPCLTVSAVTPAVAAVSSSSDEYYSPPTTPPPTRQRGERRPPACLGSRGPPASDRVPATGGCVSRMRWTQSINENVMRAYYGATEGGNNLTAYRVRMLSLFQVLEPAVNVSAQRLSDQVRVIQRNHMLDDTVLDRLRTEMGSHAIASSSQTAVPSQVLASNHLPNHADEESTDMVTHVSTQCSNELRSALECAIREYRNMPLELRPRLPRLPMCNKNKALVAALDSHLSNYFDDCEDLTDTHSIMYCAAVAACRVAHVKFPNSDVATRPKPAVPAWQCRIERRIGGARALIGKLICFREGNTRPRVMRFVRRAFSGTDISPRDYMSCVTERIDFLKQKVYAWANRIRRYKRRVERYTQNRTFRSNERWVYRAWEQPDQGVTDTRLPDDDAMSSFWRNIWSVPVSHTEGGWTREVERACEPIPEMGAITISPQDVARAVRPLPNWKSPGPDGLHNFWIKWLQRSHARLASQYQTALESGSLPEFLTTGVTHLLHKSGSTAEPKNYRPITCLPTVYKVLTSILRAKINHHVDNNDIMSASQNGCRNGSRGTKELLLIDMAISQQVRRSRKDLSTCWIDYKKAYDSVPHTWLMRVLELYKIDTTLRTFLMSCMRQWRTVLRYPGCRHIQRNSEPVRIERGIFQGDSLSPLWFCLALNPLSTLLENSGLGYRLKRGGQVISHLLYMDDLKLFAPNNLQLMELLKVTETFSSAIRMEFGVDKCAVMHVKRGEIVESVGTQLSDSINLRSLSPTETYKYLGMSEALGINATDMKQTLRERFFGRLKKVFNSLLSGGNKVRAFNGWVMPVLMYSFGVLKWTQTELDALDRRVRTLLTAYRMHHPRSSVMRLYIPRKCGGRGFLNAKTLHNREVCSLSEYFLTADVGMHRDVVAVDKGLTPLSLANESWRKPVVLDTNDRREVWQSKELHGRFFRALHGPDVDQLASVAWLRVGDLFGETEGFVCAIMDEVIMTNNYRRFIVKDGTVDICRACHRPGESIRHIISGCSRLANGEYLHRHNLVARIIHQQLALNYSLVESEVPYYRYVPDPVLDNGDITLYWDRSIITDRTIVANKPDIVVVDRRERRTMIVDISVPHDENLVKAEKDKQIKYIDLAREVVDMWDVDSAIIVPIVVSANGLIAKSLDQHLRRLALGGWIKGLIQKAVLLDTARIVRRFLSLEP

SEQ ID NO: 10721 - protein, 1046 aa, Mythimna impura
MLDDAVLDRLRLESRSSRVSPASPQAAVQLQSNVSLRPDHVGEDDDDGAISVSNQCNVRLRSALEDAFREYRFTPAELRPQLPRLPMHKKNRALVCALDSQLSNCFDSSEDLTDTHSILYCAAVAACRVARVKFPNSDRVTRPAVPAWQCRIERRIGEARALIGKLICFREGNTRPRVMRFVRRAFSGTNISPRDYLPHITERIDFLKQKVYAWANRIRRYKRRVERYTQNRTFQRNERWVYRAWERPDQGVIDTRLPDDDAMCSFWRSIWSVPVSHTEGDWTREIERTCDLIPEMEPITISPQDVARAVRPLPNWKSPGPDGLHNFWLKWFQRSHARLASQFQSALESGSLPQFLTTGITHLLHKSGSTAEPKNYRPITCLPTVYKVLTSILRAKINSHIETNSIMSASQNGCRNGSRGTKELLLIDVAISQQVRRSRRDLSTCWIDYKKAYDSVPHTWLMRVLELYKVDATLRTFLMSCMRQWRTALHYPGCRQIRESSEPIRIERGIFQGDSLSPLWFCLALNPLSTLLEGSGLGYRLKRGGQVISHLLYMDDLKLFASNNLQLMELLKVTETFSSAIRMEFGLDKCAVMHVKRGEIMESVGTQLSDSIYIRSLCSTETYKYLGMSEALGINAADMKQSLRERFFGRLNKVLNSLLSGGNKVRAFNGWVMPVLMYSFGILKWTQTELDALDRRVRSLLTANRMHHPRSSVMRLYIPRKCGGRGFLNAKTLHNREICSLREYFLKTDVGMHRDVVAVDKGLTPLSLVNENWRKPTVMDTNERRAVWQGKELHGRFYRALHGPDVDLLASVSWLRFGDLFGETEGFVFAIMDEVMMTNNYRKYIVKDGTVDICRACHRPGESIRHIISGCSHLANGDYLHRHNLVARIIHQQLALKYNLVESEVPYYRYVPDPVLENGSVTLYWDRSIITDRTIVANKPDIVVIDRLERRTMIVDIAVPHDENLVKAEKDKQTKYLDLAREVVDMWEVDRAVIVPIVVTANGLIAKSLEKHLRRLSLGSWIKGLIQKAVLLDTARIVRRFLSQEP

SEQ ID NO: 10722 - protein, 1200 aa, Mythimna impura
MLTRSRAQKLHTHPTSSGSSLSSASQPPGPAPTVSPEIPVAAVASSSSDEYFSPPTTPPPARRRGRGRPPASLGPRGPPASDRVPAAGGSVQRMRWTSSINENVMRSYFGATEGGINLTAYRGRMLSLFQVLEPAVNVSVQRLSDQVRVIQRNRMLDDAVLDRLRLESQSRRVSPATTPAAVQRLPTASPRPVQVGDADDDAAISVSTQCNDRLRGALEDAFREYRSTPPGLRPRLPRLPMHKRNRALVCALDSQLSNCFDSSKDLTDTHSILYCAAVAACRVAHVKFPNCDRATRPAVPAWQCRIEHRIGEARALIGKLICFREGNTRPRVMRFVRRAFSGTDISPRDYLPCVTERIDFLKQKIYAWANRIRRYKRRVERYTRNRTFQSNERWVYRDWERSDQGVTDTRLPDDDAMCSFWRSIWSAPVSHTEGDWIREVERACDLLPEMGAITISPQDVARAVRPLPNWKSPGPDGLHNFWVKWFQRSHARLASQFQSALESGSLPQFLTTGITHLLHKSGSTAEPKNYRPITCLPTVYKVLTSILRAKINSHIETNSIMSASQNGCRNGSRGTKELLLIDIAISQQVRRSRKNLSACWIDYKKAYDSVPHTWLMRVLELYKVDATLRTFLMSCMGQWRTVLHYPGCRQIQENNEPIRIERGIFQGDSLSPLWFCLALNPLSTLLEGSGLGYRLKRGGQVISHLLYMDDLKLFAPNNLQLVELLKVTETFSSAIRMEFGVDKCAIIHVKRGEIMESVGIQLSDSIHLRSLCSTETYKYLGMSESLGINTDDVKQSLKERFFGRLNKVLNSLLSGGNKVRAFNGWVMPVLMYSFGILKWTQTELDALDRRVRTLLTANRMHHPRSSVMRLYIPRKCGGRGFLNAKTLHNREVCSLREYFLKTDVGMHRDVVAVDKGLTPLSLANENWRKPIVLDTNDRREVWQSKELHGRFYRALHGPDVDLLASVSWLRFGDLFGETEGFVFAIMDEVMMTNNYRKYIVKDGTVDICRACHRPGESIRHIISGCSHLANGDYLHRHNLVARIIHQQLALKYNLVESEVPYYRYVPDPVLDNGNITLYWDRSIITDRTIVANKPDIVVIDRLERRTMIVDIAVPHDENLVKAEKDKQTKYLDLAREVVDMWEVDRAIIVPIVVTANGLIAKSLEQHLRRLSLGSWIKGLIQKAVLLDTARIVRRFLSQEP

SEQ ID NO: 10723 - protein, 1198 aa, Phlogophora meticulosa
MLTRSAARRARPPPPASSLSSASSPPKPSTIVSTVKPAVPVASSSSDEYFSPPTSPPPARRRRGRRPPDGLGPRGPPASDRVPAPGGSVQRMRWTQSINENVMRSYYGATEGGSNLTAYRVRMLSLFQVLEPAVNVSAQRLSDQVRVIQRNHMLDDVVLDRLRTEMQSSRVITSPSHTVVPPQYNIVLSSFADGEGSDKVTNVSTQYNEELRSALEGAIREYRFMLPALRPRLPRLPMHNKNRALVAALDSQLSNYFDNCDDLTDAHSILYCAAVAACRVAHVKFPNDIATRPKPAVPAWQCRIERRIAGARALIGKLVCYREGNTRPRVMRYVRRAFLGTDISPRDYMSRVTERIDFLKQKVYAWASRIRRYKRRVERYTQNRTFQSNERWVYRAWERPVQGVTDTHLPDDDVMCSFWRNIWSMPVSHTEGDWTREVERACDPIPQMGAITISPEDVARAVRPLPNWKSPGPDGLHNFWIKWLQKSHARLASQFQSALETGSLPQFLTTGITHLLHKSGSTAEPKNYRPITCLPTVYKVLTSILRVKINNHIDSNSIMSASQNGCRNGSRGTKELLLIDTAISQQVRRSRKDLSTCWIDYKKAYDSVPHTWLKRVLELYKVDATLRTFLTSCMGQWRTVLRYPGCRQIQRNSEPIRIERGIFQGDSLSPLWFCLALNPLSTLLEDSGLGYRLKRGGQVVSHFLYMDDLKLFAPSDLQLMELLKVTKTFSSAIRMEFGVDKCAVMHVKRGKIVESVGTQLPDFINFRALSPIETYKYLGMSQALGINAADMKQSLKERFFGRLKKVCNSLLSGGNKVRAFNGWVMPVLMYSFGILKWTQTELDALDRRVRTFLTASRMHHPRSSVMRLYIPRKCGGRGFLNAKTLHNREICSLRDYFLETDVGMHRDVVAVDQGLTPLSLAKENWRKPVVLDTNDRKEVWQSKELHGRFFQALHGPDVDQLASVSWLRFGDLFGETEGFVCAIMDEVIMTNNYRRFIVKDGTVDICRACHRPGESIRHIISGCSRLANEEYLHRHNLVARIIHQQLALKYSLVESEVPYYKYVPDPVLENGSVTLYWDRSIITDRTIVANKPDIVVMDRIERRATIIDVTVPHDGNLVKAEKDKQIKYLDLAREVVDMWDVDSAIVVPIVVSANGLIAKSLDQHLRRLALGSWIKGLIQKAVLLDTARIVRRFLSLEP

SEQ ID NO: 10724 - protein, 1198 aa, Phlogophora meticulosa
MLTRSAARRARPPPPASSLSSASSPPKPSTIVSTVKPAVPVASSSSDEYFSPPTSPPPARRRRGRRPPDGLGPRGPPASDRVPAPGGSVQRMRWTQSINENVMRSYYGATEGGSNLTAYRVRMLSLFQVLEPAVNVSAQRLSDQVRVIQRNHMLDDVVLDRLRTEMQSSRVITSPSHTVVPPQYNIVLSSFADGEGSDKVTNVSTQYNEELRSALEGAIREYRFMLPALRPRLPRLPMHNKNRALVAALDSQLSNYFDNCDDLTDAHSILYCAAVAACRVAHVKFPYDIATRPKPAVPAWQCRIERRIAGARALIGKLVCYREGNTRPRVMRYVRRAFLGTDISPRDYMSRVTERIDFLKQKVYAWASRIRRYKRRVERYTQNRTFQSNERWVYRAWERPVQGVTDTHLPDDDVMCSFWRNIWSVPVSHTEGDWTREVERACDPIPQMGAITISPQDVARAVRPLPNWKSPGPDGLHNFWIKWLQKSHARLASQFQSALETGSLPQFLTTGITHLLHKSGSTAEPKNYRPITCLPTVYKVLTSILRVKINNHIDSNSIMSASQNGCRNGSRGTKELLLIDTAISQQVRRSRKDLSTCWIDYKKAYDSVPHTWLKRVLELYKVDATLRTFLTSCMGQWRTVLRYPGCRQIQRNSEPIRIERGIFQGDSLSPLWFCLALNPLSTLLEDSGLGYRLKRGSQVVSHLLYMDDLKLFAPSDLQLMELLTVTKTFSSAIRMEFGVDKCAVMHVKRGKIVESVGTQLPDFINFRALSPIETYKYLGMSEALGINAADMKQSLKERFFGRLKKVCNSLLSGGNKVRAFNGWVMPVLMYSFGILKWTQTELDALDRRVRTFLTASRMHHPRSSVMRLYIPRKCGGRGFLNAKTLHNREICSLRDYFLETDVGMHRDVVAVDQGLTPLSLAKENWRKPVVLDTNDRKEVWQSKELHGRFFQALHGPDVDQLASVSWLRFGDLFGETEGFVCAIMDEVIMTNNYRRFIVKDGTVDICRACHRPGESIRHIISGCSRLANEEYLHRHNLVARIIHQQLALKYSLVESEVPYYKYVPDPVLENGSVTLYWDRSIITDRTIVANKPDIVVMDRIERRATIIDVTVPHDGNLVKAEKDKQIKYLDLAREVVDMWDVDSAIVVPIVVSANGLIAKSLDQHLRRLALGSWIKGLIQKAVLLDTARIVRRFLSLEP

SEQ ID NO: 10725 - protein, 1202 aa, Phlogophora meticulosa
MLTRSRARVLNAPTTSSGSSLSSASQLPGPAPDVSPVTPAAAVASSSSDEYYSPPTSPPPVRRCGRGRPPASLGLRGPPASARVPASGGSVQRMRWTQSINENVMRSYYGATEGGTNLTAYRGRMLSLFQVLEPAVNVSAQRLSDQVRVIQRNHMLDDAVLDRLRLNSRSNRVTPASPPVAVQLQNLPSVSPRPDYVGEEDDDAAISVSSQCNVRLRSALEDAFREYRSTPPGLRQRLPRLPMHKKNKALMSALDSLLSNSFDSSRDLADTHSILYCAAVAACRVANVKFPNSVRSTRPAIPAWQCRIERRIGEARVLIGKLICFREGNTRPRVMRFVRRAFSGTDISSRDYLTRVTERIDFLKQKICAWANRIRRYKRRVERYTQNRTFRSDERWVYRTWERPDQGVTDTFLPDDEAMCLFWRSIWSVPVSHTEGDWTREVERMCEPLPEMGAINISPQDVACAVRPLPNWKSPGSDGLHNFWIKWLKSSHARLASQFQSALESGSLPQFLTTGITHLLHKSGSTAEPKNYRPITCLPTDYKVLTSILRSKINNHIDSTSIMSVSQNGCKNGSRGTKELLLIDMAISQQVRRSRKDLSTCWIDYKKAYDSVPHTWLMRVLELYKIDATLRTFLKSCMGQWRTVLHYPGCRQFQENSEPIRIERGIFQDDSLSPLWFCLALNPLSTLLEGSGLGYRLRRGGQVISHLLYMDDLKLFAHNNLQLMKLLKVTETFSSAIRMDFGVDKCAVMHVKRGGIVESAGTQLSDSIYLRSLSSTETYKYLGMSEALGINTADMKQSLKERFFGRLNKVLNSLLSGGNKVRAFNSWVMPVLMYSFGILKWTQTELDALDRRVRTLLTANRMHHPRSSVMRLYISRKCGGRGFLNAKTLHNREVCSLREYFLEADVGMHRDVVAMDKALTPLSLANENWRKPIVLDTTDRMEIWKSKELHGRFYRVLHGPDVDLSASVSWLRFGDLFGETEGFVCAIMDEVIMTNNYRKYIVKDGTVDICRACHRPGESIRHIISGCSRLANGDYLHRHNLVAKIIHQQLALKYNLVESEVPYYKYVPDPVLENGNITLYWDRSIITDRTIVANKPDIVVIDRSDRRTMIVDITVPHDENLVKAEKEKQIKYLDLAREVVDMWDVNTAVIVPIVVTANGIIAKSLDQHLRRLSLGSWIKGLIQKAVLLDTARIVRRFLSQEP

SEQ ID NO: 10726 - protein, 1199 aa, Laspeyria flexula
MLTRARKREALIPPPDSSLSVASQPPDPVPTTPLTAEAGSSSSSDEYFSPPSSPTPVPRRGRGRPPASLGPRGPPAVNRAPAAGGNVQRMRWSSSVNENVMRAYFAATEGGINLTAYRSRMLALFQDLEPTTKVTAQRLSDQVRAIQRCRMLDDTVLDRLRLECLQNNPTVPLQVNNLNNIISNAITIQADHNLEEVDGISSVDTQCNEEVRVALERALREYRFTSLQFRPRLPRLPMHKKNLALVITLDSLLSDYFDNSENLGDTHSILYCAAVAACRLAGVKFLGIEPPSHERPSTPAWQCRIERRIAGARILIGKLISFRAGNTRPRVMRFVNQAFSGTDVSPNEYLSRVTERIDFLKQKVYAWANRIRRFKKRVDRYTVNRLFQRDQRRVYRNWERPTQEVSDERLPNATATNEFWSSIWSEPVLHSEGEWIWDVERACERIPLMESVVISAEDIASAVRPMANWKSPGPDGLHNFWLRWLRSSHGRLASQFQSALESGSLPEFLTTGCTHLLHKSGSVTEPGNYRPITCLPSVYKLLTSVLRAKITKHIDDTRTMSISQNGCRRGSRGTKELLLVDMTISQQVRRSRKDLATCWIDYKKAFDSVPHSWLLRVLELYKVDITLRTFLESCMRQWRTVLTYPGCRLICGNGEPVRIKRGIFQGDSLSPLWFCLALNPLSTLLESSGLGYRLRRGGHVISHLLYMDDLKLIAPTDLQLKGLLKATEDFSKSIKMDFGVDKCAIMHVKRGEIVESDGIQLSDSINFRSLLVTDTYKYLGMSQALGIKETDMKQSLQERFFGRLKKVLNSLLSGGNKVRACNGWVMPLLMYSFGILKWTQTELDTLDRRVRTMLTAYRMHHPRSSVMRLYIPRKCGGRGFLNAKTLHNREVYNLREYFMGKDEGMHRDVVAVDSGLTPLSLAKDNWRRPIVLSTDDRRQVWQSKELHGRFYKALHGPDVDRVASVAWLRFGDLFGETEGFACAIADEVIKTNNYRKYILRDGTVDICRACHRPGESLRHIVSGCSRLANGEYLHRHNQVARIIHQQLALRYKLVDVEVPYYRYAPEPVLENSHTTLYWDRSIITDRTVIANKPDIVILDRSKRLAVIVDITVPHDENLVKAEKDKQTKYLDLAHEIVDMWDVDSAIIVPIVVTVNGLVAKSLDQHLKRLGLGSWLKGLIQKAVLLGTARIVRRFLSLEP

SEQ ID NO: 10727 - protein, 1198 aa, Xestia xanthographa
MLTRSAAARRARLPPPDSSLSSASPPPEPSPIVSAVTPAVAVASSSSDEYFSPPTTPPPARRRGGRRPPDGLGPRGPPASDRVPAPGGSVQRMRWTQSINENVMRAYYGATEGGNNLTAYRVRMLSLFRVLEPAVNVSAQRLSDQVRVIQRNRMLDDTVLDRLRTEIQSSHVIATPSQAVVPPQSSIIPNCDNDVGNDMVTNVSTQCNVEMRSALEGAIREYRFMQPDLRPRIPRLPMHNKNRALVAVLDSQLSNYFDNCEDLTDVHSILYCAAVAACRVAHVKFPSDRATRPKPAVPAWQYRIERRIGGARALIGKLVCFREGNTRPRVMRFVRQAFSGTDISPRDYMSRVTERIDFLKQKVYAWANRIRRYKRRVDRYTQNRTFQKDERWVYRAWERPDQGVADTHLPDDDAMCSFWRSIWSVPVSHAEGEWTRVIERACDPVSEMGAITISPQDVARAVRPLPNWKSPGPDGLHNFWIKWFTRSHARLATLFQSALESGSLPEFLTTGITHLLHKSGSTAEPKNYRPITCLPTVYKVLTSILRTKISKHVDDNSVISASQNGCRNGSRGTKELLLIDMAISHQVRRSRKDLSTCWIDYKKAYDSVPHTWLMRVLELYKVDATLRTFLMSCMGQWRTVLRYPGCRQIQRNSEPIRIERGIFQGDSLSPLWFCLALNPLSTLLEDSGLGYRLRKDGQVISHLLYMDDLKLFAPNDLQLMELLKVTDTFSSAIRMEFGVDKCAVMHVKRGEIVESVGTQLSDSITLRSLSATETYKYLGMSEELGVNVADMKQSLKERFFGRLKKVFNSLLSGGNKVRAFNGWVMPVLMYSFGILKWTQTELDALDTKVRKLLTAYRMHHPRSSVMRLYIPRKCGGRGFLNAKTLHNREICSLREYFLGTDVGMHRDVVTVDKGLTPLSLAKENWRKPPVLDTNDRREVWQSKELHGRFFRALHGPDVDLPASVAWLRSGDLFGETEGFVCAIMDEVMMTNNYRRFIVKDGTVDICRACHRPGETIRHIISGCSRLANGEYLHRHNLVARIIHQQLALKYNLVESEVPYYRYVPDPVLDNGCITLYWDQSIITDRTIVANKPDIVVVDRSERRAMIVDITVPHDENLVKAEKDKQIKYLDLAREVVDMWKVDSAIIVPIVVSAHGLIAKSLDQYLRRLSLGSWIKGLIQKAVLLDTARIVRRFLSLEP

SEQ ID NO: 10728 - protein, 1198 aa, Xestia xanthographa
MLTRSAAARRARLPPPDSSLSSASPPPEPSPIVSAVTPAVAVASSSSDEYFSPPTTPPPARRRGGRRPPDGLGPRGPPASDRVPAPGGSVQRMRWTQSINANVMRAYYGATEGGNNLTAYRVRMLSLFQVLEPAVNVSAQRLSDQVRVIQRNRMLDDTVLDRLRTEIQSNHVIATPSQAVVPPQSSIIPNCDNDVSNDMVTNVSTQCNVEMRSALEGAIREYRFMQPDLRPRIPRLPMHNKNRALVAVLDSQLSNYFDNCEDLTDVHSILYCAAVATCRVAHVKFPSDRATRPKPAVPAWQYRIERRIGGARALIGKLVCFREGNTRPRVMRFVRQAFSGTDISPRDYMSRVTERIDFLKQKVYAWANRIRRYKRRVDRYTQNRTFQKDERWVYRAWERPDQGVADTHLPDDDAMCSFWRSIWSVPVSHAEGEWTRVIERACDPISEMGAITISPQDVARAVRPLPNWKSPGPDGLHNFWIKWFTRSHARLATLFQSALESGSLPEFLTTGITHLLHKSGSTAEPKNYRPITCLPTVYKVLTSILRTKISKHIDDNSVMSASQNGCRNGSRGTKELLLIDMAISHQVRRSRKDLSTCWIDYKKAYDSVPHTWLMRVLQLYKVDATLRTFLMSCMGQWRTVLHYPGCRQIQRNSEPIRIERGIFQGDSLSPLWFCLALNPLSTLLEDSGLGYRLRKDGQVISHLLYMDDLKLFAPNDLRLMELLKVTETFSNAIRMEFGVDKCAVMHVKRGEIVESVGTQLSDSITLRSLSATETYKYLGMSEALGVNVADMKQSLKERFFGRLKKVLNSLLSGGNKVRAFNGWVMPVLMYSFGILKWTQTELDALDTKVRKLLTAYRMHHPRSSVMRLYIPRKCGGRGFLNAKTLHNREICSLREYFLGTDVGMHRDVVTMDKGLTPLSLAKENWRKPPVLDTNDRREVWQSKELHGRFFRALHGPDVDLSASVAWLRSGDLFGETEGFVCAIMDEVMMTNNYRRFIVKNGTVDICRACHRPGESIRHIISGCSRLANGEYLHRHNLVARIIHQQLALKYNLVESEVPYYRYVPDPVLDNGCITLYWDQSIITDRTIVANKPDIVVVDRSERRAMIVDITVPHDENLVKAEKDKQIKYLDLAREVVDMWEVDSAIIVPIVVSAHGLIAKSLDQYLRRLSLGSWIKGLIQKAVLLDTARIVRRFLSLEP

SEQ ID NO: 10729 - protein, 1045 aa, Xestia xanthographa
MLDDTVLDRLRTEIQSNHVIATPSQAVVPPQSSIIPNCDIDVSNDMVTNVSTQCNVEMRSALEGAIREYRFMQPDLRPRIPRLPMHNKNRALVAVLDSQLSNYFDNCEDLTDVHSILYCAAVAACRVAHVKFPSDRATRPKPAVPAWQYRIERRIGGARALIGKLVCFREGNTRPRVMRFVRQAFSGTDISPRDYMSRVTERIDFLKQKVYAWANRIRRYKRRVDRYTQNRTFQKDERWVYRAWERPDQGVADTHLPDDDAMCSFWRSIWSVPVSHAEGEWTRVIERACDPISEMGAITISPQDVARAVRPLPNWKSPGPDGLHNFWIKWFTRSHVRLATLFQSALESGSLPEFLTTGITHLLHKSGSTAEPKNYRPITCLPTVYKVLTSILRTKISKHIDDNSVMSASQNGCKNGSRGTKELLLIDMAISHQVRRSRKDLSTCWIDYKKAYDSVPHTWLMRVLELYKVDATLRTFLMSCMGQWRTVLRYPGCRQIQRNSEPIRIERGIFQGDSLSPLWFCLALNPLSTLLEDSGLGYRLRKDGQVISHLLYMDDLKLFAPNDLRLMELLKVTETFSNAIRMEFGVDKCAVMHVKRGEIVESVGTQLSDSITLRSLSATETYKYLGMSEALGVNVADMKQSLKERFFGRLKKVLNSLLSGGNKVRAFNGWVMPVLMYSFGILKWTQTELDALDTKVRKLLTAYRMHHPRSSVMRLYIPRKCGGRGFLNAKTLHNREICSLREYFLGTDVGMHRDVVTMDKGLTPLSLAKENWRKPPVLDTNDRREVWQSKELHGRFFRALHGPDVDLSASVAWLRSGDLFGETEGFVCAIMDEVMMTNNYRRFIVKDGTVDICRACHRPGESIRHIISGCSRLANGEYLHRHNLVARIIHQQLALKYNLVESEVPYYRYVPDPVLDNGCITLYWDQSIITDRTIVANKPDIVVVDRSERRAMIVDITVPHDENLVKAEKDKQIKYLDLAREVVDMWEVDSAIIVPIVVSAHGLIAKSLDQYLRRLSLGSWIKGLIQKAVLLDTARIVRRFLSLEP

SEQ ID NO: 10730 - protein, 1204 aa, Cosmia trapezina
MMQTRAKTRIQAHPPSPDSSLSSASQPVRASTVSAVSPVAAVASSSSDEFFSPPSSPTPPRRRGRGRPPAGLGPRGQPAPNRVPAAGGNVSRMRWTQSINENVMRAYYGATEGGINLTAYRGRMLSLFQVLEPAVNVSAQRLSDQVRVIQHNHRLDNATLDRLRSEMQSSSASNPPPSQHVMHVPAEIPLRANQRDEEENARAISADNLCNVEIRSALEDAIREYRFTSPDLRPRLPRLPMNKKNRALVCALDALLPNFIESSADLCDTHSILYCTAVAACRVACVKFPNTDRATRPKPAAPAWQCRIERRINEARVLIGKLICFREGNTRPRVMRFVRRAFSGTNVSPQEYVSRVTERIDFLKQKVYAWANRIRRYRRRVDRYSQNRMFQSDERWVYRAWERPIPTQGVTDVRPPDNETMSAFWRSIWSVPVSHTEGDWMRIVEQACDSIPNMDAVTISPLDVACAVRPLPNWKSPGPDGLHNFWIKWLQRSHACLASQFQSSLETGSLPLLFTTGVTHLLHKSGSTAEPKNYRPITCLPTVYKVLTSILRAKIAHHIYNNSIMSVSQNGCRNGSRGTKELLLIDMTISQQVRRSRKDLSTCWIDYKKAYDSVPHTWLIRVLELYKIDATLRTFLMSCMGQWKTVLLYPGCRRIPGIDEPIRIERGIFQGDSLSPLWFCLALNPLSTLLEDSGLGYRLRRGGQVISHLLYMDDLKLFAPNNLRLMELLKVTENFSSAIRMEFGVDKCAVMHVKRGEIMESVGTQLSDSIHLRSLSSTETYKYLGMSEALGINVADMKQSLKERFFGRLKKVFNSLLSGGNKVRAFNGWVMPVLMYSFGVLKWTQTELDALDRRVRTLLTAYRMHHPRSSVMRLYIPRKCGGRGFLNAKTLHNREICSLREYFLEADVGMHRDVVAVDKGLTPLSLAKENWRKPAVLDTNDRREVWQGKELHGRFFRALHGPDVDFLASVSWLRFGDLFGETEGFVCAIMDEVIMTNNYRKYIVKDGTVDICRACHHPGESIRHIVSGCSRLANGEYLHRHNLVARIIHQQLALQYNLVESEVPYYRYVPDPVLENGQATLYWDRSIITDRTIVANKPDIVVIDRRERRAIIVDIAVPHDENLVKAEKDKKIKYLDLAHEVVDMWDVDSAIIVPIIVTVNGLIAQSLDQHLRRLSLRGWIKGLIQKAVLLDTARIVRRFLSLEP

SEQ ID NO: 10731 - protein, 1205 aa, Cosmia trapezina
MLTRSRAQHLRNTHPTSSGSSLSSASQLPEPAPDVSQVIPAAAVASSSSDEYFSPLTTPPPVRRRGRGRPPASLGPRGPPASDRVPAPGGSVQRMRWTQTVNENVMRAYFGATEGGSNLTAYRGRMLSLFQVLEPAVNVSAQRLSDQVRVIQRNHMLDDVVLDRLRLESRNSRVTSDSPMVAVQLQNLPSASPRPDRVGEEDDSGAISVSSQCNVQLKSALEDAFREYRSTPPGLRPRLPRLPMHKKNKALVCALDSQLSNCFDGSKDLADTHSILYCAAVAACRVAHVKFHNNDRVTRPKPAVPTWQCRIERRIGEARALIGKLICFREGNTRPRVMRFVRRAFSGMDISPRDYLTCVTERIDFLKQKICAWANRIRRYRRRVERYTQNRTFQSDERWVYRAWERRDQGVADTQLPDDDAMCSFWRSIWSVPVSHTEGDWTREVERACDHIPQMGALTISPQDVARAVRPLPNWKSPGPDGLHNFWIKWFQRSHARLASQFQSALQSGSLPQFLTTGITHLLHKSGSTAESRNYRPITCLPTVYKVLTSILRAKINKHIDTNSIMSASQNGCGNGSRGTKELLLIDMTISQQVRRSRKDLSTCWIDYKKAYDSVPHTWLMRVLELYKIDATLRTFLMSCMGQWRTVLRYPGCRNIQRNSEPIRIERGIFQGDSLSPLWFCLALNPLSTLLEDSGLGYRLRRDGQVISHLLYMDDLKLFAPNNLQLMELLKVTETFSSAIRMEFGVDKCAVMHVKRGEIVESVRTQLSDSIHLRSLSSLETYKYLGMSEALGINAADMKQSLRERFFGRLNKVLNSLLSGGNKVRAFNGWVMPVLMYSFGILKWTQTELDALDRRVRTLLTANRMHHPRSSVMRLYIPRKCGGRGFLNAKTLHNREVCSLREYFLEADVGMHREVVSVDKGLTPLSLANENWRKPIVLDTNDRREVWQSKELHGRFYRVLHGPDVDFLASVSWLRFGDLFGETEGFVFAIMDEVMMTNNYRKYIVKDGTVDICRACHRPGESIRHIISGCSRLANGDYLHRHNLVARIIHQQLALKYSLVESEVPYYRYVPDPVLENGNITLYWDRSIITDRTIVANKPDIVVIDRLERRTVIVDIAVPHDENLVKAEKDKQIKYLDLAREVVDMWDVDTAIIVPIVVTANGIIAKSLDQHLRRLSLGGWIKGLIQKAVLLDTARIVRRFLSQQP

SEQ ID NO: 10732 - protein, 961 aa, Mamestra brassicae
MHNKNRALVAALDSQLSNYFDDCEDLTDTHSIMYCAAVAACRVAHVKMSNDRVTRPKPAVPAWQCRIERRIGGARALIGKLICFREGNTRPRVMRFVRRAFSGTDISPRDYMSRFTERIDFLKQKVYAWANRIRRYRRRVERYTQNRTFRSNERWVYRVWEQPDQGVTDTRLPDDDAMCSFWRNIWSVPVSHTEGDWIRGVERACDPLPEMGAITISPQDVARAVRPLPNWKSPGPDGLHNFWIKWLQRSHARLASQYQTVLESGSLPEFLTTGVTHLLHKSGSTAEPKNYRPITCLPTVYKVLTSILRAKINNHINSNNIMSVSQNGCRNGSRGTKELLLIDMAISQQVRRSRKDLSTCWIDYKKAYESVPHTWLMRVLELYKIDTMLRTFLMSCMGQWRTVLRYPGCRNIQRNSEPVKIERGIFQGDSLSPLWFCLALNPLSTLLENSGLGYRLKRGGQVISHLLYMDDLKLFASSNLQLMELLKVTETFSSAIRMEFGVDKCAVMHVKRGEIMESVGTQLSDSINLRSLSSTETYKYLGMSEALGINVTDMKQSLKERFFGRLKKVFNSLLSGGNKVRAFNGWVMPVLMHSFGVLKWTQTELDALDRRVRTLLTAYRMHHPRSSVMRLYIPRKCGGRGFLNAKTLHNREICSLREYFLAVDVGMHRDVVAVDKGLTPLSLANENWRKPAVLDTNDRRAVWQSKELHGRYFRALHGSDVDQLASVAWLRFGDLFGETEGFVCAIMDEVIMTNNYRRFIVKDGTVDICRACHRPGESIRHIVSGCSRLANGEYLHRHNLVARIIHQQLALKYSLVESEVPYYRYAPDPVLDNGNITLYWDRSIITDRTIVANKPDIVVVDRIERRAMIVDITVPHDENLVKAEKDKQIKYIDLAREVVDMWDVDSAIIVPIVVSANGLIATSLDQHLRRLSLGSWIKGLIQKAVLLDTARIVRRFLSLEP

SEQ ID NO: 10733 - protein, 1200 aa, Mamestra brassicae
MLTRSRARAQTAQPTSSGSSLSSASQPPGPAPAVSPEIPVAAVASSSSDEYFSPPTTPPPARRRGRGRPPTSLGPRGPPASDRVPAIGGSVQRMRWTQTIDENVMRSYYGATEGGTNLTAYRGRMLSLFQVLEPAVNVSAQRLSDQVRVILRNRMLDDAVLDRLRLESRSGRVSPASPPAAVQIQSSISPRSNNVGEDDDDGAISVSTQCNERLRSALEDAFREYRSTPPELRPRLPRLPMHNKNRALVCALDSQLTNCFDSSEDLADTHSILYCAAAAACRVAHVKFLNSDRATRPAVPAWQCRIERRIGEARALIGKLICFREGNTRRRVMRFVRRAFSGTDTSPRDYLTRVTERIDFLKQKIYAWANRIRRYKRRVERYTQNRTFQSNERWVYRAWERPDQGVTDTRLPDDDVMCSFWRNIWSVPVSHTEGDWIREVERACDPILEMGATTISPQDVARAVRPLPNWKSPGPEGLHNFWIKWFTGSHARLASQFQSALESGSLPQFLTTGITHLLHKSGSTAEPKNYRPITCLPTVYKVLTSILRAKINHHIESNSIMSASQNGCRNGSRGTKELLLMDIAISQQVRRSRKDLSTCWIDYKKAYDSVPHTWLMRVLELYKVDAVLRTFLMSCMGQWRTVLRYPGCRQIQVNGDPIRIERGIFQGDSLSPLWFCLALNPLSTLLEGSGQGYRLRRGGQVISHLLYMDDLKLFAPNNLQLMELLKVTETFSSAISMEFGVDKCAVMHVKRGEIMESVGTQLSDSIHLRSLSSTETYKYLGMSEALGINANDMKQSLKERFFGRLNKVLNSLLSGGNKVRAFNGWVMPVLMYSFGILKWTQTELDALDRRVRSLLTANRMHHPRSSVMRLYIPRKCGGRGFLNAKTLHNREICSLREFFLEADVGMHRDVVAVDKGLTALSLANENWRKPVVLDTNDRREVWQSKELHGRFYRVLHGPDVDFLASVAWLRFGDLFGETEGFVCAIMDEVMMTNNYRKYIVKDGTVDICRACHRPGESIRHIISGCSSLANGDYLHRHNLVARIIHQQLALKYNLVESEVPYYRYVPDPVLENGNCTLYWDRSIITDRTIVANKPDIVVIDRLERRAMIVDIAVPHDENLVKTEKDKQTKYLDLAREVVDMWDVNTAVIVPIVVTANGIIAKSLDQHLKRLSLGSWIKGLIQKAVLLDTARIVRRFLSQGP

SEQ ID NO: 10734 - protein, 1104 aa, Mamestra brassicae
MRWTQSINENVMRSYFGATEGGTNLTAYRGRMLSLFQVLEPAVNVSAQRLSDQVRVIQRNRMLDDSVLDRLRMEMCSHVITPPSQTVSPPQSQISSHADEESNDRVTNVSTQCNEELRSALECAIREYRYILPELRPRLPRLPMHNKNRALVAALDSQLSNYFDDCEDLTDTHSIMYCAAVAACRVAHVKMTNDRVTRPKPAVPAWQCRIERRIGGARALIGKLICFREGNTRPRVMRFVRRAFSGTDISPRDYMSRVTERIDFLKQKVYAWANRIRRYRRRVERYTQNRTFRSNERWVYRVWEQPDQGVTDTRLPDDDAMCSFWRNIWSVPVSHTEGGWIREVERACDPLPEMGAITISPQDVARALRPLPNWKSPGPDGLHNFWIKWLQRSHARLASQYQTALESGSLPEFLTTGVTHLLHKSGSTAEPKNYRPITCLPTVYKVLTSILRAKINNHINSNNIMSVSQNGCRNGSRGTKELLLIDMAISQQVRRFRKDLSTCWIDYKKAYDSVPHTWLMRVLELYKIDTMLRTFLMSCMGQWRTVLRYPGCRNIQRNSEPVRIERGIFQGDSLSPLWFCLALNPLSTLLENSGLGYRLKRGGQVISHLLYMDDLKLFAPSNLQLMELLKVTETFSSAIRMEFGVDKCAVMHVKRGEIMESVGTQLSDSINLRSLSSTETYKYLSMSEALGINVTDMKQSLRERFFGRLKKVFNSLLSGGNKVRAFNGWVMPVLMHSFGVLKWTQTELDALDRRVRTLLTAYRMHHPRSSVMRLYIPRKCGGRGFLNAKTLHNREICSLREYFLAVDVGMHRDVVTVDKGLTPLSLANENWRKPAVLDTNDRRAVWQSKELHGRFFRALHGPDVDQLASVAWLRFGDLFGETEGFVCAIMDEVIMTNNYRRFIVKDGTVDICRACHRPGESIRHIVSGCSRLANGEYLHRHNLVARIIHQQLALKYSLVESEVPYYRYAPDPVLDNGNITLYWDRSIITDRTIVANKPDIVVVDRIERRAMIVDITVPHDENLVKAEKDKQIKYIDLAREVVDMWDVDSAIIVPIVVSANGLIATSLDQHLRRLSLGSWIKGLIQKAVLLDTARIVRRFLSLEP

SEQ ID NO: 10735 - protein, 960 aa, Mamestra brassicae
MHNKNRALVCALDSQLTNCFDSSEDLADTDSILYCAAAAACRVAHVKFSNSDRATRPAVPAWQCRIERRIGEARALIGKLICFREGNTRRRVMRFVRRAFSGTDTSPRDYLTRVTERIDFLKQKIYAWANRIRRYKRRVERYTQNRTFQSNERWVYRAWERPDQGVTDTRLPDDDVMCSFWRNIWSVPVSHTEGDWTREVERACDPIPEMGAITISPQDVAHAVRPLPNWKSPGPDGLHNFWIKWFKRSHARLASQFQSALESGSLPQFLTTGITHLLHKSGSTAEPKNYRPITCLPTVYKVLTFILRAKINHHIETNSIMSASQNGCRNGSRGTKELLLIDVAISQQVRRSRRDLSTCWIDYKKAYDSVPYTWLMRVLELYKVDAVLRTFLMSCMGQWRTVLCYPGCRQIQANSDPIRIERGIFQGDSLSPLWFCLALNPLSTLLEGSGQGYRLKRGGQVISHLLYMDDLKLFAPNNLQLMKLLKVTKTFSSAISMEFGVDKCAVMHVKRGEIMESVGTQLSDSINLRSLSSTETYKYLGMSEALGINAADVKQSLKERFFGRLNKVLNSLLSGGNKVRAFNGWVMPVLMYSFGILKWTQTELDALDRRVRSLLTANRMHHPWSSVMRLYIPRKCRGRGFLNAKTLHNREICSLREFFLEADVGMHRDVVAVDKGLTALSLANENWCKPVVLNTNDRREVWQSKELHGRFYRVLHGPDVDFLASVAWLRFGDLFGETEGFVCAIMDEVMMTNNYRKYIVKDGTVDICRACHRPRESIRHIISGCSSLANGDYLHRHNLVARIIHQQLALKYNLVESEVPYYRYVPDPVLENGNCTLYWDRSIITDRTIVANKPDIVVIDRLERRAMIVDIAVPHDENLVKTEKDKQTKYLDLAREVFDMWDVNTAVIVPIVVTANGIIAKSLDQHLKRLSLGSWIKGLIQKAVLLDTARIVRRFLSQGP

SEQ ID NO: 10736 - protein, 1197 aa, Mamestra brassicae
MLTRSRARHLATHPSPSASSLSSASPPPEPSPTVSAVTPAVAVASSSSDEYFSPPTTPPPARRRRGRRPPDGLGPRGPPASDRVPAPGGSVQRMRWTQSINENVMRSYFGATEGGTNLTAYRGRMLSLFQVLEPAVNVSAQRLSDQVRVIQRNRMLDDSVLDRLRMEMCGHVITPPSQTVAPPQSQISSHADEESNDRVTNVSTQCNEELRSALECAIREYRYIPPELRPRLPRLPMHNKNRALVAALDSQLSNYFDDCEDLTDTHSIMYCAAVAACRVAHVKMTNDRVTRPKPAVPAWQCRIERRIGGARALIGKLICFREGNTRPRVMRFVRRAFSGTDISPRDYMSRVTERIDFLKQKVYAWANRIRRYRRRVERYTQNRTFRSNERWVYRVWEQPDQGVTDTRLPDDDAMCSFWRNIWSVPVSHTEGGWIREVERACDPLPEMGAITISPQDVARAVRPLPNWKSPGPDGLHNFWIKWLQRSHARLASQYQTALESGSLPEFLTTGVTHLLHKSGSTAEPKNYRPITCLPTVYKVLTSILRAKINNHINSNNIMSVSQNGCRNGSRGTKELLLIDMAISQQVRRSRKDLSTCWIDYKKAYDSVPHTWLMRVLELYKIDTMLRTFLMSCMGQWRTVLRYPGCRNIQRNSEPVRIERGIFQGDSLSPLWFCLALNPLSTLLENSGLGYRLKRGGQVISHLLYMDDLKLFAPSNLQLMELLKVTETFSSAIRMEFGVDKCAVMHVKRGEIIESVGTQLSDSINLRSLSSTETYKYLGMSEALGINVTDMKQSLRERFFGRLKKVFNSLLSGGNKVRAFNGWVMPVLMHSFGVLKWTQTELDALDRRVRTLLTAYRMHHPRSSVMRLYIPRKCGGRGFLNAKTLHNREICSLREYFLAVDVGMHRDVVTVDKGLTPLSLANENWRKPAVLDTNDRRAVWQSKELHGRFFRALHGPDVDQLASVAWLRFGDLFGETEGFVCAIMDEVIMTNNYRRFIVKDGTVDICRACHRPGESIRHIVSGCSRLANGEYLHRHNLVARIIHQQLALKYSLVESEVPYYRYAPDPVLDNGNITLYWDRSIITDRTIVANKPDIVVVDRIERRAMIVDITVPHDENLVKAEKDKQIKYIDLAREVVDMWDVDSAIIVPIVVSANGLIATSLDQHLRRLSLGSWIKALIQKAVLLDTARIVRRFLSLEP

SEQ ID NO: 10737 - protein, 1185 aa, Noctua fimbriata
MLTRAAAKRARLSPPDPSLSSASPPPESSPVMSAVTPAVAVASSSSDEYFSPPTTPPPVRRRGGRRPPDGLGPRGPPTSDRVPAPGGSVQRMRWTQSINENVMRSYYGATEGGNNLTAYRVRMLSLFQVLEPAVNVSAQRLSDQVRVIQRNRMLDDTVLDRLRTEMQSSHVIATPPPQAVVPPQSTIIPNRDNDVSNDIVTNVSTQCNEEMRSALEGAIREYRPMHNKNRALVAVLDSQLSNYFDNCEDLTDAHSILYCAAVAACRVAHVKFSNDRATRPKPAVPPWQYRIERRIGGARALIGKLICFREGNTRPRVMRFVRRAFSGTDISPRDYMSRITERIDFLKQKVYAWANRIRRYKRRVDRYTQNRTFQRDERWVYRAWERPDQGVADTRLPDDDAMCSFWRSIWSVPVSHTEGEWTQGVERACDLVPEMGAITISPQDVVRAVRPLPNWKSPGPDGLHNFWIKWFTRSHARLAILFQSALESGSLPEFLTTGITHLLHKSGSTAEPKNYRPITCLPTVYKVLTSILRAKINKHIDDNSIMSASQNGCRNGSRGTKELLLIDMAISQQVRRSRRDLSTCWIDYKKAYDSVPHTWLMRVLELYKVDATLRTFLMSCMGQWRTVLRYPGCRQIQRNSEPIRIERGIFQGDSLSPLWFCLALNPLSTLLEDSGLGYRLRRGGQVISHLLYMDDLKLFAPNDLQLMELLKVTETFSSAIRMEFGVDKCAVMHVKRGEIVESVGTQLSDSINLRSLSATETYKYLGMSEALGINVADMKQSLKERFFGRLKKVFNSLLSGGNKVRAFNGWVMPVLMYSFGILKWTQTELDALDRRVRTLLTAYRMHHPRSSIMRLYIPRKCGGRGFLNAKTLHNREICSLREYFLETDVGMHRDVVAVDKGLTPLSLAKENWRKPLVLDTNDRMEVWQSKELHGRFFRALHGPDVDLSASVAWLRSGDLFGETEGFVCAIMDEVMMTNNYRRFIVKDGTVDICRACHRPGESIRHIISGCSRLANGEYLHRHNLVARIIHQQLALKYNLVESEVPYYKYVPDPVLENGSITLYWDQSIITDRTIVANKPDIVVVDRSERRTMIVDITVPHDENLVKAEKDKKIKYLDLAREVVDMWDVDSAIIVPIVVSAHGLIAKSLDQYLRRLSLGSWIKGLIQKAVLLDTARIVRRFLSLEP

SEQ ID NO: 10738 - protein, 961 aa, Noctua fimbriata
MHNKNRALVAVLDSQLSNYFDNCEDLTDAHSILYCAAVAACRVAHVKFFDDRATRPKPVVPPWQYRIERRIGGARALIGKLICFREGNTRPRVMRFVRRAFSGTDISPRDYMSRITERIDFLKQKVYAWASRIRRYKRRVDRYTQNRTFQRDERWVYRTWERPDQGVADTRIPDDDAMCSFWRSIWSVPVSHTEGEWTRKVERACDLVPEMGAITISPQDVVRAVRPLPNWKSPGPDGLHNFWIKWFTRSHARLAILFQSALESGSLPEFLTTGITHLLHKAGSTAEPKNYRPITCLPTVYKVLTSILRTKINKHIDDNSIMSASQNGCRNGSRGTKELLLIDMAISQQVRRSRRDLSTCWIDYKKAYDSVPHTWLMRVLELYKVDATLRTFLMSCMGQWRTVLRYPGCRQIQRNSEPIRIERGIFQGDSLSPLWFCLALNPLSTLLEDSGLGYQLRRGGQVISHLLYMDDLKLFAPNDLQLMELLKVTETFSSAIRMEFGVDKCAVMHVKRGEIVESVGTQLSDSINLRSLSATETYKYLGMSEALGINVADMKQSLKERFFGRLKKVFNSLLSGGNKVRAFNGWVMPVLMYSFGILKWTQTELDALDRRVRTSLTAYRMHHPRSSVMRLYIPRKCGGRGFLNAKTLHNREICSLREYFLETDVGMQRDVVAVDKGLTPLSLAKENWRKPLVLDTNDRMEVWQSKELHGRFFRALHGPDVDLSASVAWLRSGNLFGETEGFVCAIMDEVMMTNNYRRFIVKDGTVDICRACHRPGESIRHIISGCSRLANGEYLHRHNLVARIIHQQLALKYNFVESEVPYYKYVPDPVLENGSITLYWDQSIITDRTIVANKPDIVVVDRSERRTMIVDITVPHDENLVKAEKDKKIKYLDLAREVVDMWDVDSAIIVPIVVSAHGLIAKSLDQYLRRLSLGSWIKGLIQKAVLLDTARIVRRFLSLEP

SEQ ID NO: 10739 - protein, 1198 aa, Noctua fimbriata
MLTRAAAKRARLSPPDPSLSSASPPPESSPVMSAVTPAVAVASSSSDEYFSPPTTPPPVRRRGGRRPPDGLGPRGPPASDRVPAPGGSVQRMRWTQSINENVMRSYYGATEGGNNLTAYRVRMLSLFQVLEPAVNVSAQRLSDQVRVIQRNRMLDDTVLDRLRTEMQSSHVIATPPPQAVVPPQSTIIPNRDNDVSNDIVTNVSTQCNEEMRSALEGAIREYRFMQPDLRPRIPRLPMHNKNRALVAVLDSQLSNYFDNCEDLTDAHSILYCAAVAACRVAHVKFSNDRATRPKPAVPPWQYRIERRIGGARALIGKLICFREGNTRPRVMRFVRRAFSGTDISPRDYMSRITERIDFLKQKVYAWANRIRRYTRRVDRYTQNRTFQRDERWVYRAWERPDQGVADTRLPDDDAMCSFWRSIWSVPVSHTEGEWTQGVERACDLVPEMGAITISPQDVVRAVRPLPNWKSPGPDGLHNFWIKWFTRSHARLAILFQSALESGSLPEFLTTGITHLLHKSGSTAEPKNYRPITCLPTVYKVLTSILRAKINKHIDDNSIMSASQNGCRNGSRGTKELLLIDMAISQQVRRSRRDLSTCWIDYKKAYDSVPHTWLMRVLELYKVDATLRTFLMSCMGQWRTVLRYPGCRQIQRNSEPIRIERGIFQGDSLSPLWFCLALNPLSTLLEDSGLGYRLRRGGQVISHLLYMDDLKLFAPNDLQLMELLKVTETFSSAIRMEFGVDKCAVMHVKRGEIVESVGTQLSDSINLRSLSATETYKYLGMSEALGINVADMKQSLKERFFGRLKKVFNSLLSGGNKVRAFNGWVMPVLMYSFGILKWTQTELDALDRRVRTLLTAYRMHHPRSSIMRLYIPRKCGGRGFLNAKTLHNREICSLREYFLETDVGMHRDVVAVDKGLTPLSLAKENWRKPLVLDTNDRMEVWQSKELHGRFFRALHGPDVDLSASVAWLRSGDLFGETEGFVCAIMDEVMMTNNYRRFIVKDGTVDICRACHRPGESIRHIISGCSRLANGEYLHRHNLVARIIHQQLALKYNLVESEVPYYKYVPDPVLENGSITLYWDQSIITDRTIVANKPDIVVVDRSERRTMIVDITVPHDENLVKAEKDKKIKYLDLAREVVDMWDVDSAIIVPIVVSAHGLIAKSLDQYLRRLSLGSWIKALIQKAVLLDTARIVRRFLSLEP

SEQ ID NO: 10740 - protein, 1198 aa, Noctua fimbriata
MLTRSAARRARLSPPDPSLSSASPPPESSPVVSAVTPAVAVASSSSDEYFSPPTTPPPVRRRGGRRPPDGLGPRGPPASDRVPAPGGSVQRMRWTQSINANVMRAYYGATEGGNNLTAYRVRMLSLFQVLEPAVNVSAQRLSDQVRVIQRNRMLDDTVLDRLRTEMQSSHVIATPPPQAVVPPQSTIIPNRDNDVSNDIVTNVSTQCNEEMRSALEGAIREYRFMQPDLRPRIPRLPMHNKNRALVAVLDSQLSNYFDNCEDLTDAHSILYCAAVAACRVAHVKFSDDRATRPKPAVPPWQYRIERRIGGARALIGKLICFREGNTRPRVMRFVRRAFSGTDISPRDYMSRITERIDFLKQKVYAWANRIRRYKRRVDRYTQNRTFQRDERWVYRAWERPDQGVADTRLPDDDAMCSFWRSIWSVPVSHTEGEWTQGVERACDLVPEMGAITISPQDVVRAVRPLPNWKSPGPDGLHNFWIKWFTRSHARLAILFQSALESGSLPEFLTTGITHLLHKSGSTAEPKNYRPITCLPTVYKVLTSILRAKINKHIDDNSIMSASQNGCRNGSRGTKELLLIDMAISQQVRRSRSDLSTCWIDYKKAYDSVPHTWLMRVLELYKVDATLRTFLMSCMGQWRTVLRYPGCRQIQRNSEPIRIERGIFQGDSLSPLWFCLALNPLSTLLEDSGLGYRLRRGGQVISHLLYMDDLKLFAPNDLQLMELLKVTETFSSAIRMEFGVDKCAVMHVKRGEIVESVGTQLSDSINLRSLSATETYKYLGMSEALGINVADMKQSLKERFFGRLKKVFNSLLSGGNKVRAFNGWVMPVLMYSFGILKWTQTELDALDRRVRTLLTAYRMHHPRSSVMRLYIPRKCGGRGFLNAKTLHNREICSLREYFLETDVGMHRDVVAVDKGLTPLSLAKENWRKPLVPDTNGRMEVWQSKELHGRFFRALHGPDVDLSASVAWLRCGDLFGETEGFVCAIMDEVMMTNNYRRFIVKDGTVDICRVCHRPGESIRHIISGCSRLANGEYLHRHNLVARIIHQQLALKYNLVESEVPYYKYVPDPVLENGSITLYWDQSIITDRTIVANKPDIVVVDRSERRTMIVDITVPHDENLVKAEKDKKIKYLDLAREVVDMWDVDSAIIVPIVVSAHGLIAKSLDQYLRRLSLGSWIKGLIQKAVLLDTARIVRRFLSLEP

SEQ ID NO: 10741 - protein, 1107 aa, Noctua fimbriata
MRWTQSINANVMRAYYGATEGGNNLTAYRVRMLSLFQVLEPAVNVSAQRLSDQVRVIQRNRMLDDTVLDRLRTEMQSSHVIATPPPQAVVPPQSTIIPNRDNDVSNDIVTNVSTQCNEEMRSALEGAIREYRFMQPDLRPRIPRLPMHNKNRALVAVLDSQLSNYFDNCEDLTDAHSILYCAAVAACRVAHVKFSDDRATRPKPAVPPWQYRIERRIGGARALIGKLICFREGNTRPRVMRFVRRAFSGTDISPRDYMSRITERIDFLKQKVYAWANRIRRYKRRVDRYTQNRTFQRDERWVYRAWERPDQGVADTRLPDDDAMCSFWRSIWSVPVSHTEGEWTQGVERACDLVPEMGAITISPQDVVRAVRPLPNWKSPGPDGLHNFWIKWFTRSHARLAILFQSALESGSLPEFLTTGITHLLHKSGSTAEPKNYRPITCLPTVYKVLTSILRAKINKHIDDNSIMSASQNGCRNGSRGTKELLLIDMAISQQVRRSRSDLSTCWIDYKKAYDSVPHTWLMRVLELYKVDATLRTFLMSCMGQWRTVLRYPGCRQIQRNSEPIRIERGIFQGDSLSPLWFCLALNPLSTLLEDSGLGYRLRRGGQVISHLLYMDDLKLFAPNDLQLMELLKVTETFSSAIRMEFGVDKCAVMHVKRGEIVESVGTQLSDSINLRSLSATETYKYLGMSEALGINVADMKQSLKERFFGRLKKVFNSLLSGGNKVRAFNGWVMPVLMYSFGILKWTQTELDALDRRVRTLLTAYRMHHPRSSVMRLYIPRKCGGRGFLNAKTLHNREICSLREYFLETDVGMHRDVVAVDKGLTPLSLAKENWRKPVVFDTNYRMEVWQSKELHGRFFRALHGPDVDLSASVAWLRSGDLFGETEGFVCAIMDEVMMTNNYRRFIVKDGTVDICRACHRPGESIRHIISGCSRLANGEYLHRHNLVARIIHQQLALKYNLVELEVPYYKYVPDPVLENGSITLYWDQSIITDRTIVANKPDIVVVDRSERRTMIIDITVPHDENLVKAEKDKKIKYLDLAREVVDMWDVDSAIIVPIVVSAHGLIAKSLDQYLRRLSLGSWIKGLIQKAVLLDTARIVRRFLSLEP

SEQ ID NO: 10742 - protein, 1198 aa, Noctua fimbriata
MLTRSAAARRARLLSPDPSLSSASPPPESSPIVSAVTPAVAVASSSSDEYFSPPTTPPPVRRRGGRRPPDGLGPRGPPASDRVPAPGGSVQRMRWTQSINENVMRSYYGATEGGNNLTAYRVRMLSLFQVLEPAVNVSAQRLSDQVRVIQRNRMLDDTVLDRLRTEMQSSHVITPSAQAVVLPQSSTITNRDNDVSNDMVTNVSTQCNEEMRSALEGAIREYRFMQSDLRPRIPRLPMHNKNRALVAVLDSQLSNYFDNCEDLTDAHSILYCAAVAACRVAHVKFFDDRATRPKPVVPPWQYRIERRIGGARALIGKLICFREGNTRPRVMRFVRRAFSGTDISPRDYMSRITERIDFLKQKVYAWASRIRRYKRRVDRYTQNRTFQRDERWVYRTWERPDQGVADTRIPDDDAMCSFWRSIWSVPVSHTEGEWTRRVERACDLVPEMGAITISPQDVVRAVRPLPNWKSPGPDGLHNFWIKWFTRSHARLAILFQSALESGSLPEFLTTGITHLLHKSGSTAEPKNYRPITCLPTVYKVLTSILRTKINKHIDDNSIMSASQNGCRNGSRGTKELLLIDMAISQQVRRSRRDLSTCWIDYKKAYDSVPHTWLMRVLELYKVDATLRTFLMSCMGQWRTVLRYPGCRQIQRNSEPIRIERGIFQGDSLSPLWFCLALNPLSTLLEDSGLGYQLRRGGQVISHLLYMDDLKLFAPNDLQLMELLKVTETFSSAIRMEFGVDKCAVMHVKRGEIVESVGTQLSDSINLRSLSATETYKYLGMSEALGINVADMKQSLKERFFGRLKKVFNSLLSGGNKVRAFNGWVMPVLMYSFGILKWTQTELDALDRRVRTLLTAYRMHHPRSSVMRLYIPRKCGGRGFLNAKTLHNREICSLREYFLETDVGMHQDVVAMDKGLTPLSLAKENWRKPLVLDTNDRMEVWQSKELHGRFFRALHGPDVDLSASVAWLRSGNLFGETEGFVCAIMDEVMMTNNYRRFIVKDGTVDICRACHRPGESIRHIISGCSRLANGEYLHRHNLVARIIHQQLALKYNFVESEVPYYKYVPDPVLENGSITLYWDQSIITDRTIVANKPDIVVVDRSERRTMIVDITVPHDENLVKAEKDKKIKYLDLAREVVDMWDVDSAIIVPIVVSAHGLIAKSLDQYLRRLSLGSWIKGLIQKAVLLDTARIVRRFLSLEP

SEQ ID NO: 10743 - protein, 1106 aa, Atethmia centrago
MRWTQSVNENVMRSYYGATEGGNNLTAYRVRMLSLFQVLEPAVNVSAQRLSDQVRVIQRNHMLDDTVLDRLRSEMQRSHIIVPPSQTVVLSPQLSTNQADEGSDDRATNVSTQCNVELRSALEDAIREYRLMSPELRPRLPRLPMHKKNRALVAALDSQLSNYFDDCEDLTDTHSILYCAAVAVCRVAHVKFAKDSRTTRPKPTVPAWQCRIESRIGGARALIGKLICFREGNTRPRVMRFVRRAFSGTDIGPQDYMTRVTERIDFLKQKVYAWANRIRRYKRRVERYTQNRTFQSDERWVYRGWERPDQDVTDTRLPDDDVMCSFWRSIWSVPVSHTEGDWARKVERACDPIPEMGAITICPQDVARAVRPLPNWKSPGPDGLHNFWLKWFLRSHARLAAQYQTALESGSLPQFLTTGVTHLLHKSGSTAEPKNYRPITCLPTVYKLLTSILRAKINKHIDTNSIMSASQNGCRNGSRGTKELLLIDMTISQQVRHSRKDLSTCWIDYKKAYDSVPHTWLMRVLELYKVDATLRTFLISCMGQWRTVLRYPGCRNIQRNSEPIRIERGIFQGDSLSPLWFCLALNPLSTLLEDSGLGYRMRRGGQVISHLLYMDDLKLFASNNLQLMELLKITESFSSAIRMEFGVDKCAVMHVKRGKIVESVGTQLSDSINLRTLSASETYKYLGMSEALGINVTDMKQSLKERFFGRLKKVFNSLLSGGNKVRAFNGWVMPVLMYSFGILKWTQTELDALDRRVRTLLTAYRMHHPRSSVMRLYIPRKCGGRGFLNAKTLHNREVCSLREYFLEADVGMHRDVVAVDKGLTPLSLAKENWRKLVVLDTNDRREVWQSKELHGRFFRALHEPDVDFQASVAWLRFGDLFGETEGFVCAIMDEVIMTKNYRRFIVKDGTVDVCRACHRPGESIRHIISGCSRLANEEYLHRHNLVARIIHQQLALKYSLVESEVPYYRYVPDPVLDNGNITLYWDRSIITDRTIVANKPDIVVVDRTERRAMIVDITVPHDGNLVKAEKDKQIKYLDLAREVVDMWDVDSAIIVPIVVSANGLIAKSLDQHLKRLTLDGWIKSLIQKAVLLDTARIVRRFLSLES

SEQ ID NO: 10744 - protein, 975 aa, Atethmia centrago
MSPELRPRLPRLPMHKKNRALVATLDSQLSNYFDVCEDLTDTHSILYCAAVAVCRVAHVKFAKDSRATRPKPTVPAWQRRIERRIGGARALIGKLICFREGNTRPRVMRFVRRAFLGTDIGPQDYMSRVTERIDFLKQKVYAWANRIRRYKRRVERYTQNRTFQSDERWVYRGWERPDQGVTGTRLPDDDIMCSFWRSIWSVPVSHTEGDWVREVERACDPIPEMGAITISPQDVARAVRPLPNWKSPGPDGLHNFWLKWFLRSHARLAAQYQTALESGSLPQFLTTGVTHLLHKSGSTAEPKNYRPITCLPTVYKVLTSILRAKINEHIDTNSIMSASQNGCRNGSRGTKELLLIDITITQQVRHSRKDLSTCWIDYKKAYDSVPHTWLMRVLELYKVDATLRTFLMSCMGQWRTVLRYPGCRNIQRNSEPIRIERGIFQGDSLSPLWFCLALNPLSTLLEDSGLGYRLRRGSQVISHLLYMDDLKLFASNNLQLMELLKITETFSSAIRMEFGVDKCAVMHVKRGKIMESVGTQLSDSINLRALSASETYKYLGMSEALGINVTDMKQSLKERFFGRLKKVFNSLLSGGNKVRAFNGWVMPVLMYSFGILKWTQTELDALDRRVRTLLTAYRMHHPRSSVMRLYIPRKCGGRGFLNAKTLHNREVCSLREYFLKADVGMHRDVVAVDKGLTPLSLAKENWRKLVVLDTNDRREVWQSKELHGRFFRALHEPDVDFQASVAWLRFGDLFGETEGFVCAIMDEVIMTKNYRRFIVKDGTVDVCRACQRPGESIRHIISGCSRLANEEYLHRHNLVARIIHQQLALKYNLVESEVPYYRYVPDPVLENGNITLYWDRSIITDRTIIANKPDIVVVDRTERRAMIVDITVPHDGNLVKAEKDKQIKYLDLAREVVDMWDVNSAIIVPIVISANGLIAKSLDQHLRRLSLDGWIKGLIQRAVLLDTARIVRRFLSLEP

SEQ ID NO: 10745 - protein, 1198 aa, Atethmia centrago
MLTRSAAVRARLPPPDSSLSSASPPPVPSPTVCAVTTPTAAVASSSSDEYFSPPTTPPPVRRRGGRRPPDGLGSRGPPASDRVPAPGGSVKRMRWTQSVNENVMRSYYGATEGGNNLTAYRVRMLSLFQVLEPAVNVSAQRLSDQVRVIQRNHMLDDTVLDRLRSEMQRSHVIVPPSQTVVHSPQLSTNQADEGSDDRATNVSTQCNVELRSALEDAIREYRLMSPELRPRLPRLPMHKKNRALVAALDSQLSNYFDDCEDLTDTHSILYCAAVAVCRVAHVKFAKDSRTTRPKPTVPAWQCRIESRIGGARALIGKLICFREGNTRPRVMRFVRRAFSGTDIGPHDYMTRVTERIDFLKQKVYAWANRIRRYKRRVERYTQNRTFQSDERWVYRGWERPDQDVTDTRLPDDDVMCSFWRSIWSVPVSHTEGDWARKVERACDPIPEMGAITICPQDVARAVRPLPNWKSPGPDGLHNFWLKWFLRSHARLAAQYQTALESGSLPQFLTTGVTHLLHKSGSTAEPKNYRPITCLPTVYKLLTSILRAKINKHIDTNSIMSASQNGCRNGSRGTKELLLIDMTISQQVRRSRKDLSTCWIDYKKAYDSVPHTWLMRVLELYKVDATLRTFLISCMGQWRTVLRYPGCRNIQRNSEPIRIERGIFQGDSLSPLWFCLALNPLSTLLEDSGLGYRMRRGGQVISHLLYMDDLKLFASNNLQLMELLKITESFSSAIRMEFGVDKCAVMHVKRGKIVESVGTQLSDSINLRTLSASETYKYLGMSEALGINVTDMKQSLKERFFGRLKKVFNSLLSGGNKVRAFNGWVMPVLMYSFGILKWTQTELDALDRRVRTLLTAYRMHHPRSSVMRLYIPRKCGGRGFLNAKILHNREVCSLREYFLEADVGMHRDVVAVDKGLTPLSLAKENWRKLVVLDTNDRREVWQSKELHGRFFRALHEPDVDFQASVAWLRFGDLFGETEGFVCAIMDEVIMTKNYRRFIVKDGTVDVCRACHRPGESIRHIISGCSRLANEEYLHRHNLVARIIHQQLALKYSLVESEVPYYRYVPDPVLDNGNITLYWDRSIITDRTIVANKPDIVVVDRTERRAMIVDITVPHDGNLVKAEKDKQIKYLDLAREVVDMWDVDSAIIVPIVVSANGLIAKSLDQHLKRLTLDGWIKGLIQKAVLLDTARIVRRFLSLEP

SEQ ID NO: 10746 - protein, 1207 aa, Atethmia centrago
MLTRSRARRLRQDTHPTSSVSSLSSASQLPEPAPDVSPVIPAAAVASSSSDEYFSPPTTPPPVRPRGRGRPPASLGLRGPPASDRVPAPGGSVQRMRWTEALNENVMRAYFGATEGGSNLTAYRGRMLSLFQVLEPAVNVSAQRLSDQVRVIQRKHMLDDVVLDRLRIQSRNSHVSPASPLVAVQMQNLPSGSPRPDHADEEDDDEAISVSSQCNVRLRSALDDAFREYRSTPPGLRPRLPRLPMHKKNKALVCALDSQLSNYFDSSKDLTDTHSILYCAAVAACRVAQVKFPNSDRAPRPKPAVPAWQSRIERRIGETRALIGKLICFREGNTRPRVMRFVKRAFAGTDILSSRDYLTRVTERIDFLKQKICAWANRIRRYRRRMERYTQNRTFQNDERWVYRTWERPDQGVADTRLPDDDAICSFWQNIWSVPVNHTEGDWTKRIERACDLIPKMGALTILPQDVAHAVRPLPNWKSPGPDGLHNFWIKWFQRSHARLASQFQSALESGSLPLFLTTGITHLLHKSGSTAEPKNYRPITCLPTVYKVLTSILRVKINKHIETNLIMSASQNGCKNGSRGTKELLLIDIAISQQVRRSRKDLSTCWIDYKKAYDSVPHTWLMRVLELYKVDATLRTFLMSCMGQWRTVLCYPGCRYIQRNSEPIRIKRGIFQGDSLSPLWFCLALNPLSTLLENSGLGYRLRRGGQVISHLLYMDDLKLFAPNNLQLMELLKVTKTFSSAIRMEFGVDKCAVMHVKRGGIVESVGTQLSDSIHLRSLSSTETYKYLGMSEALGINAADMKQSLRERFFGRLNKVLNSLLSGGNKVRAFNGWVMPVLMYSFGILKWTQTELDALDRRVRTLLTANRMHHPRSSVMRLYIPRKCGGRGFLNAKTLHNREICSLRQYFLETDVVMHRDVVSVDKGLTPLSLADENWRKPIILDTNDRREVWQSKELHGRFYRVLHGLDVDLLASVSWLRFGDLFGETEGFVFAIMDEVIMTNNYRKYIVKDGTVDICRACHRPGESIRHIISGCSRLANGDYLHRHNLVAKIIHQQLALKYSLVESEVPYYRYAPDPVLENGNITLYWDRSIITDRTIVANKPDIVVIDRLTRRTMIIDIAVPHDENLVKAEKDKQIKYLDLAHEVVDMWDVDTAIIVPIVVTANGIIPKSLDQHLKRLSLGSWIKGLIQRAVLLDTARIVRRFLSQEP

SEQ ID NO: 10747 - protein, 868 aa, Atethmia centrago
MRFVRRAFSGTDIGPQDYMTRVTERIDFLKQKVYAWANRIRRYKRRVERYTQNRTFQSDERWVYRGWERPDQDVTDTRLPHDDVMCSFWRSIWSVPVSHTEGDWARKVERACDPIPEMGAITICPQDVARAVRPLPNWKSPGPDGLHNFWLKWFLRSHARLAAQYQTALESGSLPQFLTTGVTHLLHKSGSTAEPKNYRPITCLPTVYKLLTSILRAKINKHIDTNSIMSASQNGCRNGSRGTKELLLIDMTISQKVRRSRKDLSTCWIDYKKAYDSVPHTWLMRVLELYKVDATLRTFLISCMGQWRTVLRYPGCRNIQRNSEPIRIERGIFQGDSLSPLWFCLALNPLSTLLEDSGLGYRMRRGGQVISHLLYMDDLKLFASNNLQLMELLKITESFSSAIRMEFGVDKCAVMHVKRRKIVESVGTQLSDSINLRTLSASETYKYLGMSEALGINVNDMKQSLKERFFGRLKKVFNSLLSGGNKVRAFNGWVMPILMYSFGILKWTQTELDALDRRVRTLLTAYRMHHPRSSVMRLYIPRKCGGRGFLNAKTLHNREVCSLREYFLEADVGMHRDVVAVDKGLTPLSLAKENWRKLVVLDTNDRREVWQSKELHGRFFRALHEPDVDFQASVAWLRFGDLFGETEGFVCAIMDEVIMTKNYRRFIVKDGTVDVCRACHRPGESIRHIISGCSRLANEEYLHRHNLVARIIHQQLALKYSLVESEVPYYRYVPDPVLDNGNITLYWDRSIITDRTIVANKPDIVVVDRTERRAMIVDITVPHDGNLVKAEKDKQIKYLDLAREVVDMWDVDSAIIVPIVVSANGLIAKSLDQHLKRLTLDGWIKGLIQKAVLLDTARIVRRFLSLEP

SEQ ID NO: 10748 - protein, 1197 aa, Atethmia centrago
MLTRSAAVRARLPPPDSSLSSASPPPVPSPTVCAVTTPTAAVASSSSDEYFSPPTTPPPVRRRGGRRPPDGLGSRGPPASDNPAPGGSVKRMRWTQSVNENVMRSYYGATEGGNNLTAYRVRMLSLFQVLEPAVNVSAQRLSDQVRVIQRNHMLDDTVLDRLRSEMQRSHVIVPPSQTVVHSPQLSTNQADEGSDDRATNVSTQCNVELRSALEDAIREYRLMSPELRPRLPRLPMHKKNRALVAALDSQLSNYFDDCEDLTDTHSILYCAAVAVCRVAHVKFAKDSRTTRPKPTVPAWQCRIESRIGGARALIGKLICFREGNTRPRVMRFVRRAFSGTDIGPQDYMTRVTERIDFLKQKVYAWANRIRRYKRRVERYTQNRTFQSDERWVYRGWERPDQDVTDTRLPDDDVMCSFWRSIWSVPVSHTEGDWARKVERACDPIPEMGAITICPQDVARAVRPLPNWKSPGPDGLHNFWLKWFLRSHARLAAQYQTALESGSLPQFLTTGITHLLHKSGSTAEPKNYRPITCLPTVYKLLTSILTAKINKHIDTNSIMSASQNGCRNGSRGTKELLLIDMTISQQVRRSRKDLSTCWIDYKKAYDSVPHTWLMRVLELYKVDATLRTFLISCMGQWRTVLRYPGCRNIQRNSEPIRIERGIFQGDSLSPLWFCLALNPLSTLLEDSGLGYRMRRGGQVISHLLYMDDLKLFASNNLQLMELLKITESFSSAIRMEFGVDKCAVMHVKRGKIVESVGTQLSDSINLRTLSTSETYKYLGMSEALGINVTDMKQSLKERFFGRLKKVFNSLLSGGNKVRAFNGWVMPVLMYSFGILKWTQTELDALDRRVRTLLTAYRMHHPRSSVMRLYIPRKCGGRGFLNAKTLHNREVCSLREYFLEADVGMHRDVVAVDKGLTPLSLAKENWRKLVVLDTNDRREVWQSKELHGRFFRALHEPDVDFQASVAWLRFGDLFGETEGFVCAIMDEVIRTKNYRRFIVKDGTVDVCRACHRPGESIRHIISGCSRLANEEYLHRHNLVARIIHQQLALKYSLVESEVPYYRYVPDPVLDNGNITLYWDRSIITDRTIVANKPDIVVVDRTERRAMIVEITVPHDGNLVKAEKDKQIKYLDLAREVVDMWDVDSAIIVPIVVSANGLIAKSLDQHLKRLTLDGWIKGLIQKAVLLDTARIVRRFLSLEP

SEQ ID NO: 10749 - protein, 1114 aa, Mesoligia furuncula
MQRMRWTQTVNENVMRAYFGATEGGSNLTAYRGRMLSLFQVLEPAVNVSAQRLSDQVRVIQRNHMLDNVVLDRLRLESRNSHVTPASSLIAVQLQNVPSVSPRPDHVYVEDDDEAISVSSQCNARLRSALEDAFREYRSIPPGLRPRLPRLPMHKKNKALVCALDSQLSNCFNNSKDLTDTHSILYCAAVAACHVAHVKFPNSDRAPRPKPAVPAWQCRIECRIGEARALIGKLICFREGNTRPRVMRFVRRAFSGTDISSRDYLSRVTERIDFLKQKIYAWANRIRRYRRRVERYTQNRTFQNDERWVYRAWERPDQGVTDTRLPDDDAMCSFWRNIWSVPVSHTEGDWTAKIERACDLIPEMGVLTISPQDVARAVRPLPNWKSPGPDGLHNFWIKWFQGSHARLASQFQSALESGSLPQFLTTGITHLLHKSGSTADPKNYRPITCLPTVYKVLTSILRAKINKHIDTNSIMSVSQNGCGNGSRGTKELLLIDMTISQQVRRSRKDLSTCWIDYKKAYDSVPHTWLMRVLELYKVDTTLRTFLMSCMGQWRTVLRYPGCRNIQRNSEPIRIERGIFQGDSLSPLWFCLALNPLSTLLEDSGLGYRLRRGGQVISHLLYMDDLKLFAPNNLQLMELLKITETFSSAIRMEFGVDKCAVMHVKRGEIVESVGTQLSDSTNLRALSASETYKYLGMSEALGINVTDMKQSLKERFFGRLKKVFNSLLSGGNKVRAFNGWVMPVLMYSFGILKWTQTELDALDRKVRTLLTANRMHHPRSSVMRLYIPRKCGGRGFLNAKTLHNREICSLREYFLETDVGMHRDVVAVDKGLTPLSLGKENWRKPVVLDTNDRMEVWQSMELHGRFFRALHGPDVDLLASVAWLRFGDLFGETEGFVYAIMDEVMMTNNYRRFIVKDGTVDICRACHRPGESIRHIISGCSRLANGEYLHRHNLVARIIHQQLALKYSLVESEVPYYRYVPDPVLENGNITLYWDRSIITDRTIVANKPDIVVVDRSERRAMIVDITVPHDENLVKAEKDKQVKYLDLAREVVDMWDVDSAIIVPIVVTANGLIAKSLDQHLKRLSLGSWIKGLIQKAVLLDTARIVRRFLSLEP

SEQ ID NO: 10750 - protein, 868 aa, Mesoligia furuncula
MRFVRRAFSGTDISSRDYLSRATERIDFLKQKIYAWANRIRRYRRRVERYTQNRTFQNDKRWVYRAWERPDQGVTDTRLPDDDAMCSFWRNIWSVPVSHTEGDWTAKIERACDLIPEMGVLTISPQDVARAVRPLPNWKSPGPDGLHNFWIKWFQGSHARLASQFQSALESGSLPQFLTTGITHLLHKSGSTADPKNYRPITCLPTVYKVLTSILRAKINKHIDTNSIMSVSQNGCGNGSRGTKELLLIDMTISQQVRRSRKDLSTCWIDYKKAYDSVPHTWLMRVLELYKVDTTLRTFLMSCMGQWRTVLRYPGCRNIQRNSEPIRIERGIFQGDSLSPLWFCLALNPLSTLLEDSGLGYRLRRGGQVISHLLYMDDLKLFAPNNLQLMELLKITETFSSAIRMEFGVDKCAVMHVKRGEIVESVGTQLSDSTNLRALSASEIYKYLGMSEALGINVTDMKQSLKERFFGRLKKIFNSLLSGGNKLRAFNGWVMPVLMYSFGILKWTQTELDALDRKLRTLLTANRMHHPRSSVMRLYIPRKCGGRGFLNAKTLHNREICSLREYFLETDVGMHRDVVAVDKGLTPLSLGKENWRKPVVLDTNDRMEVWQSKELHGRFFRALHGPDVDLLASVAWLRFGDLFGETEGFVYAIMDEVMMTNNYRRFIVKDDTVDICRACHRPGESIRHIISGCSRLANGEYLHRHNLVARIIHQQLALKYSLVESEVPYYRYVPDPVLENGNITLYWDRSIITDRTIVANKPDIVVVDRSERRAMIVDITVPHDENLVKAEKDKQVKYLDLAREVVDMWDVDSAIIVPIVVTANGLIAKSLDQHLKRLSLGSWIKGLIQKAVLLDTARIVRRFLSLEP

SEQ ID NO: 10751 - protein, 1198 aa, Mesoligia furuncula
MLTRLAARRARLLPPDSSLSSASPPPVPSPTVSAVITPAAAVASSSSDEYFSPPTTPPPARRRRGRRPPDGLGLRGPPASDRVPALGGSVQRMRWTQSINENVMRSYYGATEGGNILTAYRVRMLSLFQVLEPAVNVSAQRLSDQVRVIQRNHMLDDTVLDRLRSEMQSSHVIAPQSQTAVILPQPNISHTDEGSNDRAINVSTQCNEELRSALEDAIQEYRFMSPELRPRLPRLPMHNKNRALVAVLDSQLSKYFDTCEDLIDTHSILYCAAVAACRVAHVKFANDSRATRPKQAVPAWQCRIERRIGGARTLIGKLICFREGNTRPRVMRFVRRAFSGTDISPQDYMSCVTERIDFLKQKVYAWANRIRRYRRRVERYTQNRTFQSDERWVYRGWERPDQGVAEMCLPDDDAMCSFWRSIWSVPVSHTEGDWAREVERACDPIPEMGAITICPQDVARAVRPLPNWKSPGPDGLQNFWIKWFPRSHARLASQFQTALESGSLPQFLTTGITHLLHKSGSTAEPKNYRPITCLPTVYKVLTSILRTKINKHIDTNSIMSASQNGCRNGSRGTKELLLIDMAISQQVCRFRKDLSTCWIDYKKAYDSVPHTWLMRVLELYKVDTTLRTFLMSCMGQWTTVLRYPGCRNIQRNSEPIRIERGIFQGDSLSPLWFCLALNPLSTLLEDSGLGYRLRRGGQVISHLLYMDDLKLFAPNTLQLMELLKITETFSSAIRMEFGVDKCAVMHVKRGEIVESVGTQLLDSTNLRALSASETYKYLGMSEALGINVTDMKQSVKERFFGRLKKVLNSLLSGGNKVRAFNGWVMPVLMYSFGILKWTQTELDALDRRVRTLLTANRMHHPRSSVMRLYIPRKCGGRGFLNAKTFHNREICSLREYFLETDVGMHRDVVMVDKGLAPLSLAKENWRKPVVLDTNDRMEVWQSKELHGRFLRALRGPDVDLQASVAWLRFGNLFGETEGFVCAIMDEVMMTNNYRRFIVKDGTVDICRACHRPGESIRHIISGCSRLANGEYLHRHNLVARIIHQQLALKYNLVESEVPYYRYVPDPVLENGNITLYWDRSIITDRTIVANKPDIVVVDGSERRAMIVDITVPHDENLVKAEKDKQIKYLDLAREVVDMWDVDTAIIVPIVVTANGLIAKSLDQHLRRLSLGSWIKGLIQRAVLLDTARIVRRFLSLEP

SEQ ID NO: 10752 - protein, 1198 aa, Mesoligia furuncula
MLTRLAARRARLLPPDSSLSSASPPPVPSPTVSAVMTPAAAVASSSSDEYFSPPTTPPPARRRRGRRPPDGLGLRGPPASDRVPALGGSVQRMRWTQSINENVMRSYYGATEGGNILTAYRVRMLSLFQVLEPAVNVSAQRLSDQVRVIQRNHMLDDTVLDRLRSEMQSSHVIAPQSQTAVILPQPNISHTDEGSNDRAINVSTQCNEELRSALEDAIQEYRFMSPEHRPRLPRLPMHNKNRALVAALYSQLSKYFDTCEDLIDTHSILYCAAVAACRVAHVKFANDSRATRPKQAVPAWQCRIERRIGGARTLIGKLICFREGNTRPRVMRFVRRAFSGTDISPQDYMSCVTERIDFLKQKVYAWANRIRRYRRRVERYTQNRTFQSDERWVYRGWERPDQGVAETCLPDDDAMCSFWRSIWSVPVSHTEGDWAREVERACDPIPEMGAITICPQDVARAVRPLPNWKSPGPDGLQNFWIKWFPRSHARLASQFQTALESGSLPQFLTTGITHLLHKSGSTAEPKNYRPITCLPTVYKVLTSILRTKINKHIDTNSIMSASQNGCRNGSRGTKELLLIDMAISQQVRRFRKDLSTCWIDYKKAYDSVPHTWLMRVLELYKVDTTLRTFLMSCMGQWRTVLRYPGCRNIQRNSEPIRIERGIFQGDSLSPLWFCLALNPLSTLLEDSGLGYRLRRGGQVISHLLYMDDLKLFAPNTLQLMELLKITETFSSAIRMEFGVDKCAVMHVKRGEIVESVGTQLLDSTNLRALSASETYKYLGMSEALGINVTDMKQSVKERFFGRLKKVLNSLLSGGNKVRAFNGWVMPVLMYSFGILKWTQTELDALDRRVRTLLTANRMHHPRSSVMRLYIPRKCGGRGFLNAKTLHNREICSLREYFLETDVGMHRDVVIVDKGLTPLSLAKENWRKPVVLDTNDRMEVWQSKELHGRFLRALRGPDVDLQASVAWLRFGNLFGETEGFVCAIMDEVMMTNNYRRFIVKDGTVDICRACHRPGESIRHIISGCSRLANGEYLHRHNLVARIIHQQLALKYNLVESEVPYYRYVPDPVLENGNITLYWDRSIITDRTIVANKPDIVVVDRSERRAMIVDITVPHDENLVKAEKDKQIKYLDLAREVVDMWDVDTAIIVPIVVTANGLIAKSLDQHLRRLSLGSWIKGLIQRAVLLDTARIVRRFLSLEP

SEQ ID NO: 10753 - protein, 962 aa, Mesoligia furuncula
MHKKNKALVCALDSQLSNCFNNSKDLIDTHSILYCAAVAACRVAHVKFPISDRAPRRKPAVPAWQCRIECRIGEARALIGKLICFREGNTRPRVMRFVRRAFSGTDISSRDYLSRVTERIDFLKQKIYAWANRIRRYRRRVERYTQNRTFQNDERWVYRAWERPDQGVTDTPLPDDDAMCSFWRNIWSMPVSHTEGDWTAKIERACDLIPEMGVLTISPQDVARAVRPLPNWKSPGPDGLHNFWIKWLQGSHARLASQFQSALESGSLPQFLTTGITHLLHKSGSTADPKNYRPITCLPTVYKVLTSILRAKINKHIDTNSIMSVSQNGCRNGSRGTKELLLIDMTISQQVRRFRKDLSTCWIDYKKAYDSVPHTWLMRVLELYKVDTTLRTFLMSCMGQWRTVLRYPGCRNIQRNSEPIRIERGIFQGDSLSPLWFCLALNPLSTLLEDSGLGYRLRRGGQVISHLLYMDDLKLFAPNNLRLMELLKITETFSSAIRMEFGVDKCAVMHVKRGEIVESVGTQLSDSTNLRALSASEIYKYLGMSEALGINVTDMKQSLKERFFGRLKKVFNSLLSGGNKVRAFNSWVMPVPMYSFGILKWTQTELDALDRKVRTLLTANRMHHPRSSVMRLYIPRKCGGRGFLNAKTLHNREICSLREYFLETDVGMHRDVVAVDKGLTPLSLGKENWRKPVVLDTNDRMEVWQSKELHGRFFRALHGPDVDLLASVAWLRFGDLFGETEGFVYAIMDEVMMTNNYRRFIVKDGTVDICRACHRPGESIRHIISGCSRLANGEYLHRHNLVARIIHQQLALKYSLVESEVPYYRYVPDPVLENGNITLYWDRSIITDRTIVANKPDIVVVDRSERRAMIVDITVPHDENLVKAEKDKQVKYLDLAREVVDMWDVDSAIIVPIVVTANGLIAKSLDQHLKRLSLGSWIKGLIQKAVLLDTARIVRRFLSLEP

SEQ ID NO: 10754 - protein, 1080 aa, Mesoligia furuncula
MLSLFQVLEPAVNVSAQRLSDQVRVIQRNHMLDNVVLDRLRLESRNSHVTPASSLIAVQLQNVPSVSPRPDHVYVEDDDEAITVSSQCNARLRSALEDAFREYRSIPPGSRPRLPRLPMHKKNKALVCALDSQLSNCLNNSKDLTDTHSILYCAAVAACRLAHVKFPNSDRAPRPKPAVPAWQCRIECRIGEARALIGKLICFREGNTRPRVMRFVRRAFSGTDISSRDYLSRVTERIDFLKQKIYAWANRIRRYRRRVERYTQNRTFQNDERWVYRAWERPDQGVTDTPLPDDDAMCSFWRNIWSVPVSHTEGDWTAKIERACDLIPEMGVLTISPQDVARAVRPLPNWKSPGPDGLHNFWIKWFQGSHARLASQFQSALESGSLPQFLTTGITHLLHKSGSTADPKNYRPITCLPTVYKVLTSILRAKINKHIDTNSIMSVSQNGCRNGSRGTKELLLIDMTISQQVRRFRKDLSTCWIDYKKAYDSVPHTWLMRVLELYKVDTTLRTFLMSCMGQWRTVLRYPGCRNIQRNSEPIRIERGIFQGDSLSPLWFCLALNPLSTLLEDSGLGYRLRRGGQVISHLLYMDDLKLFAPNNLRLMELLKITETFSSAIRMEFGVDKCAVMHVKRGEIVESVGTQLSDSTNLRALSASETYKYLGMLEALGINVTDMKQSLKERFFGRLKKVFNSLLSGGNKVRAFNSWVMPVLMYSFGILKWTQTELDALDRKVRTLLTANRMHHPRSSVMRLYIPRKCGGRGFLNAKTLHNREICSLREYFLETDVGMHRDVVAVDKGLTPLSLGKENWRKPVVLDTNDRMEVWQSKELHGRFFRALHGPDVDLLASVAWLRFGDLFGETEGFVYAIMDEVMMTNNYRRFIVKDGTVDICRACHRPGESIRHIISGCSRLANGEYLHRHNLVARIIHQQLALKYNLVESEVPYYRYVPDPVLENRNITLYWDRSIITDRTIVANKPDIVVVDRSERRAMIVDITVPHDENLVKAEKDKQVKYLDLAREVVDMWDVDSAIIVPIVVTANGLIAKSLDQHLKRLSLGSWIKGLIQKAVLLDTARIVRRFLSLEP

SEQ ID NO: 10755 - protein, 1199 aa, Spilarctia lutea
MITRARSRALLPPSDSSRSSALPSSEARTEAPTVAEASSSSSSDEFFSPPTSPTPVRRQGRCRPPDSLGPRGPLTSNRAPATGGNVHRMKWTHSINENVMRAYFRATELGTNLTAYRVRLVSLFQELEPAINVSAQRLSDQVRAIQRCHLLDDAALERIRSDIRNSLTVPSSSHVVDVVTNTTPQVPQNEDVSELVDSEIMSVSNQYNDRIRSTLEDAIREYRYVNFNNRPRLSRLPIHKRNLALVSALDSLLPDYFSNSEDLSDAHSILYCAAIAVCRVAGVKFAENTTTTRQENTVPAWQCRIERRIAEARTLIGKLISFRSGNMRPRVMRFVKRAFLGTTISPQEYMSCVTERIDFLKQKVYAWANRIRRYRKRVDRYNQNRMFQRNEKWVYRKWENLRPCLSDGQVPDENATNSFWHSIWSVPVTHTEGDWYRDVERSCESLLPMEPISINEEDVSCAVRSLPNWKAPGPDGLHNFWLKWFRSSHACLASQFQTALDSGSLPQFLTTGITHLLYKSGDAMDPKNFRPITCLPTLYKLLTSILRLKITTHINHNSILSISQNGCRSGTRGTKELLIIDMTISQQVRRNRKSLATCWIDYKKAFDSVPHTWLLRVLELYKIDTTLCTFLKLCMGQWRTALRYPECRQSAMNDVLIKIERGIFQGDSLSPLWFCLALNPLSTLLEGSGLGYRFQKDDRGISHLLYMDDLKLLAPTKLQLTGLLKVTENFSNSIKMEFGVDKCAVMYVKKGEIVESEGIELSDATKLRSLSVTETYKYLGFSQSLGIPEPDMKQTLRERFFSRLKKVLKSLLSGGNKVRACNGWVMPVLMYSFGVLRWTQTELDAIDRRVRTLLTAFRMHHPRSSVMRLYIPRKLGGRGLLNIKTLHNREVYNLREYFLQTDVGVHRSVVTVDTGLTPLALAKENWRKPVVLSTNDRREVWKGKVLHGRFYRALNGPDIDFKASTSWLRYGDLFGETEGFVCAIMDEVIMTSNYRKYILKDGTVDICRACHRPGESIRHIVSGCSRLANGEYLHRHNQVARIVHQQLALKYNLVSSEVPYYRYVPDPVLENGRATLYWDRSIITDRTIVANKPDIVVMDRLERRAMIVDIAVPHDENLVKVEKEKQIKYLDLSHEIVDMWNVDSAIIVPIVVSAHGLIAKSLDQHLKRLTLGGWIKGLIQKAVLLDTARIVRRFLSLEP

SEQ ID NO: 10756 - protein, 1197 aa, Spilarctia lutea
MLTRAKLRAQLSPSDSSLSSALPPMEATVEVSAVHEASSSSSSDEYFSPPTSPTPVRRQGRGRPPTSMGSRGPLTSNRAPATGGDVRRMKWTHCINENVMRAYFRATELGTNLTAYRVRLVSMFQELEPAVNVSAQRLSDQVRAIQRCRLLDDAVLERIRSDVRNTLAIPSSSHSVDVVVNTPQLPCNDDVDEQRESEIISVSTQYNNRIRSALEDAIQEYRYVNYNNRPRLPRLPIHKRNLALVGALNSLLPDYFGNSEDLGDTHSILYCAAIAVCRVAGVKFIERITTRTKNTMPAWQYRIERRIAVTRTLIGKLIAFKSGNTRPRVMRFVKQAFLGTTISPQQYMSSVTERIDFLKQKVCAWANRIRRYKKRVDRFNRNRMFQTNEKWVYRKWEAPNPCDRDGHLPDENATNTFWRNIWSVPVTHTDGDWMRDVKRSCESITNMKPVSIDREDVSCAVRSLPNWKAPGPDGLHNFWLKWFRSSHACLASQFQAALDSGSLPQFLTTGTTHLLYKSGSTMDPKNFRPITCLPTLYKLLTSILRLKITTHINHNSIFSISQNGCRSGTRGTKELLIIDMTISQQVRRNRKSLATCWIDYKKAYDSVPHTWLLKVLELYKIDTTLCTFLKSCMGQWRTVLRYPGCRQSAMNDVLIKIERGIFQGDSLSPLWFCLALNPLSTLLEGSELGYGLRKDDRVISHLLYMDDLKLLAPTKLQLTALLKITENFSNSIKMEFGVDKCAVMYVKKGLIVESEGVELSDSTKLRSLSATESYKYLGFSQSLGMPESDMKQALRERFFGRLKKVLKSLLSGGNKVRAYNGWVMPVLMYSFGILRWTQTELDALDRRVRTLLTAFRMHHPRSSVMRLYIPRKLGGRGLLNIKTLHNREIYNLREYFLHTDVGMHRSVVAVDTGLTPLALAKENWRKPVVLSTDDRREVWKGKELHGRFYRALHGPDIDFKTSTSWLRYGDLFGETEGFVCAIMDEVIMTNNYRKYILKDGTVDICRACHRPGESIRHIISGCSRLANGEYLHRHNQVARIVHQQLALKYHLVNSEVPYYRYVPDPVLENGRATLYWDRSIITDRTIVANKPDIVVIDRLERRAIIIDIAVPHDENLVKVEKEKQIKYLDLSHEIVDMWNVDSVIIVPIVVSAHGLIAKSLDQHLKRLTLEGWIKGLIQKAVLLDTARIVRRFLSLEP

SEQ ID NO: 10757 - protein, 1199 aa, Spilarctia lutea
MLTRARRRAQLSPPDSSLRSALPSPEEAIEVPAGAEASSSSSSDEFFSPPTSPIPVRRQGRGRPPTSLESRGPLTSNRAPAAGGDVRRMKWTHSINENVMRAYFRATELGTNLTAYRVRLVSLFQELEPAVNVSAQRLSDQVRAIQRCHLLDDAALERIRSDIRNSLTVPSSSHVLNVVTNSTPQVPQNDDISELVDSEIISVSTQYNDRIRSTLEDAIREYRYVNLNNRPRLSRLPIHKRNLALVSALDSLLPKYFSNSEDLSDTHSILYCAAIAVCRVAGVKFAEYTTTTRQENTLPAWQYRIERRIAEARTLIGKLMSFRSGNTRPRVMRFVKRAFLGTTISPQEYMSCVTERIDFLKQKVYAWANRIRRYRKRVDRYNQNRMFQRNEKWVYRKWENLSPCMSDGQVPDENATNSFWRNMWSVPVTHTEGDWCRDVERSCESLLPMEPISIDEEDVSCAVRSLPNWKAPGPDGLHNFWLKWFRSSHACLASQFQTALDSGSLPQFLTTGITHLLYKSGDAMDPKNFRPITCLPTLYKLLTSILRLKITTHINHNSILSISQNGCRSGTRGTKELLIIDMTISQQVRRNRKSLATCWIDYKKAFDSVPHTWLLKVLELYKIDTTLCTFLKVCMGQWRTALRYPGCRQSAMNDVLIKIERGIFQGDSLSPLWFCLALNPLSTLLEGSGLGYRLQKDDRVISHLFYMDDLKLLAPTKLQLTALLKVTENFSNSIKMEFGVDKCAVMYVKKGEIMESEGIELSDSTKLRSLSATETYKYLGFSQSLGMPESDMKQTLRERFFSRLKKVLKSLLSGGNKVRACNGWVMPVLMYSFGVLRWTQTELDAIDRRVRTLLTAFRMHHPRSSVMRLYIPRRLGGRGLLNIKTLHNREVYNLREYFLQTDVGVHRSVVTVDTGLTPLALAKENWRKPVVLSTNDRREVWKGKELHGRFYRALHGPDIDFKTSTSWLRYGDLFGETEGFVCAIMDEVIMTNNYRKYILKDGTVDICRACHRPGESIRHIISGCSRLANGEYLHRHNQVARIVHQQLALKYHLVNSEVPYYRYVPDPVLENGRATLYWDRSIITDRTIVANKPDIVVMDRLERRAIIIDIAVPHDANLVKVEKEKQIKYLDLSHEIVDMWNVDSVIIVPIVVSAHGLIAKSLDQHLKRLTLEGWIKGLIQKAVLLDTARIVRRFLSLEP

SEQ ID NO: 10758 - protein, 1198 aa, Xestia c-nigrum
MLTRAAARRARLPPPDPSLSSASPPPEPSPIVSAVTPAVAVASSSSDEYFSPPTTPPPARRRGGRRPPDGLGPRGPPASDRVPAPGGSVQRMRWTQSNNENVMRAYYGATEGGNNLTAYRVRMLSLFQVLEPAVNVSAQRLSDQVRVIQRNRMLDDTVLDRLRTEMHSSHVIATPPSQAVVPPQSTTITNRDDDVSSDMITNVGTQYSEDMRSALEGAIREYRFMTPELRPRLPRLPMHNKNRMLVAVLDSQLSNYFDNCEDLTDVHSILYCAAVAACRVARVKFSDDRATRPKPAVPAWQYRIEQRIGGARALIGKLICFREGNTRPRVMRFVRRAFSGTDINPRDYMSRVTERIDFLKQKVYAWASRIRRYKRRVDRYTQNRTFQRDERWVYRAWERPDQSVADTRLPDDDAMCSFWRSIWSVPVSHAEGEWTRVIERACDPVPEMGAITISPQDVACAVRPLPNWKSPGPDGLHNFWIKWFTRSHARLATLFQSALESGSLPEFLTTGITHLLHKSGSTAEPKNYRPITCLPTVYKVLTSILRTKICKHVDDNSVMSASQNGCRNGSRGTKELLLIDMAISQQVRRSRKDLSTCWIDYKKAYDSVPHTWLMRVLELYKVDATLRTFLMSCMRQWRTVLRYPGCRQIQRNSEPIRIERGIFQGDSLSPLWFCLALNPLSTLLEDSGLGYQLRKDGRVISHLLYMDDLKLFAPNDLQLMELLKVTETFSSAIRMEFGVDKCAVMHVKRGEIVESVGTQLSDSINLRSLSATETYKYLGMSEALGINVADMKQSLKERFFGRLKKVFNSLLSGGNKVRAFNGWVMPVLMYSFGILKWTQTELDALDTKVRKLLTAFRMHHPRSSVMRLYIPRKCGGRGFLNAKTLHNREICSLRDYFLEADVGMHRDVVTMDKGLTPLSLAKENWRKPIILTTDDRRKEWQGKELHGRFYRALHGPDVDFLASVSWLRSGDLFGETEGFVCAIMDEVMMTNNYRRFIVKDGTVDICRACHRPGESIRHIISGCSRLANGEYLHRHNLVARIIHQQLALKYNLVESEVPYYRYVPDPVLVNGSITLYWDQSIVTDRTVIANRPDIVVMDRSERRAMIVDITVPHDENLVKAEKDKQIKYLDLAREVVDMWEVDSAIIVPIVVSAHGLIAKSLDQHLRRLSLGSWIKGLIQKAVLLDTARLVRRFLSLEP

SEQ ID NO: 10759 - protein, 1199 aa, Xestia c-nigrum
MLTRAAARRARLSPPDPSLSSASPPPEPSPIVSAVTPAVAVASSSSDEYFSPPTTPPPARRRGGRRPPDGLGPRGPLASDRVPAPGGSVQRMRWTQSNNENVMRAYYGATEGGINLTAYRVRMLSLFQVLEPAVNVSAQRLSDQVRVIQRNRMLDDTVLDRLRTEVQSSRVTATPPSQAVVPPQSTVTTPYCDGDVSSDMVTNVSTQCSEDMRSALEGAIREYRFMTPELRPRLPRLPIHNKNKMLMAVLDSQLSNYFDSCEDLTDIHSILYCAAVAACRVAHVKFSDDRATRPKPAVPAWQYRIEQRIGGARALIGKLICFREGNTRPRVMRFVRRAFSGTDISPRDYMFRVTERIDFLKQKVYAWVSRIRRYKRRVDRYTQNRTFQSDERWVYRAWERPDQGVADTRLPGDDAMCSFWRSIWSVPVSHAEGEWTRVVERACDPVPEMGAITISPQDVACAVRPLPNWKSPGPDGLHNFWIKWFTRSHARLVTLFQSALESGSLPEFLTTGITHLLHKSGSTAEPKNYRPITCLPTVYKVLTSILRAKITKHIDENSVMSASQNGCRNGSRGTKELLLIDMAISQQVRRSRKDLSTCWIDYKKAYDSVPHTWLRRVLELYKVDATLRTFLMSCMGQWRTVLHYPGCRQIQRNSEPIRIERGIFQGDSLSPLWFCLALNPLSTLLEDSGLGYRLRKDGRVISHLLYMDDLKLFAPNDLQLMELLKVTETFSSAISMEFGVDKCAVMHVKRGGIVESVGTQLSDSINLRSLSATETYKYLGMSEALGISVADMKQSLKERFFGRLKKVFNSLLSGGNKVRAFNGWVMPVLMYSFGILKWTQTELDALDTKVRKLLTAYRMHHPRSSVMRLYIPRKCGGRGFLNAKTLHNREICSLREYFLAADVGMHLDVVAMDKGLTPLSLAKENWRIPVVFTTDDRRKEWQSKELHGRFYRALHGPDVDFQASVSWLRSGDLFGETESFVCAIMDEVMMTNNYRRFIVKDGTVDICRACHRPGESIRHIISGCSRLANGEYLHRHNLVARIIHQQLALKYNLVESEVPYYRYVPDPVLNSGSITLYWDQSIITDRTVIANRPDIVVMDRSERRAMIVDITVPHDENLVKAEKDKQIKYLDLAREVVDMWEVDSAIIVPIVVSAHGLIAKSLDQHLRRLSLGSWIKGLIQKAVLLDTARIVRRFLSLEP

SEQ ID NO: 10760 - protein, 955 aa, Xestia c-nigrum
MLVAVLDSQLSNYFDNCEDLTDVHSILYCAAVAACRVARVKFSDDRATRPKPAVPAWQYRIEQRIGGARALIGKLICFREGNTRPRVMRFVRRAFSGTDINPRDYMSRVTERIDFLKQKVYAWASRIRRYKRRVDRYTQNRTFQRDERWVYRAWERPDQSVADTRLPDDDAMCSFWRSIWSVPVSHAEGEWTRVIERACDPVPEMGAITISPQDVACAVRPLPNWKSPGPDGLHNFWIKWFTRSHARLATLFQSALESGSLPEFLTTGITHLLHKSGSTAEPKNYRPITCLPTVYKVLTSILRTKICKHVDDNSVMSASQNGCRNGSRGTKELLLIDMAISQQVRRSRKDLSTCWIDYKKAYDSVPHTWLMRVLELYKVDATLRTFLMSCMRQWRTVLRYPGCRQIQRNSEPIRIERGIFQGDSLSPLWFCLALNPLSTLLEDSGLGYQLRKDGRVISHLLYMDDLKLFAPNDLQLMELLKVTETFSSAIRMEFGVDKCAVMHVKRGEIVESVGTQLSDSINLRSLSATETYKYLGMSEALGINVADMKQSLKERFFGRLKKVFNSLLSGGNKVRAFNGWVMPVLMYSFGILKWTQTELDALDTKVRKLLTAFRMHHPRSSVMRLYIPRKCGGRGFLNAKTLHNREICSLRDYFLEADVGMHRDVVTMDKGLTPLSLAKENWRKPIILTTDDRRKEWQGKELHGRFYRALHGPDVDFLASVSWLRSGDLFGETEGFVCAIMDEVMMTNNYRRFIVKDGTVDICRACHRPGESIRHIISGCSRLANGEYLHRHNLVARIIHQQLALKYNLVESEVPYYRYVPDPVLVNGSITLYWDQSIVTDRTVIANRPDIVVMDRSERRAMIVDITVPHDENLVKAEKDKQIKYLDLAREVVDMWEVDSAIIVPIVVSAHGLIAKSLDQHLRRLSLGSWIKGLIQKAVLLDTARLVRRFLSLEP

SEQ ID NO: 10761 - protein, 1198 aa, Xestia c-nigrum
MLTRAAARRARLPPPDPSLSSASPPPEPSPIVSAVTPAVAVASSSSDEYFSPPTTPPPARRRGGRRPPDGLGPRGPLASDRVPAPGGSVQRMRWTQSNNENVMRAYYGATEGGNNLTAYRVRMLSLFQVLEPAVNVSAQRLSDQVRVIQRNRMLDDTVLDRLRTEMHSSHVIATPPSQAVVPPQSTTITNRDDDVSSDMITNVGTQYSEDMRSALEGAIREYRFMTPELRPRLPRLPMHNKNRMLVAVLDSQLSNYFDNCEDLTDVHSILYCAAVAACRVARVKFSDDRATRPKPAVPAWQYRIEQRIGGARALIGKLICFREGNTRPRVMRFVRRAFSGTDINPRDYMSRVTERIDFLKQKVYAWASRIRRYKRRVDRYTQNRTFQRDERWVYRAWERPDQSVADTRLPDDDAMCSFWRSIWSVPVSHAEGEWTRVIERACDPVPEMGAITISPQDVACAVRPLPNWKSPGPDGLHNFWIKWFTRSHARLATLFQSALESGSLPEFLTTGITHLLHKSGSTAEPKNYRPITCLPTVYKVLTSILRTKICKHVDDNSVMSASQNGCRNGSRGTKELLLIDMAISQQVRRSRKDLSTCWIDYKKAYDSVPHTWLMRVLELYKVDATLRTFLMSCMRQWRTVLRYPGCRQIQRNSEPIRIERGIFQGDSLSPLWFCLALNPLSTLLEDSGLGYQLRKDGRVISHLLYMDDLKLFAPNDLQLMELLKVTETFSSAIRMEFGVDKCAVMHVKRGEIVESVGTQLSDSINLRSLSATETYKYLGMSEALGINVADMKQSLKERFFGRLKKVFNSLLSGGNKVRAFNGWVMPVLMYSFGILKWTQTELDALDTKVRKLLTAFRMHHPRSSVMRLYIPRKCGGRGFLNAKTLHNREICSLRDYFLEADVGMHRDVVTMDKGLTPLSLAKENWRKPIILTTDDRRKEWQGKELHGRFYRALHGPDVDFLASVSWLRSGDLFGETEGFVCAIMDEVMMTNNYRRFIVKDGTVDICRACHRPGESIRHIISGCSRLANGEYLHRHNLVARIIHQQLALKYNLVESEVPYYRYVPDPVLVNGSITLYWDQSIVTDRTVIANRPDIVVMDRSERRAMIVDITVPHDENLVKAEKDKQIKYLDLAREVVDMWEVDSAIIVPIVVSAHGLIAKSLDQHLRRLSLGSWIKGLIQKAVLLDTARLVRRFLSLEP

SEQ ID NO: 10762 - protein, 1199 aa, Xestia c-nigrum
MLTRAAARRARLPPPDPSLSSASPPPEPSPIVSAVTPAVAVASSSSDEYFSPPTTPPPARRRGGRRPPDGLGPRGPPASDRVPAPGGSVQRMRWTQSNNENVMRAYYGATEGGINLTAYRVRMLSLFQVLEPAVNVSAQRLSDQVRVIQRNRMLDDTVLDRLRTEVQSSRVSATPPSQAVVPPQSTVTTPYCDGDVSSDMVTNVSTQCSEDMRSALEGAIREYRFMTPELRPRLPRLPMHNKNKMLMAVLDSQLSNYFDSCEDLTDIHSILYCAAVAACRVAHVKFSDDRATRPKPAVPAWQYRIEQRIGGARALIGKLICFREGNTRPRVMRFVRRAFSGTDISPRDYMFRVTERIDFLKQKVYAWASRIRRYKRWVDRYTQNRTFQRDERWVYRAWERPDQGVADTRLPDDDAMCSFWRSIWSVPVSHAEGEWTRVVERACDPVPEMGAITISPQDVACAVRPLPNWKSPGPDGLHNFWIKWFTRSHARLATLFQSALESGSLPEFLTTGITHLLHKSGSTAEPKNYRPITCLPTVYKVLTSILRAKITKHIDENSVMSASQNGCRNGSRGTKELLLIDMAISQQVRRSRKDLSTCWIDYKKAYDSVPHTWLRRVLELYKVDATLRTFLMSCMGQWRTVLRYPGCRQIQRNSEPIRIERGIFQGDSLSPLWFCLALNPLSTLLEDSGLGYRLRKDGRVISHLLYMDDLKLFAPNDFQLMELLKVTETFSSAIRMEFGVDKCAVMHVKRGGIVESVGTQLSDSINLRSLSATETYKYLGMSEALGISVADMKQSLKERFFGRLKKVFNSLLSGGNKVRAFNGWVMPVLMYSFGILKWTQTELDALDTKVRKLLTAYRMHHPRSSVMRLYIPRKCGGRGFLNAKTLHNREICSLREYFLAADVGMHRDVVAMDKGLTPLSLAKENWRIPVVFTTDDRRKEWQSKELHGRFYRALHGPDVDFQASVSWLRSGDLFGETEGFVCAIMDEVMMTNNYRRFIVKDGTVDICRACHRPGESIRHIISGCSRLANGEYLHRHNLVARIIHQQLALKYNLVESEVPYYRYVPDPVLVNGSITLYWDQSIITDRTVIANRPDIVVMDRSERRAMIVDITVPHDENLVKAEKDKQIKYLDLAREVVDMWEVDSAIIVPIVVSAHGLIAKSLDQHLRRLSLGSWIKGLIQKAVLLDTARIVRRFLSLEP

SEQ ID NO: 10763 - protein, 1046 aa, Xestia c-nigrum
MLDDTVLDRLRTEMQSSHVTAMPPSQAVVSPQSSSIPNRDGDVSSEMVTNVSTQCNEDMRSALEGAIREYRFMAPELRPRLPRLPMHNKNRMLVAVLDSQLSNYFDTCEDLTDVHSILYCAAVAACRVAHVKFSDDRATRPKPAIPAWQYRIEQRIGGARALIGKLICFREGNTRPRVMRFVRRAFSGTDISPRDYISRVTERIDFLKQKVYAWASRIRRYKRRVDRYTQNRTFQRDERWVYRAWERPDQGVADTCLPDDDAMCSFWRSIWSVPVSHAVGEWTRVIERVCDPVLEMGAITISPQDVACAVRPLPNWKSPGPDGLHNFWIKWFTRSHARLATLFQSALESGSLPEFLTTGVTHLLHKSGSTTEPKNYRPITCLPTIYKVLTSILRTKINKHIDDNSIMSASQNGCRNGSRGTKELLLIDMAISQQVRRSRKDLSTCWIDYKKAYDSVPHTWLMRVLELYKVDATLRTFLMSCMGQWRTVLRYPGCRQIQRNSEPIRIERGIFQGDSLSPLWFCLALNPLSTLLEDSGLGYRLRKDGQVISHLLYMDDLKLFAPNDLQLMELLKVTETFSSAIRMEFGVDKCAVMHVKRGDIVESVGTQLSDSINLRSLSATETYKYLGMSEALGINVADMKQSLKERFFGRLKKVFNSLLSGGNKVRAFNGWVMPVLMYSFGILKWTQTELDALDTKVRKLLTAYRMHHPRSSVMRLYIPRKCGGRGFLNAKTLHNREICSLREYFLEANVGMHRDVVAMDKGLTPLSLAKENWRKPVVLTTDDRRKEWQSKELHGRFYRALHGPDVDFLASVSWLRSGDLFGETEGFVCAIMDEVMMTNNYRRFIVKDGTVDICRACHRPGESIRHIISGCSRLANGEYLHRHNLVARIIHQQLALKYNLVESEVPYYRYVPDPVLDNGSITLYWDQSIITDRTVIANRPDIVVMDRSERRAMIVDITVPHDENLVKAEKDKQIKYLDLAREVVDMWEVDSAIIMPIVVSAHGLIAKSLDQYLRRLSLGSWIKGLIQKAVLLDTARIVRRFLSLEP

SEQ ID NO: 10764 - protein, 1197 aa, Griposia aprilina
MLTRSAALRARPPTPDSSLSSASPPPVSSPTVSAVTTPAAVVGSSSSDEYFTPPTTPPPARRRGGHRPPDGLGPRGPPASDRVPAPGGSVQRMRWTRSINENVMRSYYGATEGGNNLTAYRVRMLSLFQVLEPAVNVSAQRLSDQVRVIQRNHMLDDTVLDRLRSEMQISHVIAPPSQTVVVLPQPITSHDEGSDDRATNVSTQCNEELRSALEGAIREYRFMSPELRPRLPRLPMHNKNRALVAALDSQLSNYFDDCVDLTDTHSILYCAAVPACRVAHVKFANDSRATRPKPAVPAWQCRIECHIGGARALIGKLICFREGNTRPRVMRFVRRAFAGTDVSLQDYVSCVTERIDFLKQKVYALASRIRRYKRRVERYTQNRTFQRDERWVYRDWERPDQGVADTYLPDDDAMCSFWHNIWSVPVSHTEGDWTREVERACEPIQEMGAITICSQDVARAVRPLPKWKSPGPDGLHNFWIKWFLRSHARLAAQFQAALESGSLPQFLTTEVTHLLHKSGSIAEPKNYRPITCLPTVYKVLTSILTAKIIKHIDTNSIMSASQNGCRNRSRGTKELLLIDMAISQQVRRSRKDLSTCWIDYKKAYDSVPHTWLMRVLELYKVDATLRTFLKSCMGQWRTVLRYPACRNTQRNSEPIRIERGIFQGDSLSPLWFCLALNPLSTLLEDSGLGYRLRRGGRVISHLLYMDDLKLFAPNNLQLIELLKVTETFSSAIRMEFGLDKCAVMRVKRGEIVESVGTQLSDSMNLRALSASETYKYLGMSEALGVNNTDMKQSLKERFFGRLKKVFNSLLSGGNKVRAFNGWVMPVLMYSFGILKWTQTELDTLDRRVRTLLTANRMHHPRPSVMRLYIPRKCGGRSFLNAKTLHNREICSLREYFLEADVGMHRDVVAVDKGLTPLSLAKENWRKPVVLDTNDRMEVWQSKELHGRFFRALHGPDVDVQASVAWLRFGDLFGETEGFVCAIMDEVMMTNNYRRFIVKDGTVDICRACHRPGESIRHIISGCSRLANEEYLHRHNLVARIIHQQLALKYSFVESEVPYYRYVPDPVLENGTITLYWHRSIITDRTIIANKPDIVLVDRRERRAMIVDITIPHDVNLVKAEKDKQIKYLDLAREVVDMWDVDSAIIVPIVVTANGLIAKSLDQHLRRLSLGNWIKGLIQKAVLLDTARIVRRFLSLEP

SEQ ID NO: 10765 - protein, 1159 aa, Griposia aprilina
MVRDARLEGLPQRHSGVQHVQLRAQQRAPRARGVRRAPRPRARAPRPLQRAVAQDYALRLGLAYFYAYLPTRNTLYNNNNKRVRMLSLFQVLEPAVNVSAQRLSDQVRVIQRNHMLDDTVLDRLRNEMQSSHVIAPPSQTVIVLPQSNTSQADEESDDRATNVSTQCNDELRSALEDAIREYRFISPELRPRLPRLPMHNKNRVLVAALDAQLSNYFDDCVDLTDTHSILYCAAVAACRVAHIKFANDSRPTRPKPAVPAWQCRIERRIGGARALIGKLICFREGNTRPRMMRFVRRASAGTNISPQDYMSCVTERIDFLKQKVYAWANRIRRYKRRVERYTQNRTFQRDERWVYRGWERPDQGVADTCLPDDDAMCSFWRNIWSVPVSHTEGDWGREVERACDPIPEMGAISICPQDVTRAVRPLPNWKSPGPDGLQNFWIKWFGRSHVRLAAQYQVAIESGSLPQFLTTGVTHLLHKSGSTAEPKNYRPITCLPTVYKVLTSILRAKINKHIDTNSIMSPSQNGCRNGSRGTKELLLIDMAISQQVRRSRKDLSTCWIDYKKAYDSVPHTWLVRVLELYKVDATLRTFLKSCMGQWRTILHYPGCRNIQRDNEPIRIERGIFQGDSLSPLWFCLALNPLSTLLEDSGLGYRLRRGGQVISHLLYMDDLKLFAPNNLQLMELLKVTETFSSAIRMEFGVDKCAVMHVKRGEIVESVGTQLSYSINLRALSASDTYKYLGMSEALGINGTDMKQSLKERFFGRLKKVFNSLLSGGNKVRAFNGWVMPVLMYSFGILKWTQTELDALDRKVRTLLTANRMHHPRSSVMRLYIPRKCGGRSFLNAKTLHNREICSLREYFLEADVGMHTDVVKVDKGLTPLSLAKENWRKPVVLDTNDRMEVWQSKELHGRFFRALHEPDVDQLASVAWLRFGDLFGETEGFVCAIMDEVILTNNYRRHIMKDGTVDVCRACHRPGESIRHIISGCSRLANEEYLHRHNLVARIIHQQLALKYSLVESEVPYYRYVPDPVLENGHITLYWDRSIITDRTIVANKPDIVMVDRLERRAMIVDITVPHDGNLVKAEKDKQIKYLDLAREVVDMWDVDSAIIVPIVVTANGLIAKSLDQHLRRLSLGSWIKGLIQKAVLLDTARIVRRFLSLEP

SEQ ID NO: 10766 - protein, 1198 aa, Griposia aprilina
MLTRSAARRARPPPPDSSLSSASLPPVSSPTVSAVTTPAAVVASSSSDEYFSPPTTPPPVRRRGGHRPPDGLGARGPPASDRVPAPGGSVQRMRWTRSINENVMRSYYGATEGGNNLTAYRVRMLSLFQVLEPAVNVSAQRLSDQVRVIQRNHMLDDTVLDRLRNEMQSSHVIAPPSQTVVVLPQSNTSQADEESDDRATNVSTQCNDELRSALEDAIREYRFISPELRPRLPRLPMHNKNRVLVAALDAQLSNYFDDCVDLTDTHSILYCAAVAACRVAHVKFANDSRATRPKPAVPAWQCRIERRIGEARALIGKLICFREGNTRPRVMRFVRRAFAGTNISPQDYMSCVTEHIDFLKQKVYAWANRIRRYKRRVERYTQNRTFQRDERWVYRGWERPDQGVADTCLPDDDAMCSFWRNIWSVPVSHTEGDWTREVERACDPIPEMGAITICPQDVTRAVRPLPNWKSPGPDGLHNFWIKWFGRSHARLAAQYQVALESGSLPQFLTTGVTHLLHKSGSTAEPKNYRPIACLPTVYKVLTSILRDKINKHIDTNYIMSPSQNGCRNGSRGTKELLLIDMAISQQVRRSRKDLSTCWIDYKKAYDSVPHTWLMRVLELYKVEATLRTFLMSCMGQWRTVLHYPACRNTQRNSEPIRIERGIFQGDSLSPLWFCLALNPLSTLLEDSGLGYRLRRGGQVISHLLYMDDLKLFAPNNSQLMDLLKVTETFSSAIRMEFGVDKCAVMHVKRGEIVESDGTQLSDSINLRALSASETYKYLGMSEALGINGTDMKQSLKDRFFDRLKKVFNSLLSGGNKVRAFNGWVMPVLMYSFGILKWTQTELDALDRKVRTLLTANRMHHPRSSVMRLYIPRKCGGRGFLNAKTLHNREICSLREYFLEADVGMHRDVVTVDKGLTPLSLAKENWRKPVVLDTNDRMEVWQTKELHGRFFRALHGPDVDQLASVAWLRFGDLFGETEGFVCAIMDEVMMTNNYRRFIVKDGTVDICRACHRPGESIRHIISGCSRLANEEYLHRHNLVARIIHQQLALKYSLVESEVPYYRYVPDPVLENGHITLYWDRSIITDRTIVANKPDIVMVDRLERRAMIVDITVPHDGNLVKAEKDKQIKYLDLAREVVDMWDVDSAIIVPIVVTANGLIAKSLDQHLRRLSLGSWIKGLIQKAVLLDTARIVRRFLSLEP

SEQ ID NO: 10767 - protein, 1198 aa, Griposia aprilina
MMLTRSAKRRAHPPPPDSSLSSASPPPVSSPTVSAVTTPAAVVASSSSDEYFSPPTTPPPVRRRGGHRPPDGLGPRGPPASDRVPAPGGSVQRMRWTRSINENVMRSYYGATERGNNLTAYRVRMLSLFRVLEPAVNVSAQRLSDQVRVIQRNHMLDDTVLDRLRNEMQSSHVIAPPSQTVVVLPQSNTSQADEESDDRATNVSTQCNDELRSALEDAIREYRFISPELRPRLPRLPMHNKNRVLVVALDAQLSNYFDDCVDLTDTHSILYCAAVAACRVAHIKFANDSRPTRPKPAVPAWQCRIERRIGGARALIGKLICFREGNTRPRVMRFVRRAFAGNISPQDYMSCVTERIDFLKQKVYAWANRIRRYKRRVERYTQNRTFQRDERWVYRGWERPDQGVADTCLPDDDAMCSFWRNIWSVPVSHTEGDWGREVERACDPIPEMGAISICPQDVTRAVRPLPNWKSPGPDGLQNFWIKWFGRSHARLAAQYQVAIESGSLPQFLTTGVTHLLHKSGSTAEPKNYRPITCLPTVYKVFTSILRAKINKHIDTNSIMSPSQNGCRNGSRGTKELLLIDMAISQQVRRSRKDLSTCWIDYKKAYDSVPHTWLVRVLELYKVDATLRTFLKSCMGQWRTILHYPGCRNIQRDNEPIRIERGIFQGDSLSPLWFCLALNPLSTLLEDSGLGYRLRRGGQVISHLLYMDDLKLFAPNNLQLMELLKVTETFSSAIRMEFGVDKCAVMHVKRGEIVESVGTQLSYSINLRALSASDTYKYLGMSEALGINGTDMKQSLKERFFGRLKKVFNSLLSGGNKVRAFNGWVMPVLMYSFGILKWTQTELDALDRKVRTLLTANRMHHPRSSVMRLYIPRKCGGRGFLNAKTLHNREICSLREYFLEADVGMHTDVVKVDKGLTPLSLAKENWRKPVVLDTNDRMEVWQSKELHGGFFRALHGPDVDQLASVAWLRFGDLFGETEGFVCAIMDEVILTNNYRRHIMKDGTVDVCRACHRPGESIRHIISGCSRLANEEYLHRHNLVARIIHQQLALKYSLVESEVPYYRYVPDPVLENGHITLYWDRSIITDRTIVANKPDIVVVDRLERRAMIVDITVPHDGNLVKAEKDKQIKYLDLAREVVDMWDVDSAIIVPIVVTANGLIAKSLDQHLRRLSLGSWIKGLIQKAVLLDTARIVRRFLSLEP

SEQ ID NO: 10768 - protein, 1198 aa, Omphaloscelis lunosa
MLTRSAARRARLPPPDSPLSSASSPPVLSPTVNAVMTPAAAVASSSSDEYFSPPTTPPPARRRGRRRPPDGLGPRGPPASDRVPAPGGSVQRMRWTRSINENVMRSYYGATEGGNNLTAYRVRMLSLFQVLEPAVNVSAQRLSDQVRVIQRNHMLDDTVLDRLRSEMQSSHVIAPPVRSVIVPSQIITSQADERIDDRATNVSTQCNEELRSALEGAIHEYRFMSPELRPRLPRLPMHNKNRALVAALDSQLSNYFDDCEDLTDTHSILYCAAVAVCRVAHVKFSNDSRATRPKPAVPAWQCRIERRICGARTLIGKLICFREGNTRPRVMRFVRRAFLGTDISPQDYMTRVTERIDFLKQKVYAWANRIRRYKRRVERYTQNRTFQSDERWVYRAWERPNQGVTDTHLPDEDAMCSFWRSIWSVPVSHTEGDWTREVERACDSIPEMGAITICPQDVARAVRPLPNWKSPGPDGLHNFWIKWFVRSHARLAAQYQTALESGSLPHFLTTGVTHLLHKSGSTAEPKNYRPITCLPTVYKVLTSVLRAKINKHIDTNSIMSASQNGCRNGSRGTKELLLIDMAISQQVRRSRKDLSTCWIDYKKAYDSVPHTWLMRVLELYKVDITLRTFLMSCMGQWRTVLRYPGCRNIQRNSEPIRIERGIFQGDSLSPLWFCLALNPLSTLLEDSGLGYRLRRGGQVISHLLYMDDLKLFAPNNLQLMELLKVTETFSSAIRMEFGVDKCAVMHVKRGKIMESVGTQLSDSINLRALSASETYKYLGMSEALGINVTDMKQSLKERFFGRLKKVLNSLLSGGNKVRAFNGWVMPVLMYSFGILKWSQTELDALDRRVRTLLTAYRMHHPRSSVMRLYIPRKCGGRGFLNAKTLHNREICSLREYFLEADVGMHRDVVVVDKGLTPLSLAKENWRKPVVLDTKNRMEIWQSKELHGRYFRALHGPDVDLPASVAWLRCGDLFGETEGFVCAIMDEVMMTNNYRRFIVKDGTVDICRACHRPGESIRHIISGCSRLANEEYLHRHNLVARIIHQQLALKYSLVESEVPYYRYVPDPVLENGNITLYWDRSIITDRTIVANKPDIVVVDRGERSAMIIDITVPHDENLVKAEKDKQIKYLDLAREVVDMWDVDSAIIVPIVVTANGLIAKSLDQHLRRLSLGSWIKGLVQKAVLLDTARIVRRFLSLEP

SEQ ID NO: 10769 - protein, 1205 aa, Omphaloscelis lunosa
MLTRSRARKLTDTHPTSSGSSLSSASQLPDPAPDVSPVIPVAAVASSSSDEYFSPPTTPPPTRQRGRGRPPASLGLRGPPASDRVPAPGGSVQRMRWTQTVNENVMRAYFGATEGGSNLTAYRGRMLSLFQVLEPAVNVSAQRLSDQVRVIQRNHMLDDVVLDRLRLESRNNHVTPASPLVTVQLQNLPSSSPRSDRVGEEDDDGVISVSSQCNVRLRSALEDAFREYRSIPPGLRPKLPRLPMHKKNKALMCTLDSLLSNCFDGSKDLADTHSILYCAAVAACRVAHVKFPNSDRAPRPKPAVPAWQCRIERRIGEARVLIGKLICFREGNTRPRVMRFVKRAFSGTDISFQDYLTRVTERIDFLKQKIYAWANRIRRYRRRVERYTQNRTFQSDERWVYRAWERPDQGVIDTRLPDDDAMCSFWRSIWSAPVSHTEGDWTREIERACEQIPEMEALTISPQDIARAVRPLPNWKSPGPDGLHNFWIKWFQRSHARLASQFQSALESGSLPQFLTTGITHLLHKSGSTAEPKNYRPITCLPTVYKVFTSILRTKINKHIDTNSIMSASQNGCRNGSRGTKELLLIDMAINQQVRRSRRDLSTCWIDYKKAYDSVPHTWLMRVLELYKVNATLRTFLMSCMGQWRTVLRYPGCRQILRNSEPIRIERGIFQGDSLSPLWFCLALNPLSTLLEDSGLGYRLRRGGQVISHLLYMDDLKLFAPNNLQLLELLKVTETFSSAIRMEFGVDKCAVMHVKRGEIVESVGTQLSDSIQLRSLSSIETYKYLGMSEALGINAADMKQSLKERFFNRLNKVLNSLLSGGNKVRAFNGWVMPVLMYSFGILKWTQTELDALDRRVRTLLTANRMHHPRSSVMRLYIPRKCGGRGFLNAKTLHNREVCSLREYFLEADVGMHRDVVTVDKGLTPLSLANENWRKPIVLDTNDRREVWQSKELHGRFYRALHGPDVDLLASVSWLRFGDLFGETEGFVFAIMDEVMMTNNYRKYIVKDGTVDICRACHRPGESIRHIISGCSRLANGDYLHRHNLVARIIHQQLALKYILVESEVPYYRYVPDPVLENGNITLYWDRSIITDRTIVANKPDIVVIDRLERRTMIIDIAVPHDENLVKAEKDKQIKYLDLAREVVDMWDVDTAIIVPIVVTANGIIAKSLDQHLKRLSLGSWIKGLIQKAVLLDTARIVRRFLSQEP

SEQ ID NO: 10770 - protein, 1126 aa, Omphaloscelis lunosa
MNENVMRAYYGATEGGINLTAYRSRMLSLFQVLEPTINVSAQRLSDQVRVIQHNHRLDNATLDRLRLEMQNSFASNPPPSQNVVQAPAAVPLQANQHEEEEDGRAISADNLCNVELRSALEDAIREYRFTSPDLRPQLPRLPMNKRNRALVCALDALLPNFIESSANLCDTHSILYCTAVAACRIARVKFPNTDRSVRPKPVAPAWQCRIECRINEARVLIGKLICFREGNTRPRVMRFVRRAFSGTSISPREYVSHVTERIDFLKQKVYAWANRIRRYRRRVDRYTQNRMFQNDERWVYRTWERPTPNQGVTDTRLPNSDAMKAFWQSIWSVPVSHTEGDWMRVVEQACDPIPHMEAISITPLDVARAVRPLPNWKSPGPDGLHNFWLKWLQRSHTCLATQFQSSLDTGSLPLFFTTGVTHLLHKSGSAAEPKNYRPITCLPTIYKVLTSILRAKISHHINNNLIMSVSQNECKNGSRGTKELLLIDMTISQQVRKSRKDLSTCWIDYKKAYDSVPHTWLVRVLELYKIDATLRTFLMSCMRQWRTVLLYPGCRQIRGIDEPIRIERGIFQGDSLSPLWFCLALNPLSTLLEDSGLGYRLRRGGQVISHLLYMDDLKLFAPNNLRLMELLKITETFSSAIRMEFGVDKCAVMHVKRGEIMESVGTQLADSIHLRSLSSTETYKYLGMSEALGINVTDMKQSLKERFFGRLNKVLNSLLSGGNKVRAFNGWVMPVLMYSFGILKWTQTELDALDRKVRTLLTANRMHHPRSSVMRLYIPRKCGGRGFLSAKTLHNREIYSLREHFLQTNVGMHRDVVAVDKGLTPLSLAKENWRKPAVLDTNDRKEIWQGKELHGRFFRALHGPDVDFLTSVSWLRFGDLFGETEGFVCAIMDEVIMTNNYRKYIVKDGTVDICRACHQPGESIRHIVSGCFRLANGEYLHRHNLVARIIHQQLALQYNLIESEVPYYRYVPDPVLENGHTTLYWDRSIITDRTIVANKPDIVVIDRRERRAMIVDIAVPHDDNLVKAEKDKKIKYLDLAHEVVDMWDVDSAIIVPIIVTVNGLIAKSLDQHLRRLSLRGWIKGLIQKAVLLDTARIVRRFLSLEPLPPASWTLFLMPMDHNFLYF

SEQ ID NO: 10771 - protein, 975 aa, Omphaloscelis lunosa
MSPELRPRLPRLPMHNKNKALVAALDSQLSNYFDDCEDLTDTHSILYCAAVAVCRVAHVKFSNDSRATRPKPAVPAWQCRIERRIDGARTLIGKLICFREGNTRPRVMRFVRRAFLGTDISPQDYMTRVTERIDFLKQKVYAWANRIRRYKRRVERYTQNSTFQSDERWVYRAWERPNQGVTDTHLPDEDAMCSFWRSIWSVPVSHTEGDWTREVERACDSIPEMGAITICPQDVARAVRPLPNWKSPGPDGLHNFWIKWFVRSHARLAAQYQTALESGSLPQFLTTGVTHLLHKSGSTAEPKNYRPITCLPTVYKVLTSVLRAKINKHIDTNSIMSASQNGCRNGSRGTKELLLIDMAISQQVRRSRKDLSTCWIDYKKAYDSVPHTWLMRVLELYKVDITLRTFLMSCMGQWRTVLRYPGCRNIQRNSEPIRIERGIFQGDSLSPLWFCLALNPLSTLLEDSGLGYRLRRGGQVISHLLYMDDLKLFAPNNLQLMELLKVTETFSSAIRMEFGVDKCAVMHVKRGKIMESVGTQLSDSINLRALSASETYKYLGMSEALGINVTDMKQSLKERFFGRLKKVLNSLLSGGNKVRAFNGWVMPVLMYSFGILKWSQTELDALDRRVRTLLTAYRMHHPRSSVMRLYIPRKCGGRGFLNAKTLHNREICSLREYFLEADVGMHRDVVVVDKGLIPLSLAKENWRKPVVFDTKDRMEIWQSNELHGRYFRALHGPDVDLPASVAWLRCGDLFGETEGFVCAIMDEVMMTNNYRRFIVKDGTVDICRACHRPGESIRHIISGCSRLANEEYLHRHNLVARIIHQQLALKYSLVESEVPYYRYVPDPVLENGNITLYWDRSIITDRTIVANKPDIVVVDRGERSAMIIDITVPHDENLVKAEKDKQIKYLDLAREVVDMWDVDSAIIVPIVVTANGLIAKSLDQHLRRLSLGSWIKGLVQKAVLLDTARIVRRFLSLEP

SEQ ID NO: 10772 - protein, 1080 aa, Omphaloscelis lunosa
MLSLFQVLEPAVNVSAQRLSDQVRVIQRNHMLDDVVLDRLRLESRNNHVTPASPLVTVQLQNLPSSSPRSDRVGEEDDDGVISVSSQCNVRLRSALEDAFREYRSIPPGLRPQLPRLPMHKKNKALMCTLDSLLSNCFDGSKDLADTHSILYCAAVAACRVAHVKFPNSDRAPRPKPAVPAWQCRIERRIGEARVLIGKLICFREGNTRPRVMRFVKRAFSGTDISFQDYLTRVTERIDFLKQKIYAWANRIRRYRRRVERYTQNRTFQSDKRWVYRAWERLDQGVIDRHLPDDDAMCSFWRSIWSAPVSHTEGDWTREIERACEQIPEMEALTISLQDIARAVRPLPNWKSPGPDGLHNFWIKWFQRSHARLASQFQSALESGSLPQFLTTGITHLLHKSGSTAEPKNYRPITCLPTVYKVFTSILRTKINKHIDTNSIMSASQNGCRNGSRGTKELLLIDMAINQQVRRSRRDLSTCWIDYKKAYDSVPHTWLMRVLELYKVNATLRTFLMSCMGHWRTVLRYPGCRQILRNSEPIRIERGIFQGDSLSPLWFCLALNPLSTLLEDSGLGYRLRRGGQVISHLLYMDDLKLFAPNNLQLLELLKVTETFSSAIRMEFGVDKCAVMHVKRGEIVESVGTQLSDSIQLRSLSSIETYKYLGMSEALGVNAADMKQSLRERFFNRLNKVLNSLLSGGNKVRAFNGWVMPVLMYSFGILKWTQTELDALDRRVRTLLTANRMHHPRSSVMRLYIPRKCGGRGFLNAKTLHNREVCSLREYFLEADVGMHRDVVTVDKGLTPLSLANENWRKPIVLDTNDRREVWQSKELHGRFYRALHGPDVDLLASVSWLRFGDLFGETEGFVFAIMDEVMMTNNYRKYIVKDGTVDICRACHRPGESIRHIISGCSRLANGDYLHRHNLVARIIHQQLALKYSLVESEVPYYRYVPDPVLENGNITLYWDRSIITDRTIVANKPDIVVIDRLERRTMIIDIAVPHDENLVTAEKDKQIKYLDLAREVVDMWDVDTAIIVPIVVTANGIIAKSLDQHLKRLSLGSWIKGLIQKAVLLDTARIVRRFLSQEP

SEQ ID NO: 10773 - protein, 1198 aa, Omphaloscelis lunosa
MLTRSAARRARLPPPDSPLSSASSPPVLSPTVNAVMTPAAAVASSSSDEYFSPPTTPPPARRRGRRRPPDGLGPRGPPASDRVPAPGGRVQRMRWTRSINENVMRSYYGATEGGNNLTAYRVRMLSLFQVLEPAVNVSAQRLSDQVRVIQRNHMLDDTVLDRLRSEMQSSHVIAPPVRSVIVPSQIITSQADERIDDRATNVSTQCNEELRSALEGAIHEYRFMSPELRPRLPRLPMHNKNRALVAALDSQLSNYFDDCEDLTDTHSILYCAAVAVCRVAHVKFSNDSRATRPKPAVPAWQCRIERRICGARTLIGKLICFREGNTRPRVMRFVRRAFLGTDISPQDYMTRVTERIDFLKQKVYAWANRIRRYKRRVERYTQNRTFQSDERWVYRAWERPNQGVTDTHLPDEDAMCSFWRSIWSVPVSHTEGDWTREVERACDSIPEMGAITICPQDVARAVRPLPNWKSPGPDGLHNFWIKWFVRSHARLAAQYQTALESGSLPQFLTTGVTHLLHKSGSTAEPKNYRPITCLPTVYKVLTSVLRAKINKHIDTNSIMSASQNGCRNGSRGTKELLLIDMAISQQVRRSRKDLSTCWIDYKKAYDSVPHTWLMRVLELYKVDITLRTFLMSCMGQWRTVLRYPGCRNIQRNSEPIRIERGIFQGDSLSPLWFCLALNPLSTLLEASGLGYRLRRGGQVISHLLYMDDLKLFAPNNLQLMELLKVTETFSSAIRMEFGVDKCAVMHVKRGKIMESVGTQLSDSINLRALSASETYKYLGMSEALGINVTDMKQSLKERFFGRLKKVLNSLLSGGNKVRAFNGWVMPVLMYSFGILKWSQTELDALDRRVRTLLTAYRMHHPRSSVMRLYIPRKCGGRGFLNAKTLHNREICSLREYFLEADVGMHRDVVVVDKGLTPLSLAKENWRKPVVLDTKNRMEIWQSKELHGRYFRALHGPDVDLPASVAWLRCGDLFGETEGFVCAIMDEVMMTNNYRRFIVKDGTVDICRACHRPGESIRHIISGCSRLANEEYLHRHNLGARIIHQQLALKYSLVESEVPYYRYVPDPVLENGNITLYWDRSIITDRTIVANKPDIVVVDRGERSAMIIDITVPHDENLVKAEKDKQIKYLDLAREVVDMWDVDSAIIVPIVVTANGLIAKSLDQHLRRLSLGSWIKGLVQKAVLLDTARIVRRFLSLEP

SEQ ID NO: 10774 - protein, 1197 aa, Sesamia nonagrioides
MLTRYAARRARPPSPDSLLSSALPPPVSSATVSAVTTPAAAVASSSSDEYFSPPTTPPPVRRRGGRRPPDCLGPRGPPASDRVPAPAGSVQRMRWTQSINENVMRSYYGATEGGTNLTAYRVRMLSLFQVLEPAVNVSAQRLSDQVRVIQRNHMLDDTVLDRLRNEMQSSRIIAHQSQSAEIPPQPTIYADEGSNDRATNVSTQCNEELRNALEAAIREYRSISAVLRPRLPRLPMHNRNRALMGALDAQLSNYFDTCEDLTDTHSILYCAAVAACRVAHVKFPSDSRATRPKPVVPAWQHRIECRIGGARSLIGKLICFREGNTRPRVMRFVRRAFSGTNTSPQNYMARVTERIDFLKQKVYAWANRIRRYKRRVERYTQNRTFQSNERRVYRDWERPEQGVTDTCLPDDDAMCSFWRSIWSVPVSHTEGDWAQDVERACDPIPEMGAITICPQDVAHAVRPLPNWKSPGPDGLHNFWIKWFPRSHARLASQFQTALVSGSLPQFLTTGITHLLHKSGSTAEPKNYRPITCLPTVYKVLTSILKTKINKHIDSNSILSASQNGCRSGSRGTKELLLIDMAISQQVRRSRKDLSTCWIDYKKAYDSVPHTWLMRVLELYKVDATLRTFLMTCMRTWRTVLRYPGCRNIQRNSEPIRIERGIFQGDSLSPLWFCLALNPLSTLLEDSGLGYRLRRGGQVISHLLYMDDLKLFAPNNSQLNELLKITEIFSSSIRMEFGVDKCAVMHVKRGEIMEPVGTQLTSSINLRALSASETYKYLGMSEALGINVTDMKQSLKERFFGRLKKLLNSLLSGGNKVRAFNGWVMPVLMYSFGILKWTQTELDALDQRVRTLLTANRLHHPRSSVMRLYIPRKCGGRGFLNAKTLHNREICSLREYFLETDVGMHRDVVAVDKGLTPLSLAKENWRKPVVLDTNDRMEVWKSKELHGRFFRALHGPDVDFQASVAWLRFGDLFGETEGFVFAIMDEVMMTNNYRRFIVKDGTVDICRACHRPGESIRHIISGCSRLANGEYLHRHNLVARIIHQQLALKYKLVESEVPYYRYMPDPVLENGHITLYWDRSIITDRTIVANKPDIVLVDRSERRAMIVDITIPHDENLVKAEKDKQTKYLDLAHEVVDMWAVDSAIIVPIVVTANGLIAKSLDQHLRRLSLGSWIKGLIQKAVLLDTARIVRKFLSLEP

SEQ ID NO: 10775 - protein, 1197 aa, Sesamia nonagrioides
MLTRSAARRARPPSPDSLLSSASPPPASSTTVSAVTTPAAAVALSSSDEYFSPPTTPPPARRRGGRRPPDRLGPRGPSASDRVPAPGGSVQRMRWTQSINENVMRSYYGATEGGNNLTAYRVRMLSLFQVLEPAVNVSAQRLSDQVRVILRNHMLDDTVLDRLRNEMQSSRIIAHQSQTAEIPPQPTNYTDEGSNDRATNVSTQCNEELINALEAAIREYRFTPAEQRPRLPRLPMHNRNRALMAALDAQLSDYFDTCEDLTDTHSILYCAAVAACRVAHVKFPSDSRATRPKPVVPAWQRRIERRIGGARALIGKLICFREGNTRPRVMRFVRRAFAGTNISPQNYMARVTERIDFLKQKVYAWANRIRRYKRRVERYTQNRTFQNNERWVYRDWERPEQGVTDTCLPDDDAMCSFWRSIWSVPVSHTEGDWARDVERACDPIPEMGAITICPKDVACAVRPLPNWKSPGPDGLHNFWIKWFPRSHARLASQFETALASGSLPQFLTTGITHLLHKSGSTAEPKNYRPITCLPTVYKVLTSILKTKINKHIDSNSIMSASQNGCKSGSRGTKELLLIDMAISQQVRRFRKDLSTCWIDYRKAYDSVPHTWLMRVLELYKVDATLRTFLMSCMKTWRTVLRYPGCRNIQRNSEPIRIERGIFQGDSLSPLWFCLALNPLSTLLEDSGLGYRLRRGGQVISHLLYMDDLKLFAPNNSQLRELLKITETFSSSIRMEFGVDKCAVMHVKRGEIMESVGTQLTDSINLRALSASETYKYLGMSEALGINVTDMKQSLKERFFGRLKKVLNSLLSGGNKVRAFNGWVMPVLMYSFGILKWTQTELDALDQRVRTLLTANRLHHPRSSVMRLYIPRKCGGRGFLNAKTLHNREVCSLRDYFLITDVGMHRDVVAADKGLTPLSLAKENWRKPVVLDTNDRMEVWKSKELHGRFFRALHGPDVDFQASVAWLRFGDLFGETEGFVFAIMDEVMMTNNYRRFIVKDGTVDICQACHRPGESIRHIISGCSRLANGEYLHRHNLVARIIHQQLALKYNLVESEVPYYRYTPDPVLENGYITLYWDRSIITDRTIVANKPDIVMVDRSERRAMIVDITIPHDENLVKAEKDKQIKYLDLAHEVVDMWEVDSAIIVPIVVTANGLIAKSLDQHLRRLSLGSWIKGLIQKAVLLDTARIVRKFLSLEP

SEQ ID NO: 10776 - protein, 1197 aa, Sesamia nonagrioides
MLTRSAARRARPPSPDSLLSSASPPPASSATVSAVTTPAAAVASSSSDEYFSPPTTPPPARRRGGRRPPDRLGPRGPSASDRVPAPGGSVQRMRWTQSINENVMRSYYGATEGGNNLTAYRVRMLSLFQVLEPAVNVSAQRLSDQVRVIQRNHMLDDTVLDRLRNEMQSSRIIAHQSQTAEIPPQPTNYADEGSNDRATNVSTQCNEELINALEAAIREYRFTPAELRPRLPRLPMHNRNRALMAALDAQLSDYFDTCEDLTDTHSILYCAAVAACRVAHVKFLSDSRATRPKPVVPAWQHRIERRIGGARALIGKLICFREGNTRPRVMRFVRRAFAGTNISPQNYMARVTERIDFLKQKVYAWANRIRRYKRRVERYTQNRTFQSNERWVYRDWERPEQGVTDTCLPDDDAMCSFWRSIWSVPVSHTEGDWARDVERACDPIPEMGAITICPQDVACAVRPLPNWKSPGPDGLHNFWIKWFPRSHAHLASQFQTALVSGSLPQFLTTGITHLLHKSGSTAEPKNYRPITCLPTVYKVLTSILKTKINKHIDNNSIMSASQNGCKSGSRGTKELLLIDMAISQQVRRSRKDLSTCWIDYRKAYDSVPHTWLMRVLELYKVDATLRTFLMSCMKTWRTVLRYPGCRNIQRNSEPIRIERGIFQGDSLSPLWFCLALNPLSTLLEDSGLGYRLRRGGQVISHLLYMDDLKLFAPNNSQLRELLKITETFSSSIRMEFGVDKCAVMHVKRGEIMESVGTQLTDSINLRALSASETYKYLGMSEALGINVTDMKQSLKERFFGRLKKVLNSLLSGGNKVRAFNGWVMPVLMYSFGILKWTQTELDALDQRVRTLLTANRLHHPRSSVMRLYIPRKCGGRGFLNAKTLHNREVCSLRDYFLVNDVGMHRDVVAADKGLTPLSLAKENWRKPVVLDTNDRMEVWKSKELHGRFFRALHGPDVDLQASVAWLRFGDLFGETEGFVFAIMDEVMMTNNYRRFIVKDGTVDICRACHRPGESIRHIISGCSRLANGEYLHRHNLVARIIHQQLALKYNLVESEVPYYRYTPDPVLENGYITLYWDRSIITDRTIVANKPDIVMVDRSERRAMIVDITIPHDENLVKAEKDKQIKYLDLAHEVVDMWEVDSAIIVPIVVTANGLIAKSLDQHLRRLSLGSWIKGLIQKAVLLDTARIVRKFLSLEP

SEQ ID NO: 10777 - protein, 1197 aa, Sesamia nonagrioides
MLTRSAARRARPPSPDSLLSSASPPPASSATVSAVTTPAAAVASSSSDEYFSPPTTPPPVRRRGGRRPPDCLGPRGPSASDRVPAPGGSVQRMRWTQSINENVMRSYYGATEGGTNLTAYRVRMLSLFQVLEPAVNVSAQRLSDQVRVIQRNHMLDDTVLDRLRNEMQSSRVIAHQSQSAEIPPQPTNYADEGSNDRATNVSTQCNEELRNALEAAIREYRSISAELRPRLPRLPMHNRNRALMAALDAQLSNYFDTCEDLTDTHSILYCAAVAACRVAHVKFPSDSRATRPKPVVPAWQHRIERRIGGARALIGKLICFREGNTRPRVMRFVRRAFSGTNTSPQNYMARVTERIDFLKQKVYAWANRIRRYKRRVERYTQNRTFQSNERRVYRDWERPEQGVTDTCLPDDDAMCSFWRSIWSVPVSHTEGDWARDVERACDPIPEMGAITICPQDVACAVRPLPNWKSPGPDGLHNFWIKWFPRSHARLASQFQTALVSGSLPQFLTTGITHLLHKSGSTAEPKNYRPITCLPTVYKVLTSILKTKINKHIDSNSILSASQNGCRSGSRGTKELLLIDMAISQQVRRSRKDLSTCWIDYRKAYDSVPHTWLMRVLELYKVDATLRTFLMTCMRTWRTVLRYPGCRNIQRNSEPIRIERGIFQGDSLSPLWFCLALNPLSTLLEDSGLGYRLRRGGQVISHLLYMDDLKLFAPNNSQLRELLKITETFSSSIRMEFGMDKCAVMHVKRGEIMESVGTQLTGSINLRALSASETYKYLGMSEALGINVTDMKQSLKERFFGRLKKVLNSLLSGGNKVRAFNGWVMPVLMYSFGILKWTQTELDALDQRVRTLLTANRLHHPRSSVMRLYIPRKCGGRGFLNAKTLHNREVCSLREYFLETDVGMHRDVVAADKGLTPLSLAKENWRKPVVLDTNDRLEVWKSKELHGRFFRALHGPDVDFQASVAWLRFGDLFGETEGFVFAIMDEVMMTNNYRRFIVKDGTVDICRACHRPGESIRHIISGCSRLANGEYLHRHNLVARIIHQQLALKYKLVESEVPYYRYMPDPVLENGHITLYWDRSIITDRTIVANKPDIVLVDRSERRAMIVDITIPHDENLVKAEKDKQIKYLDLAHEVVDMWEVDSAIIVPIVVTANGLIAKSLDQHLRRLSLGSWIKGLIQKAVLLDTARIVRKFLSLEP

SEQ ID NO: 10778 - protein, 1031 aa, Sesamia nonagrioides
MQSSRIIAHQSQTAEIPPQPTNYADEGSNDRATNVSTQCNEELINALEAAIREYRFTPAEQRPRLPRLPMLNRNRALMAALDAQLSDYFDTCEDLTDTHSILYCAAVAACRVAHVKFPSDSRATRPKPVVPAWQRRIERRIGRARALIGKLICFREGNTRPRVMRFVRRAFAGTNISPQNYMARVTERIDFLKQKVYAWANRIRRYKRRVERYTQNRTFQSNERWVYRDWERPEQGVTDTCLPDDDAMCSFWRSIWSVPVSHTEGDWARDVERACDPIPEMGAITICPQDVACAVRPLPNWKSPGPDGLHNFWIKWFPRSHARLASQFQTALVSGSLPQFLTTGITHLLHKLGSTAEPKNYRPITCLPTVYKVLTSILKTKINKHIDSNSIMSASQNGCKSGSRGTKELLLIDMAISQQVRRSRKDLSTCWIDYRKAYDSVPHTWLMRVLELYKVDATLRTFLMSCMKTWRTVLRYPGCRNIQRNSEPIRIERGIFQGDSLSPLWFCLALNPLSTLLEDSGLGYRLRRGGQVISHLLYMDDLKLFAPNNSQLRELLKITETFSSSIRMEFGVDKCAVMHVKRGEIMESVGTQLTDSINLRALSASETYKYLGMSEALGINVTDMKQSLKERFFGRLKKVLNSLLSGGNKVRAFNGWVMPVLMYSFGILKWTQTELDALDQRVRTLLTANRLHHPRSSVMRLYIPRKCGGRGFLNAKTLHNREVCSLRDYFLVTDVGMHRDVVAADKGLTPLSLAKENWRKPVVLDTNDRMEVWKSKELHGRFFRALHGPDVDFQASVAWLRFGDLFGETEGFVFAIMDEVMMTNNYRRFIVKDGTVDICGACHRPGESIRHIISGCSRLANGEYLHRHNLVARIIHQQLALKYNLVESEVPYYRYTPDPVLENGYITLYWDRSIITDRTIVANKPDIVMVDRSERRAMIVDITIPHDENLVKAEKDKQIKYLDLAHEVVDMWEVDSAIIVPIVVTANGLIAKSLDQHLRRLSLGSWIKGLIQKAVLLDTARIVRKFLSLEP

SEQ ID NO: 10779 - protein, 1200 aa, Sesamia nonagrioides
MLTRSAARCARPPPPDSSLSSASPPPVSSPNVNAVMTPAAVVASSSSDEYFSPPTTPPPARRRGGRRPPDRLGPRGPSASDRVPAPGGSVQRMRWTQSINENVMRSYYGATEGGNNLTAYRVRMLSLFQVLEPAVNVSAQRLSDQVRVIQRNHMLDDVVLDRLRLESRNSHVTPASSLVAVQLNSVSPRPNHVDEEDDDRAISVSPQCNEKLRSALEDAFREYRSIPPEFRPRLPRLPMHKKNKALVCALDSQLSNYLKDSNDLNDTHSILYCGAVAICRVAHVKFPDSDRATRPKSAVPAWQCRIERRIGETRALIGKLISFREGNTRPRVMRFVRRAFSGTDTSTRDYLFRVTERIDFFKQKIYAWANRIRRYRRRVERYSQNRNFQSDERRVYRAWERSDQGVTDTCLPDDDATCSFWRNIWSVPVSHTEGSWTRVVERACDPVPEMGAITICPQDVARAVRPLPNWKSPGPDGLHNFWIKWFSGSHARLASQFQTALESGSLPQFLTTGVTHLLHKSGSTAEPKNYRPITCLPTVYKVLTSILKSKINTHIDSNSIMSASQNGCRSGSRGTKELLLIDMAISQQVRRSRKDLSTCWIDYKKAYDSVPHTWLMRVLELYKVDATLRTFLMTCMRTWRTVLRYPGCRNIQRNSEPIRIERGIFQGDSLSPLWFCLALNPLSTLLEDSGLGYRLRRGGQVISHLLYMDDLKLFAHTDSQLKELLKITETFSSSIRMEFGVDKCAVMHVKRGEIMESVGTQLTSSINLRALSASETYKYLGMSEALGINVTDMKQSLKERFFGRLKKVLNSLLSGGNKVRAFNGWVMPVLMYSFGILKWTQTELDALDRRVRTLLTANRLHHPRSSVMRLYIPRKCGGRGFLNAKTLHNREICSLRQYFLTTDVGMHRDVVAVDKGLTPLSLAKENWRKPVVLDTNDRMEVWKSKELHGRFFKALHGPDVDLQASVAWLRFGDLFGETEGFVCAITDEVMMTNNYRRFIVKDGTVDICRACHRPGESIRHIISGCSRLANGEYLHRHNLVARIIHQQLALKYNLVESEVPYYRYTPDPVLENDHITLYWDRSIITDRTIVANKPDIVLVDRSERRAMIVDITIPHDENLVKAEKDKQIKYLDLAHEVVDMWEVDSAIIVPIVVTANGLIAKSLDQHLRRLSLGSWIKGLIQKAVLLDTARIVRKFLSLEP

SEQ ID NO: 10780 - protein, 1217 aa, Sesamia nonagrioides
MSNSCHLRQNCKIQTKTMLTRSAARRARSPPPDSSPSSASPPPVSSPTVNAVMTPAAAVALSSSDEYFSPPTTPPPVRRRGGRRPPDCLGPRGPPASDRAPATGGNVQRMKWTQSINENVMRAYFGATDGGSNLTAYRGRMLSLFQVLEPAVNVSAQRLSDQVRVIQRNPMLDDVVLDRLRLESRNSHVTPASSLVAVQLNSVPSRPNLVDEEDDDEAISVTPQCNEKVRSALEDAFREYRYTPPELRPRLPRLPMHKKNKALVCALDSQLSNYLKDSKDLADTHSILYCGAVAICRVAHVKFPDSDRATRPKPAVPAWQCRIERRIGETRALIGKLISFREGNTRLRVMRFVRRAFSGTDVSTRDYLLRVTERIDFLKQKIYAWANRIRRYRRRVERYSQNRNFQSDERLVYRAWERSDQGVTDTCLPDDDATRSFWRNIWSVPVSHTEGGWTRDVERACDPVQEMGAITICPQDVARAVRPLPNWKSPGPDGLHNFWIKWFSGSHACLASQFQTALESGSLPQFLTTGITHLLHKSGSTAEPKNFRPITCLSTVYKVLTSILKAKINTHIDSNSIMSASQNGCRNGSRGTKELLLIDMAISQQVRRSRKDLSTCWIDYKKAYDSVPHTWLMRVLELYKVDATLRTFLMTCMSQWRTVLRYPGCRNIQRNSEPIRIELGIFQGDSLSPLWFCLALNPLSTLLEDSGLRYRLRRGGQVISHLLYMDDLKLFAHTNSQLKELLKITETFSSAIRMEFGVDKCAVMHVQRGEIVESVGTQLTGSINLRSLSASETYKYLGMSEALGINVTDMKQSLKERFFGRLKKVLNSLLSGGNKVRAFNGWVMPVLMYSFGILKWTQTELDALDQRARTLLTANRLHHPRSSVMRLYIPRKCGGRGFLNAKTLHNREVCSLREYFLKTDVGMHRDVVAVDKGLTPLSLAKENWRKPVVLETNDRMEVWQSKELHGRFFRALRGPDVDFQASVAWLRYGDLFGETEGFVCAIMDEVMMTNNYRKFIVKDGTVDICRACHRPGESIRHIISGCSRLANGEYLHRHNLVARIIHQQLALKYNLVESEVPYYRYMPDPVLENGHITLYWDRSIITDRTIVANKPDIVMVDRSERRAMIVDITIPHDENLVKAEKDKQIKYLDLAHEVVDMWEVDSAIIVPIVVTANGLIAKSLDQHLRRLSLGGWIKGLIKKAVLLDTARIVRKFLSLEP

SEQ ID NO: 10781 - protein, 1201 aa, Sesamia nonagrioides
MLTRSAARKRARPPSPDSLLSSASPPPVSSPTVSAVTTPAAAVALSSSDEYFSPPTTPPPVRRRGGRRPPDRLGPRGPSASDRVPAPGGSVQRMRWTQSINENVMRSYYGATEGGNNLTAYRVRMLSLFQVLEPAVNVSAQRLSDQVRVIQRNHMLDDVVLDRLRLESRNSHVTPASSLVAVQLNSVSPRPNHVDEEDDDRAISVSPQCNEKLRSALEDAFREYRSIPPELRPRLSRLPMHKKNKALVCALDSQLSNYLKDSKDLNDTHSILYCGAVAICRVAHVKFPDNDRATRPKSAVPAWQCRIERRIGETRALIGKLISFREGNTRPRVMRFVRRAFSGTDTSTRDYLFRVTERIDFFKQKIYAWANRIRRYRRRVERYSQNRNFQSDERRVYRAWERSDQVVTDTCLPDDDATCSFWRNIWSVPVSHTEGSWTRVVERACDPVPEMGAITICPQDVARAVRPLPNWKSPGPDGLHNFWIKWFSGSHARLASQFQTALESGSLPQFLTTGVTHLLHKSGSTAEPKNYRPITCLPTVYKVLTSILKSKINAHIDSNSIMSASQNGCRSGSRGTKELLLIDMAISQQVRRCRKDLSTCWIDYKKAYDSVPHTWLMRVLELYKVDATLRTFLMTCMRTWRTVLRYPGCRNIQRNSEPIRIERGIFQGDSLSPLWFCLALNPLSTLLEDSGLGYRLRRGGQVISHLLYMDDLKLFARTDSQLKELLKITETFSSSIRMEFGVDKCAVMHVKRGEIMESVGTQLTSSINLRALSASETYKYLGMSEALGINVTDMKQSLKERFFGRLKKVLNSLLSGGNKVRAFNGWVMPVLMYSFGILKWTQTELDALDRRVRTLLTANRLHHPRSSVMRLYIPRKCGGRGFLNAKTLHNREICSLREYFLTTDVGMHRDVVAVDKGLTPLSLAKENWRKPVVLDTNDRMEVWKSKELHGRFFKALHGPDVDLQASVAWLRFGDLFGETEGFVCAITDEVMMTNNYRRFIVKDGTVDICRACHRPGESIRHIISGCSRLANGEYLHRHNLVARIIHQQLALKYNLVESEVPYYRYTPDPVLENDHITLYWDRSIITDRTIIANKPDIVLVDRSERRAMIVDITIPHDENLVKAEKDKQIKYLDLAHEVVDMWEVDSAIIVPIVVTANGLIAKSLDQHLRRLSLGSWIKGLIQKAVLLDTARIVRKYLSLEP

SEQ ID NO: 10782 - protein, 1111 aa, Sesamia nonagrioides
MRWTQSINENVMRSYYGATEGGNNLTAYRVRMLSLFQVLEPAVNVSAQRPSDQVRVIQRNHMLDDVVLDRLRLESRNSHVTPASSLVAVQLNSVSPRPNHVDEEDDDRAISVSPQCNEKLRSALEDAFREYRSIPPELRPRLPRLPMHKKNKALVCALDSQLSNYLKDSKDLNDTHSILYCGAVAICRVAHVKFPDNDRATRPKSAVPAWQCRIERRIGETRALIGKLISFREGNTRPRVMRFVRRAFSGTDTSTRDYLFRVTERIDFFKQKIYAWANRIRRYRRRVERYSQNRNFQSDERRVYRAWERSDQGVTDMCLPDDDATCSFWRNIWSVPVSHTEGSWTRVVERACDPVPEMGAITICPQDVARAVRPLPNWKSPGPDGLHNFWIKWFSGSHARLASQFQTALESGSLPQFLTTGVTHLLHKSGSTAEPKNYRPITCLPTVYKVLTSILKSKINTHIDSNSIMSASQNGCRSGSRGTKELLLIDMAISQQVRRCRKDLSTCWIDYKKAYDSVPHTWLMRVLELYKVDATLRTFLMTCMRTWRTVLRYPGCRNIQRNSEPIRIERGIFQGDSLSPLWFCLALNPLSTLLEDSGLGYRLRRGGQVISHLLYMDDLKLFAHTDSQLKELLKITETFSSSIRMEFGVDKCAVMHVKRGEIMESVGTQLTSSINLRALSASETYKYLGMSEALGINVTDMKQSLKERFFGRLKKVLNSLLSGGNKVRAFNGWVMPVLMYSFGILKWTQTELDALDRRVRTLLTANRLHHPRSSVMRLYIPRKCGGRGFLNAKTLHNREICSLREYFLTTDVGMHRDVVAVDKGLTTLSLAKENWRKPVVLDTNDRMEVWKSKELHGRFFKALHGPDVDLQASVAWLRFGDLFGETEGFVCAITDEVMMTNNYRRFIVKDGTVDICRACHRPGESIRHIISGCSRLANGEYLHRHNLVARIIHQQLALKYNLVESEVPYYRYTPDPVLENDHITLYWDRSIITDRTIIANKPDIVLVDRSERRAMIVDITIPHDENLVKAEKDKQIKYLDLAHEVVDMWEVDSAIIVPIVVTANGLIAKSLDQHLRRLSLGSWIKGLIQKAYCWTRLASSGSSSLWSPDRR

SEQ ID NO: 10783 - protein, 1197 aa, Sesamia nonagrioides
MLTRSAARRARPPSPDSLLSSASPPPASSATVSAVTTPAAAVASSSSDEYFSPSTTPPPARRRGGRRPPDRLGPRGPSASDRVPAPGGSVQRMRWTQSINENVMRSYYGATEGGNNLTAYRVRMLSLFQVLEPAVNVSAQRLSDQVRVIQRNHMLDDSVLDRLRNEMQSSRIIAHQSQTAEIPPQPTNYADEGSNDRATNVSTQCNEELINALEAAIREYRSISAELRPRLPRLPMHNRNRALMAALDAQLSNYFDTCEDLTDTHSILYCAAVAACRVAHVKFPSDSRATRPKPVVPAWQHRIERRIGGARALIGKLICFREGNTRPRVMRFVRRAFAGTNISPQNYMARVTERIDFLKQKVYAWANRIRRYKRRVERYTQNRTFQSNERWVYRDWERPEQGVTDTCLPDDDAMCSFWRSIWSVPVSHTEGDWARDVERACDPIPEMGAITICPQDVACAVRPLPNWKSPGPDGLHNFWIKWFPMSHARLASQFQTALVSGSLPQFLTTGITHLLHKSGSPAEPKNYRPITCLPTVYKVLTSILKTKINKHIDGNSIMSASQNGCKSGSRGTKELLLIDMAISQQVRRSRKDLSTCWIDYRKAYDSVPHTWLMRVLELYKVDAALRTFLMSCMKTWRTVLRYPGCRNIQRNSEPIRIERGIFQGDSLSPLWFCLALNPLSTLLEDSGLGYRLRRGGQVISHLLYMDDLKLFAPNNSQLRELLKITETFSSSIRMEFGVDKCAVMHVKRGEIMESVGTQLTDSINLRALSASETYKYLGMSEALGINVTDMKQSLKERFFGRLKKVLNSLLSGGNKMRAFNGWVMPVLMYSFGILKWTQTELDALDQRVRTLLTANRLHHPRSSVMRLYIPRKCGGRGFLNAKTLHNREVCSLRDYFLVNDVGMHRDVVAADKGLTPLSLAKENWRKPVVLDTNDRMEVWKSKELHGRFFRALHGPDVDLQASVAWLRFGDLFGETEGFVFAIMDEVMMTNNYRRFIVKDGTVDICRACHRPGESIRHIISGCSRLANREYLHRHNLVARIIHQQLALKYNLVESEVPYYRYTPDPVLENGYITLYWDRSIITDRTIVANKPNIVMVDRSERRAMIVDITIPHDENLVKAEKDKQIKYLDLAHEVVDMWEVDSAIIVPIVVTANGLIAKSLDQHLRRLSLGSWIKGLIQKAVLLDTARIVRKFLSLEP

SEQ ID NO: 10784 - protein, 1198 aa, Apamea monoglypha
MLTRSAARRARLPSPDSSLSSASPPPVPSPTVSAVTTPAAVVASSSSDEYFSPPTTPPPARRRGGRRPPDGLGPRGPLASDRVPAPGGSVQRMRWTRSINENVMRSYYGATEGGNNLTAYRVRMLSLFQVLEPAVNVSAQRLSDQVRVIQRNHMLDDTVLDRLRSEMQSSHVIAPQSQTAAVLPQSNTSHADEGSNDRATNVSIQCNEELRNALEGAIREYRFMSPELRPRLPRLPMHNKNRALVAVLDAQLSSHFDACEDLTDTHSILYCAAVAACRVAHVKFDSDSRATRPKPAIPAWQCRIERRIGGARALIGKLICFREGNTRPRVMRFVRRAFLGTDISSQDYLSRVTERIDFLKQKVYAWANRIRRYKRRVERYTQNRTFQSDERWVYRSWERPDQSVADTCLPDDDAMCSFWRSIWSAPVSHTEGDWTGKIERACELIPEMGAITICPQDVARAVRPLPNWKSPGPDGLHNFWIKWFQRSHAPLAAQFQSALESGLLPQFITTGITHLLHKSGSTADPKNYRPITCLPTIYKVLTSILRAKINKHIDSNSIMSVSQNGCRNGSRGTKELLLIDMAISQQVRRSRKDLSTCWIDYKKAYDSVPHTWLMRVLELYKVDTTLRTFLMTCMGQWRTVLRYPGCRNIQRNSEPIRIERGIFQGDSLSPLWFCLALNPLSTLLDDSGLGYRLRRGGQVISHLLYMDDLKLFAPNNLQLMKLLKITETFSSAIRMEFGVDKCAVMHVKRGEIVESVGTQLSDFTNLRALSAAETYKYLGMSEALGINVTDMKQSLKERFFGRLKKVFNSLLSGGNKVRAFNSWVMPVLMYSFGILKWTQTELEALDRRVRTLLTANRMHHPRSSVMRLYIPRKCGGRGFLNAKTLHNREICSLREYFLETDVGMHRDVVAVDKGLTPLSLAKENWRKPVVLDTNDRMEVWQSKELHGRFYRALHGPDVDLLASVAWLRFGDLFGETEGFVCAIMDEVMMTNNYRRYIVKDGTVDICRACHRPGESIRHIISGCSRLANGEYLHRHNLVARIIHQQLALKYSLVESEVPYYRYVPDPVLENGNITLYWDRSIITDRTIVANKPDIVVVDRSERRAMIVDITVPHDENLVKAEKDKQIKYLDLAHEVVDMWDVDSAIIVPIVVSANGLIAKSLDQHLRRLSLGSWIKGLIQKAVLLDTARIVRRFLSLEP

SEQ ID NO: 10785 - protein, 1200 aa, Apamea monoglypha
MMMLTRSAARRARPPPSDSSLSSASPPPVPSLTVSAVTTPAAVVASSSSDEYFSPPTTPPPARRRGGRRPPDGLGPRGPPASDRVPAPGGSVQRMRWTQSINENVMRSYYGATEGGNNLTAYRIRMLSLFQVLEPAVNVTAQRLSDQVRVIQRNHMLDDTVLDRLRNEMQSSHVVAPQSQTAAVLPQSNTSHADEGSNDRATNVSIQCNEELRNALEGAIREYRFMSPELRSRLPRLPMHNKNRALVAVLDAQLSSYFDVCEDLTDTHSILYCAAVAACRVAHVKFASDSRATRPKPAIPPWQCRIERRIGGARALIGTLICFREGNTRPRVMRFVRRAFSGTDISSQDYLSRVTEHIDFLKQKVYAWANRIRRYKQRVDRYTQNRTFQSDERWVYRGWERSDQGVADTCLPDDDAMCSFWRSIWSVPVSHTEGDRAGEVERACDVIPEMEAITICPQDVARAVPPLPNWKSPGPDGLHNFWIKWFSRSHARLASQFQTALESGSLPQFLTTGVTHLLHKSGNTAEPKNYRPITCLPTVYKVLTSILRAKINKHIDTNSIMSASQNGCKNGSRGTKELLLIDMAISQQVRRSRKDLSTYWIDYKKAYDSVPHTWLMRVLDLYKVDATLRTFLMSCMRQWRTVLRYPGCRNIQRNSEPIRIERGIFQGDSLSPLWFCLALNPLSTLLEDSGLGYRLRRGGQVISHLLYMDDLKLFAPNNLQLMELLKVTETFSSAIRMEFGVDKCAVMHVKRGEIVESEGIQLSDSTNLRALSASETYKYLCMSEALGINVTDTKQSLKERFFGRLKKVLNSLLSGGNKVRAFNSWVMPVLMYSFGILKWTQTELDALDRRVRTLLTANRMHHPRSSVMRLYIPRKCGGRGFLNAKTLHNREICSLREYFLETDVGMHRDVVAVDKGLTPLSLAKENWRKPVVLDTNDRMEVWQSKELHGRFYRALHGPDVDLLASVAWLRFGDLFGETEGFVCAIMDEVMMTNNYRRFIVKDGTVDICRACHRPGESIRLIISGCSRLANGEYLHRHNLVARIIHQQLALKYNLVESEVPYYRYVPDPVLENGNITLYWDRSIITDRTVVANKPDIVVVDRSERRAMIVDITVPHDENLVKAEKDKQIKYLDLAREVVDMWDVDSAIIVPIVVTANGLIAKSLDQHLRRLSLGSWIKGLIQKAVLLDTARIVRRFLSLEP

SEQ ID NO: 10786 - protein, 975 aa, Apamea monoglypha
MSPELRPRLPRLPMHNKNRALVAVLDAQLSSHFDACEDLTDTHSILYCAAVAACRVAHVKFDSDSRATRPKPAIPAWQCRIERRIGGARALIGKLICFREGNTRPRVMRFVRRAFLGTDISSQDYLSRVTERIDFLKQKMYAWANRIRRYKRRVERYTQNHTFQSDERWVYRGWERPDQDVADTCLPDDDAMCSFWRSIWSAPVSHTEGDWAREVERACDPIPEMEAITICPQDVARAVRPLPNWKSPGPDGLHNFWIKWFTRSHARLASQFQTALESGSLPQFLTTGVTHLLQKSGSTAEPKNYRPITCLPTVYKVLTSILRAKINKHINTNSIMSASQNGCKNGSRGTKELLLIDMAISQQVRRSRKDLSTCWIDYKKAYDSVPHTWLMRVLDLYKVDATLRTFLMSCMGQWRTVLRYPGCRNIQRNSEPIRIERGIFQGDSLSPLWFCLALNPLSTLLEDSGLGYRLRRGGQVISHLLYMDDLKLFAPNNLQLMELLKVTETFSSAIRMEFGVDKCAVMHVKRGEIVESVGTQLSDSTNLRALSVSETYKYLGMSEALGINVTDMKQSLKERFFGRLKKVLNSLLSGGNKVRAFNSWVMPVLMYSFGILKWTQTELDALDRRVRTQLTANRMHHPRSSVMRLYIPRKCGGRGFLNAKTLHNREICSLREYFLETDVGMHRDVVAVDKGLTPLSLAKENWRKPVVLDTNDRMEVWQSKELHGRFYRALHGPDVDLLASVAWLRFGDLFGETEGFVCAIMDEVMMTNNYRRFIVKDGTVDICRACHRPGESIRHIISGCSRLANGEYLHRHNLVARIIHQQLALKYSLVESEVPYYRYVPDPVLKNGNITLYWDRSIITDRTIVANKPDIVVVDRSERRAMIVDITVPHDENLVKAEKDKQIKYLDLAREVVDMWDVDSAVIVPIVVTANGLIAKSLDQHLRRLSLGSWIKGLIQKAVLLDTARIVRRFLSLEP

SEQ ID NO: 10787 - protein, 1045 aa, Apamea monoglypha
MLDDTVLDRLRSEMQSSHVIAHQSQTAAVLPQSNTSHADEGSNDMATNVSIQCNEDLRNALEGAIREYRFMSPELRPRLPRLPMHNKNRALVAVLDAQLSSHFDVCEDLTDTHSILYCAAVAACRVAHVKFASDSEATRPKPAIPAWQCRIERRIGGARALIGKLICFREGNTRPRVMRFVRRAFLGTDISSQDYLSRVTERIDFLKQKVYAWANRIRRYKRRVERYTQNRTFQSDERWVYRGWERPDQSVADTCLPDDDAMCSFWRSIWSEPVSHTEGDWTGKIERACELIPEMGAITICPQDVARAVRPLPNWKSPGPDGLHNFWIKWFQRSHAPLAAQFQSALESGLLPQFITTGITHLLHKSGSTADPKNYRPITCLPTIYKVLTSILRAKINKHIDSNSIMSVSQNGCRNGSRGTKELLLIDMAISQQVRRSRKDLSTCWIDYKKAYDSVPHTWLMRVLELYKVDTTLRTFLMTCMGQWRTVLRYPGCRNIQRNSEPIRIERGIFQGDSLSPLWFCLALNPLSTLLDDSGLGYRLRRGGQVISHLLYMDDLKLFAPNNLQLMKLLKITETFSSAIRMEFGVDKCAVMHVKRGEIVESVGTQLSDFTNLRALSAAESYKYLGMSEALGINVTDMKQSLKERFFGRLKKVFNSLLSGGNKVRAFNSWVMPVLMYSFGILKWTQTELEALDRRVRTLLTANRMHHPRSSVMRLYIPRKCGGRGFLNAKTLHNREICSLREYFLETDVGMHRDVVAVDKGLTPLSLAKENWRKPVVLDTNDRMEVWQSKELHGRFYRALHGPDVDLLASVAWLRFGDLFGETEGFVCAIMDEVMMTNNYRRYIVKDGTVDICRACHRPGESIRHIISGCSRLANGEYLHRHNLVARIIHQQLALKYSLVESEVPYYRYVPDPVLENGNITLYWDRSIITDRTIVANKPDIVVVDRSERRAMIVDITVPHDENLVKAEKDKQIKYLDLAREVVDMWHVDSAIIVPIVVTANGLIAKSLDQHLRRLSLGSWIKGLIQKAVLLDTARIVRRFLSLEP

SEQ ID NO: 10788 - protein, 1045 aa, Apamea monoglypha
MLDDTVLDRLRSEMQSSHVIAPQSQTAAVLPQSNTSHADEGSNDRATNVSIQCNEELRNALEGAIREYRFMSPELRPRLPRLPMHNKNRALVAVLDAQLSSHFDACEDLTDTHSILYCAAVAACRVAHVKFDSDSRATRPKPAIPAWQCRIERRIGGARALIGKLICFREGNTRPRVMRFVRRAFLGTDISSQDYLSRVTERIDFLKQKVYAWANRIRRYKRRVERYTQNRTFQSDERWVYRGWERPDQSVADTCLPDDDAMCSFWRSIWSAPVSHTEGDWTGKIERACELIPEMGAITICPQDVARAVRPLPNWKSPGPDGLHNFWIKWFQRSHAPLAAQFQSALESGLLPQFITTGITHLLHKSGSTADPKNYRPITCLPTIYKVLTSILRAKINKHIDSNSIMSVSQNGCRNGSRGTKELLLIDMAISQQVRRSRKDLSTCWIDYKKAYDSVPHTWLMRVLELYKVDTTLRTFLMTCMGQWRTVLRYPGCRNIQRNSEPTRIERGIFQGDSLSPLWFCLALNPLSTLLDDSGLGYRLRRGGQVISHLLYMDDLKLFAPNNLQLMKLLKITETFSSAIRMEFGVDKCAVMHVKRGEIVESVGTQLSDFTNLRALSAAETYKYLGMSEALGINVTDMKQSLKERFFGRLKKVFNSLLSGGNKVRAFNSWVMPVLMYSFGILKWTQTELEALDRRVRTLLTANRMHHPRSSVMRLYIPRKSGGRGFLNAKTLHNREICSLREYFLETDVGMHRDVVAVDKGLTPLSLAKENWRKPVVLDTNDRMEVWQSKELHGRFYRALHGPDVDLLASVAWLRFGDLFGETEGFVCAIMDEVMMTNNYRRYIVKDGTVDICRACHRPGESIRHIISGCSRLANGEYLHRHNLVARIIHQQLALKYSLVESEVPYYRYVPDPVLENGNITLYWDRSIITDRTIVANKPDIVVVDRSERRAMIVDITVPHDENLVKAEKDKQIKYLDLAREVVDMWDVDSAIIVPIVVSANGLIAKSLDQHLRRLSLGSWIKGLIQKAVLLDTARIVRRFLSLEP

SEQ ID NO: 10789 - protein, 1200 aa, Furcula furcula
MLTRSRNKARLRPPDSSPRSASQSPQLNQEANGTPAPVASSESNEYFSPPTSPPPVRRRRGRPPRELGLLEQPAPNRVLAPGGVVRRMRWTSSINENVMRAYYEATEGGTSLTAYRNRMLSLFQALEPAVNVSAQRLSDQVRAIQRSHMLDGAVLDRLRSEVQGSRVAPCTSSSQAVAPAVNTAPAPRLVAISDDDRDDITTNVSTNISTQLRSTLEDVVREYRTMPCGLRPRLPRLPMHKRNRALVCALDSLLSSYFDSSEDLADAHSLLYCAAMTACRVARVKLQNTDAATRPRPAVPAWQCRIERRIGEARVLIGKLTCFREGNTRPRVMRFVRRAFSGTGIDPREYLSRVTERIDFLKQKVCAWASRIRRYRARADRYFQNNMFQRDQRWVYRSWERPSQTEGDVRRPDDDAMATFWRNIWSVPVTHSEGDWIGDVEQVCEPLPEMGAITIWPQDVADAVRLLPNWKAPGPDGLHNFWLKSIRSSHICLASLFQSALESGSLPEFMTTGITHLLHKTNSTTDPKNYRPITCLPTVYKTLTSILRTKIYRHVEDNSIMSASQNGCRSGARGTKELLLIDMAICQQARRNRKDLSTCWIDYKKAYDSVPHTWLMRVLELYKVNATLRTFLASCMRQWRTVLRYPGSRQTLGDGEPIRIERGIFQGDSLSPLWFCLALNPLSTLLKSSGLGYRLRRGGQVISHLLYMDDLKLFAPTELQLMGLLRVTETFSNSIRMEFGVDKCAVMHVKRGRIVESRSVQLSDSTDLKTLSATETYKYLGMSQALGINETDMKQSLRDRFLGRLRKVLKCLLSGGNRVRAYNGWVMPVLMYSFGILKWTQTELDTLDRTVRTLLTTYRMHHPRSSVMRLYIPRKCGGRGFLNAKTLHNREIYNLREYFLHCGGEMRTDVVAVDNGLTPLSLAKGNWRKPVVLTTGDREAVWQSKELHGRFYRALHRPDVDFSASVAWLRFGDLFGETEGFVCAIMDEVVMTNNYRKYILRDGTIDICRACHRPGESLRHIISGCSRLANGEYLHRHNQVARIIHQQLALRYRLVTSEVPYYRYVPEPVLEDGHITLYWDRSIITDRTIVANRPDIVLIDRTERRAMIVDVTVPHDENLVKAEKDKECKYLDLAHEVVDMWDIDKAIIVPIVVSAHGLMAKSLDKHLKRLTLDGWIKGQIQKAVLLETARIVRRFLSLEP

SEQ ID NO: 10790 - protein, 1196 aa, Furcula furcula
MLTRNKARMRPPGSPPRSASQSSRLNAEADGTPAAVASSESDEYFSPPTSPPPVCRRRGRPPRDMGRLEQPAPNRVLAPGGVVRRMKWTSSINESVMRAYYEATEGGTNLTAYRNRMLSLFQALEPAVNVSAQRLSDQVRAIQRGHMLDGPVLDRLRSEVQGSRVAPCIPSSQAVAPVVNTALVPRLAANSDDDWDDMTTDVSTNVSTQLRSTLEDVVREYRTMPQSLRPRLPRLPMHRRNRALVCALDSLLSSYFDSSEDLADAHALLYCAAITACRVARVKFPDAATRPKPAVPAWQYRIERRIGEARVLIGKLTCFREGNTRPRVMRFVRRAFSGTGIDPREYLSRVTERIDFLKQKVCAWASRVRRYRARVDRYSQNNMFQRDQRWVYRSWERPSQTVGEVQRPDDDAMIRFWRNIWSVPVAHSEGDWIGDVEEECEPLPEMGPITIGPQDVADAVRPLPNWKAPGPDGLHYFWLKWLHSSHVCLASLFQSALESGSLPEFMTTGITHLLHKTDSTTNPKNYRPITCLPTVYKTLTSILRAKIYRHVEDNSIMSSSQNGCRSGARGTKELLLIDMAICQQARRNRKDLSTCWIDYKKAFDSVPHTWLMRVLELYKVNTTLRTFLASCMRQWRTVLLYPGSRQTLGNGDPIRIERGIFQGDSLSPLWFCLALNPLSTLLKSSGLGCRLRRGGQVISHLLYMDDLKLFAPTELQLTGLLKVTETFSNSIRMEFGVDKCAVMHVKRGRMVESRSVQLSDSTDLRTLSATETYKYLGMSQALNINETDMKQSLRERFLGRLRKVLKSLLSGGNRVRAYNGWVMPVLMYSFGILKWTQTELDALDRTVRTLLTTYRMHHPRSSVMRLYIPRKCGGRGFLNAKTLHNREIYNLREYFLHCGGEMHTDVVAVDNGLTPLSLAKGNWRKPVVLTTGDREAVWQSKELHGRFYRALHGPDVDFSASVAWLRFGDLFGETEGFVCAIMDEVVMTNNYRKYILRDGTIDICRACHRPGESLRHIISGCSRLANGEYLHRHNQVARIIHQQLALKYRLVTSEVPYYRYVPEPVLEDSHITLYWDRSIITDRTIVANKPDIVLIDRTERRAMIVDVTVPHDENLVKAEKDKQCKYHDLAHEVVDMWDIDNAIIVPIVVSAHGLMAKSLDKHLKRLTLDGWIKGQMQKAVLLETARIVRKFLSLEP

SEQ ID NO: 10791 - protein, 1200 aa, Furcula furcula
MLTRSRNKARLRPPDSSPRSASQSPQLNQEANGTPAPAASSESDEYFSPPTSPPPVRRRRGRPPRELGLLEQPAPNRVLAPGGVVRRMRWTSSINENVMRAYYEATEGGTSLTAYRNRMLSLFQALEPAVNVSAQRLSDQVRAIQRSHMLDGAVLDRLRSEVQGSRVAPCTSSSQAVAPAVNTAPAPRLVAISDDDRDDITTNVSTNISTQLRSTLEDVVREYRTMPCGLRPRLPRLPMHKRNRALVCALDSLLSCYFDSSEDLADAHSLLYCAAMTACRVARVKLQNTDAATRPRPAVPAWQCRIERRIGEARVLIGKLTCFREGNTRPRVMRFVRRAFSGTGIDPREYLSRVTERIDFLKQKVCAWASRIRRYRARADRYFQNNMFQRDQRWVYRSWERPSHTEGDVRRPDDDAMATFWRNIWSVPVTHSEGDWIGDVEQVCEPLPEMGAITIWPQDVADAVRLLPNWKAPGPDGLHNFWLKSIRSSHICLASLFQSALESGSLPEFMTTGITHLLHKTNSTTDPKNYRPITCLPTVYKTLTSILRTKIYRHVEDNSIMSASQNGCRSGARGTKELLLIDMAICQQARRNRKDLSTCWIDYKKAYDSVPHTWLMRVLELYKVNATLRTFLASCMRQWRTVLRYPGSRQTLGDGEPIRIEGGIFQGDSLSPLWFCLALNPLSTLLKSSGLGYRLRRGGQVISHLLYMDDLKLFAPTELQLMGLLRVTETFSNSIRMEFGVDKCAVMHVKRGRIVESRSVQLSDSTDLKTLSATETYKYLGMSQALGINETDMKQSLRDRFLGRLRKVLKSLLSGGNRVRAYNGWVMPVLMYSFGILKWTQTELDTLDRTVRTLLTTYRMHHPRSSVMRLYIPRKCGGRGFLNAKTQHNREIYNLREYFLHCGGEMHTDVVAVDNGLTPLSLAKGNWRKPVVLTTGDREAVWQSKELHGRFYRALHGPDVDFSASVAWLRFGDLFGETEGFVCAIMDEVVMTNNYRKYILRDGTIDICRACHRPGESLRHIISGCSRLANGEYVHRHNQVARIIHQQLALRYRLVTSEVPYYRYVPEPVLEDGHITLYWDRSIITDRTIVANRPDIVLIDRTERRAMIVDVTVPHDENLVKAEKDKECKYLDLAHEVVDMWDIDKAIIVPIVVSAHGLMAKSLDKHLKRLTLDGWIKGQIQKAVLLETARIVRRFLSLEP

SEQ ID NO: 10792 - protein, 1196 aa, Furcula furcula
MLTRHKARLRPPDSSPRSASQPPAPSTGGPPAAVASSESDEYFSPPSSPPPVCRRRGLPPRDLGLLGQPAPNRVLVPGGVVRRMKWTLSINENVMRAYYGATEGGTNLTAYRDRMLSLFQTLEPAVNVSAQRLSDQVRAIQRGHMLDDAVLDRLRSEVQGSRVVPCIPSSQAVAPAVNAAPAPRLAATSGDDRDDMSTNISTNVSTQLRSTLEDVVREYRTMPQGLRPRLPRLPMHKRNRALVCALDSLLSSYFDSSEDLADAHSLLYCAAMTACRVARVKFPNSDAATRPRPAVPAWQCRIERRIGEARVLIGKLACFREGNTRPRVMRFVRRAFSGTGIDPREYFSCVTERIDFLKQKVCAWANRIRRYRARVDRYSQNNMFQRDQRWVYRSWERPSQIGGEVQRPDDDAMIRFWRNIWSVPVTHSEGDWIRDIEQVCEPIPEMGAITIRPQDVADAVRPLPNWKAPGPDGLHNFWLKWLRSSHACLASLFQSAVESGSLPEFLTTGITHLLHKTNSTADPKNYRPITCLPTVYKTLTSILRAKIYRHVEGNSIMSASQNGCRSGARGTKELLLIDMAICQQARRNRKDLSTCWIDYKKAYDSVPHTWLVRVLELYKVNTTLRTFLASCMRQWRTVLLYPGSRQTLGDGEPIRIERGIFQGDSLSPLWFCLALNPLSTLLKSLGLGYRLRRGGQVISHLLYMDDLKLFAPTEVQLMGLLKVTETFSSSIRMEFGVDKCAVMHVKRGRLVESRSIQLSDSTDLRTLSATETYKYLGMSQALGINETDMKQSLRERFLGRLRKVLKSLLSGGNRVRAYNGWVMPVLMYSFGILKWTQTELDTLDRTVRTLLTAYRMHHPRSSVMRLYIPRKCGGRGFLNAKTLHNREIYNLREYFLHCGGEMHTDVVAVDSGLTPLSLAKGNWRRPVVLTTGDREAVWQSKELHGRFYRALHGPDVDFSASVAWLRFGDLFGETEVSVCAIMDEVVMTNNYRKYILRDGTIDICRACHRPGESLRHIISGCSRLANGEYLHRHNQVARIIHQQLALKYRLVTSEVPYYRYVPEPVLEDGHITLYWDRSIITDRTIVANRPDIVLIDRTERRAMIVDVTVPHDENLVKAEKDKESKYLDLAHEVVDLWDIDKAIIVPIVVSAHGLMAKSLDKHLKRLTLDGWIKGQMQKAVLLETARIVRKFLSLEP

SEQ ID NO: 10793 - protein, 1113 aa, Furcula furcula
MRWTSSINENVMRAYYEATEGGTSLTAYRNRMLSLFQALEPAVNVSAQRLSDQVRAIQRSHMLDGAVLDRLRSEVQGSRVAPCTSSSQAVAPVVNTAPAPRLVAISDDDRDDITTNVSTNISTQLRSTLEDVVREYRTMPCGLRPRLPRLPMHKRNRALVCALDSLLSSYFDSSEDLADAHSLLYCAAMTACRVARVKLQNTDAATRPRPAVPPWQCRIERRIGEARVLIGKLTCFREGNTRPRVMRFVRRAFSGTGIDPREYLSRVTERIDFLKQKVCAWASRIRRYRARADRYFQSNMFQRDQRWVYRSWERPSQTEGDVRRPDDDAMATFWRNIWSVPVTHSEGDWIGDVEQVCEPLPEMGAITIWPQDVADAVRLLPNWKAPGPDGLHNFWLKSIRSSHICLASLFQSALESGSLPEFMTTGITHLLHKTNSTTDPKNYRPITCLPTVYKTLTSILRTKIYRHVEDNSIMSASQNGCRSGARGTKELLLIDMAICQQARRNRKDLSTCWIDYKKAYDSVPHTWLMRVLELYKVNATLRTFLASCMRQWRTVLRYPGSRQTLGDGEPIRIERGIFQGDSLSPLWFCLALNPLSTLLKSSGLGYRLRRGGQVISHLLYMDDLKLFAPTELQLMGLLRVTETFSNSIRMEFGVDKCAVMHVKRGRIVESRSVQLSDSTDLKTLSATETYKYLGMSQALGINETDMKQSLRDRFLGRLRKVLKSLLSGGNRVRAYNGWVMPVLMYSFGILKWTQTELDTLDRTVRTLLTTYRMHHPRSSVMRLYIPRKCGGRGFLNAKTLHNREIYNLREYFLHCGGEMHTDVVAVDNGLTPLSLAKGNWRKPVVLTTGDREAVWQSKELHGRFYRALHGPDVDFSASVAWLRFGDLFGETEGFVCAIMDEVVMTNNYRKYILRDGTIDICRACHRPGESLRHIISGCSRLANGEYLHRHNQVARIIHQQLALIYRLVTSEVPYYRYVPEPVLEDGHITLYWDRSIITDRTIVANRPDIVLIDRTERRAMIVDVTVPHDENLVKAEKDKECKYLDLAHEVVDMWDIDKAIIVPIVVSAHGLMAKSLDKHLKRLTLDGWIKGQIQKAVLLETARIVRRSLSLEP

SEQ ID NO: 10794 - protein, 1196 aa, Furcula furcula
MLTRNRAHPRPPDSSPRSASQPLGPSTDGSLAAVASSGSDEYFSPPTSPPPVRRRRGRPPRVLGSLEQPAPNRVLAPGGVVRRMRWTSSINENVMRAYYEATERGTNLTAYRLRMLSLFQALEPAVNVSAQRLSDQVRAIQRGHMLDDAVLDRLRAEVQGSRVAPCISSSQAVAPAVNIVPAPRPATNSDDDRDDMTTDVSTNLNTQLRSTLEDVVREYRTMPLNLRPRLPRLPMHKRNRALVCALDSLLSSYFDSSEDLADAHSLLYCAAMTACRVARVKFPSTDAAMRPRPAVPAWQFRIECRIGEARVLIGKLNCFREGNTRPRVMRFVRRAFSGTGIDPREYLSRVTERIDFLKQKVCAWANRIRRYKARVDRYSQNNMFQRDQRWVYRSWERSSQIEGDGRRPDDSAMTTFWRNIWSVPVTHSEGDWMRDVEQICEPLPEMGAITIRPQDVADAVRPMPNWKAPGPDGLHNFWLKWIRSSHICLASLFQSALESGSLPEFMTMGITHLLHKTSSTTDPKNYRPITCLPTVYKTLTSILRAKIYRHVEDNSIMSASQNGCRSGARGTKELLLIDMAICQQARRNRKDLSTCWIDYKKAYDSVPHTWLMRVLELYKVNPTLRTFLASCMRQWRTVLLYPGSRQILGNGDPIRIERGIFQGDSLSPLWFCLALNPLSTLLRGSGLGCRLRRGGQVISHLLYMDDLKLFAPTELQLMGLLKVTETFSNSISMEFGVDKCAVMHVKRGRMVESRSVQLLDTTDLRTLSATETYKYLGMSQALGINETDMKQSLRERFLGRLRKVLKSLLSGGNRVRAYNGWVMPVLMYSFGILKWTQTELDTLDRTVRTLLTTYRMHHPRSSVMRLYIPRKCGGRGFLNAKTLHNREICNLREYFLHCGGVMHTDVVAVDNGLTPLSLAKGNWRKPVVLTTGNREAVWQSKELHGRFYRALHGPDVDFSASVAWLRFGDLFGETEGFVCAIMDEVVMTNNYRKYILRDGTIDICRACHRPGESLRHIISGCSRLANGEYLHRHNQVARIIHQQLALKYRLVMSEVPYYRYVPEPVLEDGHITLYWDRSIITDRTIVANKPDIVLIDRNERRAMIVDVTVPHDENLVKAEKDKECKYLDLAHEVVDMWDIDRAIIVPIVVSAHGLMAKSLDKHLKRLTLGGWIKGQMQKAVLLETARIVRRFLSLEP

SEQ ID NO: 10795 - protein, 906 aa, Mamestra configurata
MIELHDQNSRTGLAVQDRASYRWGGALIGKLICFREGNTRPRVMRFVRRAFSGTDISPRDYMSRVTERIEFLKQKVYAWANRIRRYRRRVERYTQNRTFRSNERWVYRVWEQPDQGVTDTRLDDDAMCSFWRNIWSVPEGDWIREVERACDPLPEVGAITISPQDVARAVRPLPNWKSPGPDGLHNFWIKWLQRSHARLASQYQTALESGSLPEFLTTGVTHLLHKSGSTAEPKNYRPITCLPTVYKVLTSILRAKINNHINSNNIMSVSQNGCRNGSRGTKELLLIDMAISQQVRRSRKDLSTCWIDYKKAYDSVPHTWLMRVLELYKIDTMLRTFLMSCMGQWRTVLRYPGCRNIQRNSEPVRIERGIFQGDSLSPLWFCLALNPLSTLLENSGLGYRLKRGGQVISHLLYMDDLKLFAPSNLQLMELLKVTETFSSAIRMEFGVDKCAVMHVKRGEIMESVGTQLSDSINLRSLSSTETYKYLGMSEALGINVTDMKQSLKERFFGRLKKVFNSLLSGGNKVRAFNGWVMPVLMHSFGVLKWTQTELDALDRRVRTLLTAYRMHHPRSSVMRLYIPRKCGGRGFLNAKTLHNREICSLREYFLAVDVGMHRDVVTVDKGLTPLSLANENWRKPAVLDTNDRRAVWQSKELHGRYFRALHGPDVDQLASVAWLRFGDLFGETEGFVCAIMDEVIMTNNYRRFIVKDGTVDICRACHRPGESIRHIVSGCSRLANGEYLHRHNLVARIIHQQLALKYSLVESEVPYYRYAPDPVLDNGNITLYWDRSIITDRTIVANKSYTVVVDRIERRAMIVDITVPHDENLVKAEKDKQIKYIDLAREVVEMWDVDSAIIVPIVVSANGLIATSLDQHLRRLSLGSWIKGLIQKAVLLDTARIVRRFLSLEP

SEQ ID NO: 10796 - protein, 1107 aa, Mamestra configurata
MRWTQTINENVMRSYYGATEGGTNLTAYRGRMLSLFQVLEPAVNVSAQRLSDQVRVILRNRMLDDAVLDRLRLESRSGRVSPTSPPAAVQIQSSVSPRPNNVGEDDDDGAISVSTQCNERLRSALEDAFREYRSTPPELRPRLPRLPMHNKNRALVCALDSQLTNCFDSSEDLADTHSILYCAAAAACRVAHVKFPNSDRATRPAVPAWQCRIERRIGEARALIGKLICFREGNTRRRVMRFVRRAFSGTDTSPRDYLTRVTERIDFLKQKIYAWANRIRRYKRRVERYTQNRTFQSNERWVYRAWERPDQGVTDTRLPDDDVMCSFWRNIWSVPVSHTEGDWTREVERACDPIPEMGAITISPQDVARAVRPLPNWKSPGPDGLHNFWIKWFKRSHARLASQFQSALESGSLPQFLTTGITHLLHKSGSTAEPKNYRPITCLPTVYKVLTSILRAKINHHIETNSIMSASQNGCRNGSRGTKELLLIDVAISQQVRRSRRDLSTCWIDYKKAYDSVPHTWLMRVLELYKVDAVLRTFLMSCMGQWRTVLRYPGCRQIQANSDPIRIERGIFQGDSLSPLWFCLALNPLSTLLEGSGQGYRLKRGGQVISHLLYMDDLKLFAPNNLQLMKLLKVTETFSSAISMEFGVDKCAVMHVKRGEIMESVGTQLSDSINLRSLSSTETYKYLGMSEALGINAADVKQSLKERFFGRLNKVLNSLLSGGNKVRAFNGWVMPVLMYSFGILKWTQTELDALDRRVRSLLTANRMHHPRSSVMRLYIPRKCGGRGFLNAKTLHNREICSLREFFLEADVGMHRDVVAVDKGLTALSLANENWRKPVVLDTNDRREVWQSKELHGRFYRVLHGPDVDFLASVAWLRFGDLFGETEGFVCAIMDEVMMTNNYRKYIVKDGTVDICRACHRPGESIRHIISGCSSLANGDYLHRHNLVARIIHQQLALKYNLVESEVPYYRYVPDPVLENGNCTLYWDRSIITDRTIVANKPDIVVIDRLERRAMIVDIAVPHDENLVKTEKDKQTKYLDLAREVVDMWDVNTAVIVPIVVTANGIIAKSLDQHLKRLSLGSWIKGLIQKAVLLDTARIVRRFLSQGP

SEQ ID NO: 10797 - protein, 1205 aa, Amphipyra berbera
MLTRSRSKLQDPKTRPRPSASSLSSASQPPDSSIVSDVTPAAAVASSSSDEYFSPPSSPPPPRRRGRGRPPACMGPRGPPASDRVPAPGGSVQRMRWTQSMNENCMRAYFGATEGGTNLTAYRGRMLSLFQVLEPAVNVSAQRLSDQVRVIQRDHRLTDAALDRLRSEVQSNRIISPQSQTAAQPQAPTVVLPPPIHADEESDDRVTNVSTQCNERLRSALELAIREYRFTPPNLRPRIPRLPMNKKNRALMCALDSLLSSYFDNSESLEDTHSILYCAAVAACRVAHAKFDNNDRATRPKPAVPAWQCRIERRINEARALIGKLICFREGNTRPRVMRFVRRAFSGTDINPRDYLSRVTERIDFLKQKVYAWANRIRRYKRRVERYTQNRMFHSDERWVYRTWERPDHDVSDTHLPDNDVMNTFWRNIWSMPVTHIEGDWMQEVQRACEPIEEMGDITIVPQDVTSAVRPMANWKSPGPDGLHNFWLKWLRSSHARLASQFQSSLESGSFPEFLTTGVTHLLHKSGSTAEPKNYRPITCLPTVYKLLTSILRAKINSHIINNSIMSVSQNGCKNGSRGTKELLLIDMAISQQVRRSRKDLSTCWIDYKKAYDSVPHTWLMRVLELYKVNTTLCAFLTSCMGQWRTVLHYPGCRQIQGRGEPIRIERGIFQGDSLSPLWFCLALNPLSTLLEGSGLGYRLRRGGQVISHLLYMDDLKLFAPNNLQLVKLLKVTETFSNSIRMEFGVDKCAVMHVKRGGIMESVGTQLSDSIHLRSLSSTETYKYLGMSEALGINETDMKQSLRERFYGRLKKVLKSLLSGGNKVRAFNGWVMPVLMYSFGILKWTQTELDALDRRVRTLLTAYRMHHPRSSVMRLYIPRKCGGRGFLNAKTLHNREVCSLREYFLHADVGMHRDVVAVDKGFTPLSLAKENWRKPVVLDTNGRREVWQSKELHGRFYRALHGPDVDFLASVAWLRFGDLFGETEGFVCAIMDEVILTNNYRKYIVKDGTVDICRACHCPGESIRHIISGCSHLANGEYLHRHNLVARIIHQQLALKYNLVDAEVPYYKYVPDPVLENGLITLYWDRSIITDRTIVANKPDIVVIDRSERLAMIVDITVPHDENLVKAEKDKEIKYQDLAHEVVDMWEVDSAVIVPIVVTANGLIAKSLDQHLTRLALGSWIKGLIQKAVLLDTTRIVRKFLSLRP

SEQ ID NO: 10798 - protein, 1213 aa, Amphipyra berbera
MLTRSRTKTQDTRTRPRPSASSLSSASQPPDSSIVSDVTPAAAVASSSSDEFYSPPTSPPPPPPPPPPRRGRRGRGRPPACMGPRGPPASDRVPAPGGSVQRMRWTLTMNENCMRAYFGATEGGNNLTAYRGRMLSLFQVLEPTVNVSAQRLSDQVRVIQRDHRLTDAALDRLRSEVQSNRIISLQSQTAAQPQTPTVVPPLPIHADEESDDRVTNVSTQCNEQLRSALELAIREYRFTPPNIRPRIPRLPMHRKNRALMCALDSLLSSYFDNSENLEDTHSILYCAAVAACRVAHAKFDNNDRATRPKPAVPAWQCRIERRINEARALIGKLICFREGNTRPRVIRFVRRAFSGTDINPRDYLSRVTERIDFLKQKVYAWANRIRRYKRRVERYTQNRMFHSDERWVYRTWERPDHDVSDTHLPDNDVMNTFWRNIWSMPVTHTEGDWMQEVQRACEPIEEMGDITIVPQDVTSAVRPMANWKSPGPDGLHNFWLKWLRSSHARLASQFQSSLESGSLPEFLTTGVTHLLHKSGSTAEPKNYRPITCLPTVYKLLTSILRAKINSHIINNSIMSVSQNGCKNGSRGTKELLLIDMAISQQVRRSRKDLSTCWIDYKKAYDSVPHTWLMRVLELYKVNTTLCAFLTSCMGQWRTVLHYPGCRQIQGRGEPIRIERGIFQGDSLSPLWFCLALNPLSTLLEGSGLGYRLRRGGQVISHLLYMDDLKLFAPNNLQLMKLLKVTETFSNSIRMEFGVDKCAVMHVKRGGIMESVGTQLSDSIHLRPLSSTETYKYLGMSEALGINETDMKQSLRERFYDRLKKVLKSLLSGGNKVRAFNGWVMPVLMYSFGILKWTQTELDALDRRVRTLLTAYRMHHPRSSVMRLYIPRKCGGRGFLNAKTLHNREVCSLREYFLQADVGMHRDVVAVDKGFTPLSLAKENWRKPVVLDTNGRREVWQSKELHGRFYRALYGPDVDFLASVAWLRFGDLFGETEGFVCAIMDEVMMTNNYRKYIVKDGTVDICRACHCPGESIRHIISGCSRLANGEYLHRHNLVARIIHQQLALKYNLVDAEVPYYKYVPDPVLENGHITLYWDRSIITDRTIVANKPDIVVIDRSERLTMIVDITVPHDENLVKAEKDKEIKYQDLAHEVVDMWEVDSAVIVPIVVTANGLIAKSLDQHLTRLALGSWVKGLIQKAVLLDTARIVRKFLSLRP

SEQ ID NO: 10799 - protein, 1205 aa, Amphipyra berbera
MLTRSRAKALTETTRPRSSAPSLSSASQPPDSSIVSDVTPAAAVASSSSDEYFSPPTSPPPARRRGRGRPPDSLRPRGPLASDRVPAAGGSVQRMRWTPTMNENCMRAYFGATEGGTNLTAYRGRMLSLFQVLEPTVNVSAQRLSDQVRVIQRDHRLTDAALDRLRSEVQSNAIISLQSQTAAQPRTPTVVPSLPTHGNEESDDRVTNVSTQCNEQLRSALELAIQEYRFTPPNIRPRIPRLPMHRKNRALMCALDSLLSSYFDNSENLEDTHSILYCAAVAACRVAHAKFDNSDKATRPKRAVPAWQCRIERRINEARALIGKLICFREGNTRPRVMRFVRRAFSGTDINPRDYMSRVTERIDFLKQKVYAWANRIRRYKRRVERYTQNRMFHSDERWVYRTWERPDHDVNDTHPPDNDVMNTFWRNIWSMPVTHTEGDWMQEVQRACEPIEEMGDITIVPQDVTSAVRPMANWKSPGPDGLHNFWIKWLRSSHARLASQFQSSLESGSLPEFLTTGVTHLLHKSGSTAEPKNYRPITCLPTVYKLLTSILRAKINSHIINNSIMSASQNGCKNGSRGTKELLLIDMAISQQVRRSRKDLSTCWIDYKKAYDSVPHTWLMRVLELYKVNTTLCAFLTSCMGQWRTVLHYPGCRQIQGRGEPIRIERGIFQGDSLSPLWFCLALNPLSTLLEGSGLGYRLRRGGQVISHLLYMDDLKLFAPNNLQLMKLLKVTETFSNSIRMEFGVDKCAVMHVKRGGIMESVGTQLSDSIHLRSLSSTETYKYLGMSEALGINETDMKQSLRERFYGRLKKVLKSLLSGGNKVRAFNGWVMPVLMYSFGILKWTQTELDALDRRVRTLLTAYRMHHPRSSVMRLYIPRKCGGRGFLNAKTLHNREVCSLREYFLQADVGMHRDVVAVDKGFTPLSLAKENWRKPVVLDTNGRREVWQSKELHGRFYRALHGPDVDFLASVAWLRFGDLFGETEGFVCAIMDEVILTNNYRKYIVKDGTVDICRACHCPGESIRHIISGCSRLANGEYLHRHNLVARIIHQQLALKYNFVDAEVPYYKYVPDPVLENGHITLYWDRSIITDRTIVANKPDIVVIDRSERLAIIVDITVPHDENLVKAEKDKEIKYQDLAHEVVDMWEVDSAVIVPIVVTANGLIAKSLDQHLTRLALGSWIKGLMQKAVLLDTARIVRKFLSLRP

SEQ ID NO: 10800 - protein, 1203 aa, Amphipyra berbera
MLTRARARKQTAHPRSPDSSLSSASQQPESSPPVSAVTPAAAVASSSSDEYYSPPSSPPPVRRRGGARPPACLGPRGQPATNRVPAAGGNVSRMRWTQSINENVMRAYYGATEGGINLTAYRERMLFLFQVLEPAINVSAQRLSDQVRVVQRNRRLDDTVLERLRSEARNSQTVTFPVQAAVQMQPLAVPPRPIHVDGEGDGEAINVSNQCSEELRSALDDAILEFRTTPPEIRPRLPRLPMHGKNRALMCALDSLLSNYFDGSEDLADTHSILYCAAIAACRVAHVKFTENERATRPKPAVPAWQSRIERRIGGARVLIGKLICFREGNNRPRVMRFVRRAFSGTDISPRDYMSRVTERIDFLKQKVYAWANRIRRYKRRVERYTQNRIFQSDQRRVYRAWERPDFGGGDVRLPDDDALSSFWRSIWSVPIAHTEDGWMRDIEQACEPIAEMEPITIIPQDVADAARPLPNWKSPGPDGLHNFWLKWLRSSHARLASQFQSSLESGSLPQFLTTGVTHLLYKSGGTAEPKNYRPITCLPTVYKLLTSILRVKITTHIDNNCIMSASQNGCRKGSRSTKELLLIDMAISQQVRRSQKDLSTCWIDYKKAYDSVPHSWLMRVLELYKINTTLRTFLMSCMRHWRTVLRYPGCRRIRGSGEQIRIERGIFQGDSLSPLWFCLALNPLSTLLEGTGLGYQLRRGGQVISHLLYMDDLKLFAPTDLQLMELLKVTENFSNSIRMEFGVDKCAVMHVKRGRIAESEGIQLPNSVQLRSLSPTETYKYLGMSEALGISETDMRQSLRERFFGRLNKLLKSFLSGGNKVRAFNGWVMPVLMYSFGTLKWTQADLDALDRRVRALLTAHRMHHPRSSVMRLYIPRKCGGRGFLNAKTLHNREVYSLREYFLQAEGVMHRDVVAVDKGFTPLALARENWRKPAVLSTNDREVVWQSKELHGRYYRALHGPDVDFSASVSWLRSGNLFGETEGFVCAIMDEVMMTNNYRKYIVKDGTVDICRACHRPGESIRHIVSGCSRLANGEYLHRHNLVARIIHQQLALKYNLVESEVPYYRYVPDPVLENGHATLYWDRSIITDRTIVANKPDIVVIDRSERRTMIVDITVPHDENLVKAEKDKQIKYLDLAHEVVGMWDVDSAVIVPIVVTANGIIAKSLDIHLMRLSLGGWIKGLIQRAVLLDTARIVRRFLSLEP

SEQ ID NO: 10801 - protein, 1098 aa, Amphipyra berbera
MRAYYGSTEGGTNLTAYRVRMLTLFQELEPAINVSAQRLSDQVRVIQRNHRLDDAALDRLRLEVQNSRAIPVPSQTAVHQLINVAPPRSDRVDGDEDDGAVTVSSQYNDRLRSALDDAIRECRANPESRPRLPRLPMHNKNRALVCALDSLLASYFESSEDLGDTHSILYCAAVAACRVANVKFNNSERATRPKLAVPAWQCRIERRIDETRALIGKLICFREGNTRPRVMRFVRRAFSGTGISPREYTSRATERIDFLKQKVCAWASRIRRYKRRVERYTQNRMFQCDQRWVYRAWERPDQSVSGGRLPDDDAMSSFWRSIWSVPVIHTEGDWMRDIERTCESIEEMGEIVISPQDVAGAVRPLPNWKSPGPDGLHNFWIKWLRSSHARLASQFQSSLESGSLPQFLTTGVTHLLHKSGSTAEPKNYRPITCLPTVYKLLTSILRSKINTHIGNNSVLSSSQNGCRNGSRGTKELLLIDTAISQQVRRSQKSLSTCWIDYKKAYDSVPHTWLMRVLELYKINTTLRTFLRSCMGQWRTVLRYPGCQPIRGSGEPIRIERGIFQGDSLSPLWFCLALNPLSTLLEGSGLGCPLRRGGQVVSHLLYMDDLKLFAPTKLQLVDLLKVTETFSNSIRMEFGVDKCAVMHVRRGRIMESEGLQLSDSIHLSPLSANDTYKYLGMSEGLGISEADMKQSLRERFFGRLKKVLKSLLSGGNKVRAFNGWVMPVLMYSFGILKWTQTELDALDRRVRTLLTANRMHHPRSSVMRLYIPRKCGGRGLLNAKTLHNREVCSLREFFLHADAGMHRDVVAVDKGLTPLSLARENWRKPVVLSTNDRREIWQSKELHGRFYRALHGPDVDFLASVSWLRFGDLFGETEGFVCAIMDEVIMTNNYRKYIVKDGTVDICRACHCPGESLRHIISGCSRLANGEYLHRHNQVARIIHQQLALKYNLVESEVPYYRYVPDPVLENGRITLYWDRSIITDRTIVANKPDIVVIDRSERRTMIVDVTIPHDGNLVKAEKDKQIKYLDLAHEVVNMWDVESATIVPIVVTANGLMAKSLDKHLMRLSLGGWIKGLIQKAVLLDTARIVRRFLSLEP

SEQ ID NO: 10802 - protein, 1203 aa, Amphipyra berbera
MLTRARARKQTAHPRSPDSSLSSASQPPESSPPVSAVTPAAAVASSSSDEYYSPPSSPPPVRRRGGARPPACLGPRGQPATNRVPAAGGNVSRMRWTQSINENVMRAYYGATEGGINLTAYRERMLFLFQVLEPAINVSAQRLSDQVRVVQRNRRLDDTVLERLRSEARNSQTVTFPVQAAVQMQPITVPPRPIHVDGEGDGEAINVSNQCSEELRSALDDAILEFRTTPPEIRPRLPRLPMHGKNRALMCALDSLLSNYFDGSEDLADTHSILYCAAIAACRVAHVKFTENERATRPKPAVPAWQSRIERRIGGARVLIGKLICFREGNNRPRVMRFVRRAFSGTDISPRDYMSRVTERIDFLKQKVYAWANRIRRYKRRVERYTQNRIFQSDQRRVYRAWERPDPGGGDVRLPDDDALSSFWRSIWSVPIAHTEDGWMRDIEQVCEPIAEMEPITITPQDVADAARPLPNWKSPGPDGLHNFWLKWLRSSHARLASQFQSSLESGSLPQFLTTGVTHLLYKSGSTAEPKNYRPITCLPTVYKLLTSILRVKITTHIDNNCIMSASQNGCRKGSRGTKELLLIDMAISQQVRRSQKDLSTCWIDYKKAYDSVPHSWLMRVLELYKINTTLRTFLMSCMRHWRTVLRYPGCRRIRGSGEQIRIERGIFQGDSLSPLWFCLALNPLSTLLEGTGLGYQLRRGGQVISHLLYMDDLKLFAPTDLQLMELLKVTENFSNSIRMEFGVDKCAVMHVKRGRIAESEGIQLPNSVQLRSLSPTETYKYLGMSEALGISETDMRQSLRERFFGRLNKLLKSLLSGGNKVRAFNGWVMPVLMYSFGTLKWTQADLDALDRRVRALLTAHRMHHPRSSVMRLYIPRKCGGRGFLNAKTLHNREVYSLREYFLQAEGVMHRDVVAVDKGFTPLALARENWRKPAVLSTNDREVVWQSKELHGRYYRALHGPDVDFSASVSWLRSGNLFGETEGFVCAIMDEVMMTNNYRKYIVKDGTVDICRACHRPGESIRHIVSGCSRLANGEYLHRHNLVARIIHQQLALKYNLVESEVPYYRYVPDPVLENGHATLYWDRSIITDRTIVANKPDIVVIDRSERRTMIVDITVPHDENLVKAEKDKQIKYLDLAHEVVGMWDVDSAVIVPIVVTANGIIAKSLDIHLMRLSLGGWIKGLIQRAVLLDTARIVRRFLSLEP

SEQ ID NO: 10803 - protein, 1075 aa, Noctua janthe
MLSLFQVLEPAVNVSAQRLSDQVRVIQRNGMLDDTVLDRLRTEMQSSHVIATPPQTVVPPQSTIIPTHDNNVSNDMVTNVSTQCNEEMRCALEGAIREYRFMQPDLRPRVPRLPMHNKNKVLVAVLDSQLSNYFDNCENLTDAHSVLYCAAVAACRVAHVKFSDDRATRPNPAVPSWQYRIERRIGEARALIGKLICFREGNTRPRVMRFVRRAFSGTDISARDYMSRVTERIDFLKQKVYAWANRIRRYKRRVDRYTQNRTFQRDERWVYRAWERPDQGVADTHLPDDDAMCSFWRSIWSVPVSHTEGEWTREVERACDLVPEMGAITISPQDVVRAVRPLPNWKSPGPDGLHNFWIKWFTRSHARLAILFQSALESGSLPEFLTTGITHLLHKSGSTAEPKNYRPIACLPTVYKVLTSILRAKINKHIDDNSVMSASQNGCRNGSRGTKELLLIDMAISQQVRRSRRDLSTCWIDYKKAYDSVPHTWLMRVLELYKVDSTLRIFLMSCMGQWRTVLRYPGCRQIQRNSEPIRIERGIFQGDSLSPLWFCLALNPLSTLLEDSGLGYRLRRGGQVISHLLYMDDLKLFAPNDLQLMELLKVTETFSSAIRMEFGVDKCAVMHVKRGEIVESVGTQLSDSINLRSLSATETYKYLGMSEALGINVADMKQSLREHFFGRLKKVFNSLLSGGNKVRAFNGWVMPVLMYSFGILKWTQTELDALDRRVRTLLTAYRMHHPRSSVMRLYIPRRCGGRGFLNAKTLHNREIYSLREYFLETDVGMHRDVVAVDKGLTPLSLAKENWRKPVVLDTNDRMEVWQSKELHGRFFRALHGPDVDLPASVAWLRSGDLFGETEGFVCAIMDEVMMTNNYRRFIVKDGTVDICRACHRPGESIRHIISGCSRLANGEYLHRHNLVARIIHQQLALKYNLVESEVPYYKYVPDPVLENGNITLYWDRSIVTDRTIVANKPDIVVVDRSERRAMIVDITVPHDGNLVKAEKDKQIKYLDLAHEVVDMWDVDSAIIVPIVVSAHGLIAKTLDQYLRRLSLGSWIKGLIQKAVLLDTARIVRRFLSLEP

SEQ ID NO: 10804 - protein, 1197 aa, Noctua janthe
MLTRSATRRARLSPPDPSLSSASPPPESSPIVSAVTPAVAVASSSSDEYFSPPTTPPPVRRRGGRRPPDGLGPRGPPASDRVPAPGGSVPRMRWTQSINANVMRAYYGATEGGNNLTAYRVRMLSLFQVLEPAVNVSAQRLSDQVRVIQRNGMLDDTVLDRLRTEMQSSHVIATPPQTVVPPQSTIIPTHDNNVSNDMVTNVSTQCNEEMRCALEGAIREYRFMQPDLRPRVPRLPMHNKNKVLVAVLDSQLSNYFDNCENLTDAHSVLYCAAVAACRVAHVKFSDDRATRPKPAVPSWQYRIERRIGEARALIGKLICFREGNTRPRVMRFVRRAFSGTDISARDYMSRVTERIDFLKQKVYAWANRIRRYKRRVDRYTQNRTFQRDERWVYRAWERPDQGVADTHLPDDDAMCSFWRSIWSVPVSHTEGEWTREVERACDLVPEMGAITISPQDVVRAVRPLPNWKSPGPDGLHNFWIKWFTRSHARLAILFQSALESGSLPEFLTTGITHLLHKSGSTAEPKNYRPIACLPTVYKVLTSILRAKINKHIDDNSVMSASQNGCRNGSRGTKELLLIDMAISQQVRRSRRDLSTCWIDYKKAYDSVPHTWLMRVLELYKVDSTLRIFLISCMGQWRTVLRYPGCRQIQRNSEPIRIERGIFQGDSLSPLWFCLALNPLSTLLEDSGLGYRLRRGGQVISHLLYMDDLKLFAPNDLQLMELLKVTETFSSAIRMEFGVDKCAVMHVKRGEIVESVGTQLSDSINLRSLSATETYKYLGMSEALGINVADMKQSLKERFFGRLKKVFNSLLSGGNKVRAFNGWVMPVLMYSFGILKWTQTELDALDRRVRTLLTTYRMHHPRSSVMRLYIPRRCGGRGFLNAKTLHNREIYSLREYFLETDVGMHRDVVAVDKGLTPLSLAKENWRKPVVLDTNDRMEVWQSKELHGRFFRALHGPDVDLPASVAWLRSGDLFGETEGFVCAIMDEVMMTNNYRRFIVKDGTVDICRACHRPGESIRHIISGCSRLANGEYLHRHNLVARIIHQQLALKYNLVESEVPYYKYVPDPVLENGNITLYWDRSIVTDRTIVANKPDIVVVDRSERRAMIVDITVPHDGNLVKAEKDKQIKYLDLAHEVVDMWDVDSAIIVPIVVSAHGLIAKSLDQYLRRLSLGSWIKGLIQKAVLLDTARIVRRFLSLEP

SEQ ID NO: 10805 - protein, 1197 aa, Noctua janthe
MLTRSATRRARLSPPDASLSSASPPPESSPIVSAVTPAVAVASSSSDEYFSPPTTPPPVRRRGGRRPPDGLGPRGPPASDRVPAPGGSVPRMRWTQSINANVMRAYYGATEGGNNLTAYRVRMLSLFQVLEPAVNVSAQRLSDQVRVIQRNGMLDDTVLDRLRTEMQSSHVIATPPQTVVPPQSTIIPTHDNNVSNDMVTNVSTQCNEEMRCALEGAIREYRFMQPDLRPRVPRLPMHNKNKVLVAVLDSQLSNYFDNCENLTDAHSVLYCAAVAACRVAHVKFSDERATRPKPAVPSWQYRIERRIGEARALIGKLICFREGNTRPRVMRFVRRAFSGTDISARDYMSRVTERIDFLKQKVYAWANRIRRYKRRVDRYTQNRTFQRDERWVYRAWERPDQGVADTHLPDDDAMCSFWRSIWSVPVSHTEGEWTREVERACDLVPEMGAITISPQDVVRAVRPLPNWKSPGPDGLHNFWIKWFTRSHARLAILFQSALESGSLPEFLTTGITHLLHKSGSTAEPKNYRPIACLPTVYKVLTSILRAKINKHIDDNSVMSASQNGCRNGSRGTKELLLIDMAISQQVRRSRRDLSTCWIDYKKAYDSVPHTWLMRVLELYKVDSTLRIFLMSCMGQWRTVLRYPGCRQIQRNSEPIRIERGIFQGDSLSPLWFCLALNPLSTLLEDSGLGYRLRRGGQVISHLLYMDDLKLFAPNDLQLMELLKVTETFSSAIRMEFGVDKCAVMHVKRGEIVESVGTQLSDSINLRSLSATETYKYLGMSEALGINVADMKQSLKERFFGRLKKVFNSLLSGGNKVRAFNGWVMPVLMYSFGILKWTQTELDALDRRVRTLLTTYRMHHPRSSVMRLYIPRRCGGRGFLNAKTLHNREICSLREYFLETDVGMHRDVVAVDKGLTPLSLAKENWRKPVVLDTNDRMEVWQSKELHGRFFRALHGPDVDLPASVAWLRSGDLFGETEGFVCAIMDEVMMTNNYRRFIVKDGTVDICRACHRPGESIRHIISGCSRLANGEYLHRHNLVARIIHQQLALKYNLVESEVPYYKYVPDPVLENGNITLYWDRSIVTDRTIVANKPDIVVVDRSERRAMIVDITVPHDGNLVKAEKDKQIKYLDLAHEVVDMWDVDSAIIVPIVVSAHGLIAKSLDQYLRRLSLGSWIKGLIQKAVLLDTARIVRRFLSLEP

SEQ ID NO: 10806 - protein, 868 aa, Noctua janthe
MRFVRRAFSGTDISARDYMSRVTERIDFLKQKVYAWANRIRRYKRRVDRYTQNRTFQRDERWVYRAWERPDQGVADTRLPDDDAMCSFWRSIWSVPVSHTEGEWTREVERACDLVPEMGAITISPQDVVRAVRPLPNWKSPGPDGLQNFWIKWFTRSHARLAILFQSALESGSLPEFLTTGITHLLHKSGSTAEPKNYRPITCLPTVYKVLTSILRAKINKHIDDNSVMSASQNGCRNGSRGTKELLLIDMAISQQVRRSRRDLSTCWIDYKKAYDSVPHTWLMRVLELYKVDSTLRIFLMSCMGQWRTVLRYPGCRQIQRNSEPIRIERGIFQGDSLSPLWFCLALNPLSTLLEDSGLGYRLRRGGQVISHLLYMDDLKLFAPNDFQLMELLKVTETFSSAIRMEFGVDKCAVMHVKRGEIVESVGTQLSDSINLRSLSATETYKYLGMSEALGINVADMKQSLKERFFGRLKKVFNSLLSGGNKVRAFNGWVMPVLMYSFGILKWTQTELDTLDRRVRTLLTAYRMHHPRSSVMRLYIPRRCGGRGFLNAKTLHIREICSLREYFLETDVGMHRDVVAVDKGLTPLSLAKENWRKPVVLDTNDRMEVWQSKELHGRFFRALHGPDVDLPASVAWLRSGDLFGETEGFVCAIMDEVMMTNNYRRFIVKDGTVDICRACHRPGESIRHIISGCSRLANGEYLHRHNLVARIIHQQLALKYNLVESEVPYYKYVPDPVLENGSITLYWDRSIVTDRTIVANKPDIVVVDRSERRAMIVDITVPHDGNLVKAEKDKQIKYLDLAHEVVDMWDVDSAIIVPIVVSAHGLIAKSLDQYLRRLSLGSWIKGLIQKAVLLDTARIVRRFLSLEP

SEQ ID NO: 10807 - protein, 1168 aa, Mythimna ferrago
MLTRAAARRARPPPPASSLSSASPPPEPSPIVSAVTPAVAAASSSSDEYYSPPTTPPPTRRRGGRRPPDCLGPRGPPASDRVPAPGGSVQRMRWTQSINENVMRSYYGATEGGNNLTAYRVRMLSLFQVLEPAVNVSAQRLSDQVRVILRNHMLDDTVLDRLRTEMSDRVITPPSQPVVPAVVPPSSYTSFHTDEVSSDTVTNVSNQCNSELRSALECAIREYRNIPPELRPRIPRLPMCNKNRALVAALDSQLSNYFDDCEDLTDTHSIMYCAAVAACRVAHVKFPNSDVATRPKPAVPAWQCRIERRIGGARALIGKLICFREGNTRPRVMRFVRRAFSGTDISPRDYKSRVTERIDFLKQKVYAWANRIRRYKRRVERYTQNRTFRSNERWVYRAWERPDQGVTDARLPDDDAMSSFWRSIWSVPVSHTEGDWTREVERACDPIPQMGAIDISPQDVARAVRPLPNWKSPGPDGLHNFWIKWFTRSHARLAYQFQSALESGSLPQFLTTGITHLLHKSGSTAEPKNYRPITCLPTVYKVLTSILRSKINSHIDENSIMSPSQNGCRNGSRGTKELLLIDMTISQQVRRSRKDLSTCWIDYRKAYDSVPHTWLMRVLELYKIDTTLRTFLMSCMRQWSTVLRYPACRNIQRNSEPVRIERGIFQGDSLSPLWFCLALNPLSTLLENSGLGYRLKRGGQVISHLLYMDDLKLFAPNNLQLMELLKVTEIFSSAIRMEFGVDKCAVMHVKRGEVVESVSTQLTDSINLRSLSPTETYKYLGMSEALGISITGMKQSLRERFFGRLKKVFNSLLSGGNKVRAFNGWVMPVLMYSFGVLKWTQTELDALDRRVRTLLTAYRMHHPRSSVMRLYIPRKCGGRGFLNAKTLHNREVCSLREYFLAADVGMHRDVVAVDKGLTPLSLANENWRKPIVLDTNDRREVWQSKELHGRFFRALHGPDVDQLASVAWLRFGDLFGETEGFVCAIMDEVIMTNNYRRFIVKDGTVDICRACHRPGESIRHIISGCSRLANGEYLHRHNLVARIIHQQLALKYSLVESEVPYYRYEPDPVLDNGHITLYWDRPIITDRTIVANKPDIVVVDRSERRAMIVDISVPHDENLVKAEKDKQIKYIDLAREVVDMREVDSAVIVPIVIYLFIYLFILHATQST

SEQ ID NO: 10808 - protein, 1200 aa, Mythimna ferrago
MLTRSRARQQQTHPTSSDSSFSSASQPPGPAPAVSPVIPVAAVASSSSDEYFSPPTTPPPARRRGRGRPPACLGPRGPPASGGVPAAGGSVQRMRWTQSINENVMRSYFGATEGGTNLTAYRGRMLSLFQVLEPAVNVSAQRLSDQVRVIQRNRMLDDAVLDRLRLESRNGRVSPVSPPAAVQLQPSVSPRPDHVGEDDDDGAISVSTQCNACLRSALEDAFREYRSIPPELRPRLPRLPMHRKNRALVCALDSQLSNCFDSSEDLTDTHSILYCAAAAACRVAHVKIPSSDRATRPAKPAWQCRIERRIGEARTLIGKLICFREGNTRPRVMRFVRRAFSGTDVSPRDYLPRITERIDFLRQKVYAWANRIRRYKRRVERYTQNRAFQSNERWVYRAWERPDQSVIDTRLPDDDAMYSFWRSIWSVPVSHTEGDWTRGVERECELIPEMGAITISPQDVARAVRPLPNWKSPGPDGLHNFWLKWFKSSHARLASQFQSALESGSLPQFLTTGITHLLHKSGSTAEPKNYRPITCLPTVYKVLTSILRAKINSHIETNSIMSASQNGCRNGSRGTKELLLIDVAISQQVRRSRRDLSTCWIDYKKAYDSVPHTWLMRVLELYKIDVTLRTFLMSCMGQWRTVLHYPGCRRVSENSEPLRIERGIFQGDSLSPLWFCLALNPLSTLLEGSGLGYRLRREGQVISHLLYMDDLKLFASNNLQLMELLKVTETFSSAIRMEFGLDKCAVMHVKRGEIMESVGTQLSDSIHLRSLSSTETYKYLGMSEALGINAADVKQSLRERFFCRLNKVLKSLLSGGNKVRAFNGWVMPVLMYSFGILKWTQTELDALDRRVRTLLTANRMHHPRSSVMRLYIPRKCGGRGFLNAKTLHNREVCSLREYFLETDVGMHRDVVAVDKGLTPLSLASENWRKPIVMDTNERKEVWKGKELHGRFYRALHGPDVDLLASVSWLRFGNLFGETEGFVFAIMDEVMMTNNYRKYIVKDGTVDICRACHRPGESIRHIISGCSHLANGDYLHRHNLVARIIHQQLALKYNLVESEVPYYRYVPDPVLENGSVTLYWDRSIITDRTIVANKPDIVVIDRLERRTMIVDIAVPHDENLVKAEKDKQTKYLDLAREVVDMWEVDRAIIVPIVVTANGLIAKSLDQHLRRLSLGSWIKGLIQKAVLLDTARIVRRFLSQEP

SEQ ID NO: 10809 - protein, 1107 aa, Mythimna ferrago
MRWTQSINENVMRSYFGATEGGTNLTAYRGRMLSLFQVLEPAVNVSAQRLSDQVRVIQRNRMLDDAVLDRLRLESRNGRVSPVTPPAAVQLQPSVSPRPDHVGEDDDDGAISVSTQCNARLRSALEDAFREYRSIPPELRPRLPRLPMHRKNRALVCALDSQLSNCFDSSEDLTDTHSILYCAAAAACRVAHVKIPNSDIATRPAKPAWQCRIERRIGEARALIGKLICFREGNTRPRVMRFVRRAFSGTDVSPRDYLPRITERIDFLRQKVYAWANRIRRYKRRVERYTQNRAFQSNERWVYRAWERPDQSVIDTRLPDDDAMYSFWRSIWSVPVSHTEGDWTRGVERECELIPEMGAITISPQDVARAVRPLPNWKSPGPDGLHNFWLKWFKSSHARLASQFQSALESGSLPQFLTTGITHLLHKSGSTAEPKNYRPITCLPTVYKVLTSILRAKINSHIETNSIMSASQNGCRNGSRGTKELLLIDVAISQQVRRSRRDLSTCWIDYKKAYDSVPHTWLMRVLELYKIDVTLRTFLMSCMGQWRTVLHYPGCRRVSENSEPLRIERGIFQGDSLSPLWFCLALNPLSTLLEGSGLGYRLRREGQVISHLLYMDDLKLFASNNLQLMELLKVTETFSSAIRMEFGLDKCAVMHVKRGEIMESVGTQLSDSIHLRSLSSTETYKYLGMSEALGINAADVKQSLRERFFCRLNKVLKSLLSGGNKVRAFNGWVMPVLMYSFGILKWTQTELDALDRRVRTLLTANRMHHPRSSVMRLYIPRKCGGRGFLNAKTLHNREVCSLREYFLETDVGMHRDVVAVDKGLTPLSLASENWRKPIVMDTNERKEVWKGKELHGRFYRALHGPDVDLLASVSWLRFGNLFGETEGFVFAIMDEVMMTNNYRKYIVKDGTVDICRACHRPGESIRHIISGCSHLANGDYLHRHNLVARIIHQQLALKYNLVESEVPYYRYVPDPVLENGSVTLYWDRSIITDRTIVANKPDIVVIDRLERRTMIVDIAVPHDENLVKAEKDKQTKYLDLAREVVDMWEVDRAIIVPIVVTANGLIAKSLDQHLRRLSLGSWIKGLIQKAVLLDTARIVRRFLSQEP

SEQ ID NO: 10810 - protein, 930 aa, Mythimna ferrago
MYCATVAACRVAHVKFPNSDVATRPKPAVPAWQCRIERRIGGARALIGKLICFREGNTRPRVMRFVRRAFSGTDISPRNCMSRVTERIDFLKQKVYAWANRIRRYKRRVERYTQNSTFRSNERWVYRAWERPDQGVTDTRLPDDDAMCLFWRNIWSVPISHTEGGWTREVERACESITEMGAITISPQDVARAVRPLPNWKSPGPDGVHNFWIKWLQRSHARLASQYQAALESGSLPEFLTTGVTHLLHKSGSTAEPKNYRPITCLPTVYKVLTSILRAKINHHVDNNAIMSASQNGCRNGSRGTKELLLIDMAISQQVRRSRKDLSTCWIDYKKAYDSVPHTWLMRVLELYKVDATLRTFLMSCMRQWRTVLRYPGCRNIQRNSEPVRIERGIFQGDSLSPLWFCLALNPLSTLLENSGLGYRLKRGGQAISHLLYMDDLKLFAPNNLQLMEVLKVTETFSSAIRMEFGVDKCAVMHIKRGEIVESVGIQLSDSIHLRSLSPTETYKYLGMSEALGINATDMKQSLKERFFGRLKKVLNSLLSGGNKVRAFNGWVMPVLMYAFGVLKWTQTELYALDRRVRTLLTAYRMHHPRSSVMRLYIPRKCGGRGFLNAKTLHNREVCSLREYFLAADGGMHRAVVAVDKGLTPLSLANENWRKPVVLDTNVRKEVWQSKELHGRFFRALHGPDVDQLASVAWLRVGDLFGETEGFVCAIMDEVIMTNNYRRFIVKDGTVDICRACHRPGESIRHIISGCSRLANGEYLHRHNLVARIIHQQLALKYSLVESEVPYYRYVPDPVLDSGDITLYWDRSIITDRTIVANKPDIVVVDRRERRAMIVDISVPHDENLVKAEKDKQIKYIDLAREVVDMWNVDSAIIVPIVVSANGLIAKSLDQHLRRLSLSGWIKGLIQKAVLLDTARIVRRFLSLEP

SEQ ID NO: 10811 - protein, 962 aa, Mythimna ferrago
MHNKNKALVAALDSQLSNYFDDCEDLTDTHSIMYCAAVAACRVAHVKFPNSDVATRPKPAVPAWQCRIERRIGGARALIGKLICFREGNTRPRVMRFVRRAFSGTDISPRDYMSRVTERIDFLKQKVYAWANRIRRYKRRVERYIQNSTFRSNERWVYRAWERPDQGVTDTRPPDDDAMCSFWRNIWSVPVSHTEGGWTREVERACESITEMGAITISPQDVARAVRPLPNWKSPGPDGLHNFWIKWLQRSHARLASQYQAALESGSLPEFLTTGVTHLLHKSGSTAEPKNYRPITCLPTVYKVLTSILRAKINHHVDNNAIMSASQNGCRNGSRGTKELLLIDMAISQQVRRSRKDLSTCWIDYKKAYDSVPHTWLMRVLELYKVDATLRTFLMSCMRQWRTVLRYPGCRNIQRNSEPVRIERGIFQGDSLSPLWFCLALNPLSTLLENSGLGYRLKRGGQVISHLLYMDDLKLFAPNNLQLMELLKVTETFSSAISMEFGVDKCAVMHIKRGEIVESVGIQLSDSIHLRSLSPTETYKYLGMSEALGINATDMKQSLRERFFGRLKKVLNSLLSGGNKVRAFNGWVMPVLMYAFGVLKWTQSELDALDRRVRTLLTAYRMHHPRSSVMRLYIPRKCGGRGFLNAKSLHNREVCSLREYFLAADGGMHRDVVAVDKGLTPLSLANENWRKPVVLDTNVRREVWQSKELHGRFFRALHGPDVDQLASVAWLRVGDLFGETEGFVCAIMDEVIMTNNYRRFIVKDGTVDICRACHRPGESIRHIISGCSRLANGEYLHRHNLVARIIHQQLALKYSLVESEVPYYRYVPDPVLDSGDITLYWDRSIITDRTIVANKPDIVVVDRSERRAMIVDISVPHDENLAKAEKDKQIKYIDLAREVVDMWEVDSAIIVPIVVSANGLIAKSLDQHLRRLSLGDWIKGLIQKAVLLDTARIVRRFLSLEP

SEQ ID NO: 10812 - protein, 1107 aa, Mythimna ferrago
MRWTQSINENVMRSYFGATEGGTNLTAYRGRMLSLFQVLEPAVNVSAQRLSDQVRVIQRNRMLDDAVLDRLRLESRNGRASPVSPPAAVQRQLSVSPRPDHVGEVDDDEAISVSTQCNARLRSALEDAFREYRSIPPELRPRLPRLPMHRKNRALVCALDSQLSNCFDSSEDLTDTHSILYCAAAAACRVAHVKIPNSDRATRPAKPAWQCRIERRIGEARALIGKLICFREGNTRPRVMRFVRRAFSGTDISPRDYLPRITERIDFLRQKVYAWANRIRRYKRRVERYTQNRAFQSNERWVYRAWERPDQSVIDTHLPDDDAMYSFWRSIWSVPVNHTEGDWTREVERECELIPEMGAITISPQDVARAVRPLPNWKSPGPEGLHNFWLKWFKSSHARLASQFQSALESGSLPQFLTTGITHLLYKSGSTAEPKNYRPITCLPTVYKVLTSILRAKINSHIETNSIMSASQNGCRNGSRGTKELLLIDVAISQQVRRSRRDLSTCWIDYKKAYDSVPHTWLMRVLELYKIDVTLRTFLMSCMGQWRTVLHYPGCRRVSENSEPLRIERGIFQGDSLSPLWFCLALNPLSTLLEGSGLGYRLRREGQVISHLLYMDDLKLFASNNLQLMELLKVTETFSSAIRMEFGLDKCAVMHVKRGEIMESVGTQLSDSIHLRSLCSTETYKYLGMSEALGINAADVKQSLRERFFGRLNKVLKSLLSGGNKVRAFNGWVMPVLMYSFGILKWTQTELDALDRRVRTLLTANRMHHPRSSVMRLYIPRKCGGRGFLNAKTLHNREVCSLREYFLETDVGMHRDVVAVDKGLTPLSLANENWRKPIVMDTNERKEVWKGKELHGRFYRALHGPDVDLLASVSWLRFGDLFGETEGFVFAIMDEVIMTNNYRKYIVKDGTVDICRACHRPGESIRHIISGCSHLANGDYLHRHNLVARIIHQQLALKYNLVESEVPYYRYVPDPVLENGSVTLYWDRSIITDRTIVANKPDIVVIDRLERRTMIVDIAVPHDENLVKAEKDKQTKYLDLAREVVDMWEVDRAIIVPVVVTANGLIAKSLDQHLRRLSLGSWIKGLIQKAVLLDTARIVRRFLSQEP

SEQ ID NO: 10813 - protein, 1200 aa, Mythimna ferrago
MLTRAAARRARPPPPASSLSSASPPPEPSLNASAVTPAATVASSSSDEFYSPPTSPPPARRRRGRRPPSSLGPRGPPASDRVPAPGGSVQRMRWTQSINENVMRSYYGATEGGNNLTAYRVRMLSLFQVLEPAVNVSAQRLSDQVRVILRNHMLDDSVLDRLHTEMSDRVITPPSQPVVPVVVPPSSHISFHTDEVSTDMVTNVSTQCNNELRSALECAIREYRNIPPELRPRIPRLPMCNKNRALVAALDSQLSNYFDDCEDLTETHSIMYCAAVAACRVAHVKFPDSDEATRPKSAVPAWQCRIERRIGGARALIGKLICFREGNTRPRVMRFVRRAFSGTNISPRDYMSRVTERIDFLKQKVYAWANRIRRYKRRVERYTQNRTFRSNERWVYRAWERPDQGVTEARLPDDDAMCSFWRSIWSVPVSHTEGDWTRGVERACDPIPQMGAIDISPQDVARAVRPLPNWKSPGPDGLHNFWIKWFTRSHARLAYQFQSALESGSLPQFLTTGITHLLHKSGSTAEPKNYRPITCLPTVYKVLTSILRSKINSHIDENSIMSPSQNGCKNGSRGTKELLLIDMTISQQVRRSRKDLSTCWIDYKKAYDSVPHTWLMRVLELYKIDTTLRTFLMSCMRQWSTVLRYPGCRNIQRNSEPVRIERGIFQGDSLSPLWFCLALNPLSTLLENSGLGYRLKRGGQVISHLLYMDDLKLFAPNNLQLMELLKVTETFSSAIRMEFGVDKCAVMHVKRGEVVESVGVQLTDSINLRSLSPTETYKYLGMSEALGISTIDMKQSLKERFFGRLKKVFNSLLSGGNKVRAFNGWVMPVLMYSFGVLKWTQTELDALDRRVRTLLTAYRMHHPRSSVMRLYIPRKCGGRGFLNAKTLHNREVCSLREYFLAADVGMHRDVVALDKGLTPLSLANENWRKPIVLDTDDRREVWQSKELHGRFFRALHGPDVDQLTSVAWLRFGDLFGETEGFVCAIMDEVIMTNNYRRFIVKDGTVDICRACHRPGESIRHIISGCSRLANGEYLHRHNLVARIIHQQLALKYSLVESEVPYYRYEPDPVLDNGHITLYWDRPIITDRTIVANKPDIVVVDRSERRAMIVDISVPHDENLVKAEKDKQIKYIDLAREVVDMWEVDSAIIVPIVVSANGLIAKSLDQHLRRLSLGDWIKGLIQKAVLLDTARIVRRFLSLEP

SEQ ID NO: 10814 - protein, 1200 aa, Mythimna ferrago
MLTRAAARRARPPPPASSLSSASPPPEPSLNASAVTPAATVASSSSDEFYSPPTSPPPARRRRGRRPPSSLGPRGPPASDRVPAPGGSVQRMRWTQSINENVMRSYYGATEGGNNLTAYRVRMLSLFQVLEPAVNVSAQRLSDQVRVILRNHMLDDSVLDRLRTEMSDRVITPPSQPVVPVVVPPSSHISFHTDEVSTDMVTNVSTQCNNELRSALECAIREYRNIPPELRPRIPRLPMCNKNRALVAALDSQLSNYFDDCEDLTETHSIMYCAAVAACRVAHVKFPDSDEATRPKSAVPAWQCRIERRIGGARALIGKLICFREGNTRPRVMRFVRRAFSGTNISPRDYMSRVTERIDFLKQKVYAWANRIRRYKRRVERYTQNRTFRSNERWVYRAWERPDQGVTGARLPEDDAMCSFWRSIWSVPVSHTEGDWTREVERACDPIPQMGAIDISPQDVARAVRPLPNWKSPGPDGLHNFWIKWFTRSHARLAYQFQSALESGSLPQFLTTGITHLLHKSGSTAEPKNYRPITCLPTVYKVLTSILRSKINSHIDENSIMSPSQNGCRNGSRGTKELLLIDMTISQQVRRSRKDLSTCWIDYKKAYDSVPHTWLMRVLELYKVDATLCTFLLSCMRQWRTVLRYPGCRNIQRNSEPVRIERGIFQGDSLSPLWFCLALNPLSTLLENSGLGYRLKRGGQVISHLLYMDDLKLFAPNNLQLMELLKVTETFSSAIRMEFGVDKCAVMHIKRGEIVESVGTQLSDSIHLRSLSPTETYKYLGMSEALGINATDMKQSLRERFFGRLKKVLNSLLSGGNKVRAFNGWVMPVLMYAFGVLKWTQTELDALDRKVRTLLTAYRMHHPRSSVMRLYIPRKCGGRGFLNAKTLHNREVCSLREYFLAADVGMHRDVVAVDKGLTPLSLANENWRKPVVLDTNVRKEVWQSKELHGRFFRALHGPGVDQLASVAWLRVGDLFGETEGFVCAIMDEVIMTNNYRRFIVKDGTVDICRACHRPGESIRHIISGCSRLANGEYLHRHNLVARIIHQQLALKYSLVESEVPYYRYVPDPVLDSGDITLYWDRSIITDRTIVANKPDIVVVDRSERRAMIVDISVPHDENLVKAEKDKQIKYIDLAREVVDMWEVDSAIIVPIVVSANGLIAKSLDQHLRRLSLGDWIKGLIQKAVLLDTARIVRRFLSLEP

SEQ ID NO: 10815 - protein, 1048 aa, Mythimna ferrago
MLDDTVLDRLRTEMSDRVITPPSQPVVPAVVPPSSYISFHTDEVSSDTVTNVSNQCNSELRSALECAIREYRNIPPELRPRIPRLPMCNKNRTLVAALDSQLSNYFDDCEDLTDTHSIMYCAAVAACRVAHVKFPNSDVATRPKPAVPAWQCRIERRIGGARAVIGKLICFREGNTRPRVMRFVRRAFSGTDISPRDYMSRVTERIDFLKQKVYAWANRIRRYKRRVERYTQNRTFRSNERWVYRAWERPDQGVTDARLPDDDAMSSFWRSIWSVPVSHTEGDWTREVERACDPIPQMGAIDISPQDVARAVRPLPNWKSPGPDGLHNFWIKWFTRSHARLAYQFQSALESGSLPQFLTTGITHLLHKSGSTAEPKNYRPITCLPTVYKVLTSILRSKINSHIDENSIMSPSQNGCRNGSRGTKELFLIDMTISQQVRRSRKDLSTCWIDYRKAYDSVPHTWLMRVLELYKIDTTLRTFLMSCMRQWSTVLRYPGCRNIQRNSEPVRIERGIFQGDSLSPLWFCLALNPLSTLLENSGLGYRLKRGGQVISHLLYMDDLKLFAPNNLQLMELLKVTEIFSSAIRMEFGVDKCAVMHVKRGEVVESVSTQLTDSINLRSLSPTETYKYLGMSEALGISITGMKQSLRERFFGRLKKVFNSLLSGGNKVRAFNGWVMPVLMYSFGVLKWTQTELDALDRRVRTLLTAYRMHHPRSSVMRLYIPRKCGGRGFLNAKTLHNREVCSLREYFLAADVGMHRDVVAVDKGLTPLSLANENWRKPIVLDTNDRREVWQSKELHGRFFRALHGPDVDQLASVAWLRFGDLFGETEGFVCAIMDEVIMTNNYRRFIVKDGTVDICRACHRPGESIRHIISGCSRLANGEYLHRHNLVARIIHQQLALKYSLVESEVPYYRYEPDPVLDNGHITLYWDRPIITDRTIVANKPDIVVVDRSERRAMIVDISVPHDENLVKAEKDKQIKYIDLAREVVDMWEVDSAVIVPIVVSANGLIAKSLDQHLRRLSLGDWIKGLIQKAVLLDTARIVRRFLSLEP

SEQ ID NO: 10816 - protein, 1199 aa, Acronicta aceris
MLTRARARYIERHTRLTTPDSSPSSALQQPQHGRTSPDAAATASSSSDEYYSPPTSPPPVRRRGGRRPPDRLGPRGPLASGGIPASGGSVQRMRWTQFLNENVMRAYYGATEGGTNLTAYRGRMLSLFQALEPTIDVSTQRLSDQVRVIQRNHMLDDSVLDQLRSEVQSSRAIAHPSQSVAPSAMLPQINLAEVGSDDRVTNVSTQYNEKLRSALEGAFREYRSSPPELRPRLPRLPMNNKNLALVCALDSLLSDYFDSSEDLADTHSILYCAAVAACRVAHVKFPESDRATRPKPMIPAWQSRIEQRIGEARALIGKLICFREGNTRPRVMRFVRRAFSGTNIDPRDYASCVTERIDFLKQKVYAWANRIRRYKRRAERYSLNRAFQGDQRWVYRTWDRPDNGVSDVCRPNDDAMSLFWRNIWSVPVNHTEDDWICDVERACESLPAMEEINISPQDVACAVHSVPNWKAPGPDGLHNFWIKWLRSSHARLASQFQSSLESGTLPQFLTTGITHLLHKSGDTADPKNYRPITCLPTVYKLLTSILRAKICYHIDESSIMSASQNGCRNGSRGTKELLLIDMTISQQVRRLRKNLSTCWIDYKKAYDSVPHTWLMRVLELYKVDVSLRTFLRSCMGQWRTVLHYPGCRQIQRISEPIRIERGIFQGDSLSPLWFCLALNPLSTLLEESRLGYRLRRGGQVISHLLYMDDLKLFASSDLHLMELLKITENFSNSIRMEFGVEKCAVMHVKRGGIVESVGIQLSDSTQLRSLASTETYKYLGMAEALGINVADMKQALQVRFFGRLTKVLKSLLSGGNKVRAFNGWVMPVLMYSFGVLKWTQTELETLDRKVRTLLTAYRMHHPRSSVMRLYIPRKCGGRGFLNAKNLHNREVCSLREHFLKTEMGMHRDVVAVDNGLTPLSMAKENWRKPVVLSTNDRRNVWQGKELHGRYYRALHEPGVDTLASVSWLRFGDLFGETEGFVCAIMDEVMMTNNYRKFIVKDGTVDICRACHRPGESIRHIISGCSRLANGEYLHRHNLVARIIHQQLALKYNLVESEVPYYKYVPDPVLENGHATLYWDRSIITDRTIIANKPDIVVIDRLERRAMIVDITVPHDENLFKAEKEKEIKYLDLAHEVVDMWGVDAAIIVPIVVSANGLIAKSLDRHLKRLSLGGWIKGLIQKAVLLDTARIVRRFLSLGP

SEQ ID NO: 10817 - protein, 920 aa, Eilema sororculum
MAGAKFPIKDPAIRPKSAIPAWQCRIERRVAEARVLIGKLICFRSGNTRPRVMRYVTRAFAGTDISPQDYTSRVTERIDFLKQKVYAWANRIRRYKRRVDRYTVNHMFQRDQRWVYRSWERTDESVDDVRRPDAEATNAFWRSIWSVPVSHTEGDWMREVERACETIPEMEEIYIDATDVDCAVRSLSNWKSPGPDGLHNFWLKWLRSSHVVLASQFQSAIESGTLPAFMTTGVTHLLHKTGSTLEPNNYRPITCLPTVYKLLTSILRAKINNHINNNSIMCASQNGCRNGARGTKELLLIDMAISQQARRNRKDLTACWIDYKKAFDSVPHTWLLRVLELYKVNTTLCTFLRSCMGQWRTVLFYPGCRQALGGGVPITIERGIFQGDSLSPLWFCLALNSLSTLLVNSGLGYRLRREGQMVSHLFYMDDLKLFAHTNPQLIALLKVTETFSNSIKMAFGVDKCAVIHVKRGRVVESEGIQLSDSTNLRSLLVTETYKYLGMSQALCINEVDMKQMLQERFFGRLKKVLNSLLSGGNKVRACNSWVMPLLMYSFGILRWTQTELDTIDRKVRTQLTAFRMHHPRSSVMRLYIPRKCGGRGFLNAKTLHNREVCNLRDYFLKSNVDMHRDVVNVDTGLTPLGLAKENWRRPTIVSTDSRREVWQSKELHGRFYRALHRPEVDLLASVSWLRFSDLFGETEGFVCAIADEVIKTNNYRRYIMRDGTIDICRACHQPGESLRHITSGCSRLANGEYLHRHNQVARIIHQRLALKYNLVEVEVPYYRYVPEPVLENSHITLYWDRSIITDRTVVANKPDIVVIDRSERRALIVDVTIPHDENLVKAEKDKQVKYLDLAHEVVDMWNVDSAIIVPIVVSVNGLIAKSLDQHLKRLGLDGWVKGQMQKAVLLDTARIVRKFLSLEP

SEQ ID NO: 10818 - protein, 1212 aa, Ptilodon capucinus
MTDAPRRNPRRQCRQRSAVRHYAQSTPPDQSPRSASPSPASIIRTSVTAVASSESDEYFSPPTSPPPVRRQRGRPPGHLGLLGQPAPNRVLVPSGVVRRMRWTSSMNENVMRAYYEATEGGTNLTAYRNRMLPLFQSLEPAVNVSAQRLSDQVRVIQRGNMLADTVLDRLRSEVQSRRVVPVASSQPAAQPVASATVTSRLAADSDVDRDNAPIDVSTQYNDLLRSTLEDVVREYRSMPNHLRPRIPRLPMHNGNRALVGALDSLLSIYFDSSDDLVDTHSILYCAAITVCRVARVKVFNTDTATRPKPAVPAWQCRIERRISEARALIGKLSCFREGNTRPRVMRFVKRAFAGTDVSPREYISRVTERIDFLKQKIYAWANRIRRYKARVDRYSQNSMFQRDQRWVYRSWERPNEPVSELQRPDDNTMTTFWRDIWSVPVTHYEGNWIGDVERMCEPIKEMEAISIGPLDVANAVRSLPNWKAPGPDGLHNFWLKWLRSSHVRLASQFQSALQSGSLPEFITTGVTHLLHKTGSTTDPKNYRPITCLPTIYKTLTSILRVKIARHVEDNSIMSASQNGCRSGSRGTKELLLIDMTICQQARRNRKDLSTCWIDYKKAYDSVPHTWLVRVLELYKIDTTLRTFLESCMRQWKTVLLCPGSRQILGNGEPIRIERGIFQGDSLSPLWFCLALNPLSALLEESGFGFRLRRGGQVISHLLYMDDLKLFAPTALQLSGLLKVTETFSNSIRMEFGVDKCAVMHAKQGRMVESEGIQLSDSIQLRSLAATETYKYLGMSQGLGISETDMKQLLRDRFLGRLKKVLKSLLSGGNKVRTYNGWVMPVLMYSFGILKWTQTELDTLDRTVRTTLTAYRMHHPRSSVMRLYIPRKCGGRGLLNVKTLHNREICSLSEYFLRADGEMHVDVVAVDNGLTPLSLAKENWRKPVVLTTDDRRVVWQGKELHGRYYRALHGPDVDLAASVAWLRFGDLFGETEGFVCAIMDEVVMTNNYRRYILRDGTIDICRACHRPGESLRHIISGCSRLANGQYLHRHNQVARIVHQQLALKYRLVTSEVPYYRYEPQPVLEEGHITLYWDRYIITDRTIVANKPDIVLIDRQERRAMIIDITVPHDENLVKAEKDKESKYLDLAHEVVDMWDIDAAIIVPIVVSAHGLLAKSLDKHLKRLALGSWIKGQIQKAVLLETARIVRKFLSLEP

SEQ ID NO: 10819 - protein, 1212 aa, Ptilodon capucinus
MTDAPRRNPRRQCRQRSAVRHYAQSTPPDQSPRSASPSPASIIRTSVTAVASSESDEYFSPPTSPPPVRRQRGRPPGHLGLLGQPAPNRVLVPSGVVRRMRWTSSMNENVMRAYYEATEGGTNLTAYRDRMLPLFQSLEPAVNVSAQRLSDQVRVIQRGNMLADTVLDRLRSEVQSRRVVPVASSQPAAQPVASATVTSRLAADSDVDRDNAPIDVSTQYNDLLRSTLEDVVREYRSMPNHLRPRIPRLPMHKGNRALVGALDSLLSIYFDSSDDLVDTHSILYCAAITVCRVARVKVFNTNTATRPKPAVPAWQCRIERRISEARALIGKLSCFREGNTRPRVMRFVKRAFAGTDVSPREYISRVTERIDFLKQKIYAWANRIRRYKARVDRYSQNSMFQRDQRWVYRSWERPNEPVSELQRPDDNAMTTFWRDIWSVPVTHYEGNWIGDIERMCEPIKEMEAISIGPLDVANAVRSLPNWKAPGPDGLHNFWLKWLRSSHVRLASQFQSALQSGSLPEFITTGVTHLLHKTGSTTDPKNYRPITCLPTIYKTLTSILRAKIARHVEDNSIMSASQNGCRSGSRGTKELLLIDMTICQQARRNRKDLSTCWIDYKKAYDSVPHTWLVRVLELYKIDTTLRTFLESCMRQWKTVLLCPGSRQILGNGEPIRIERGIFQGDSLSPLWFCLALNPLSALLEESGFGFRLRRGGQVISHLLYMDDLKLFAPTALQLSGLLKVTETFSNSIRMEFGVDKCAVMHAKQGRMVESEGIQLSDSIQLRSLAATETYKYLGMSQGLGISETDMKQLLRDRFLGRLKKVLKSLLSGGNKVRAYNGWVMPVLMYSFGILKWTQTELDTLDRTVRTTLTAYRMHHPRSSVMRLYIPRKCGGRGFLNVKTLHNREICSLREYFLRADGEMHVDVVAVDNGLTPLSLAKENWRKPVVLTTDDRRVVWQGKELHGRYYRALHGPDVDLAASVAWLRFGDLFGETEGFVCAIMDEVVMTNNYRRYILRDGTIDICRACHRPGESLRHIISGCSRLANGQYLHRHNQVARIVHQQLALKYRLVTSEVPYYRYEPQPVLEEGHITLYWDRSIITDRTIVANKPDIVLIDRQERRAMIIDITVPHDENLVKAEKDKESKYLDLAHEVVDMWDIDAAIIVPIVVSAHGLLAKSLDKHLKRLALGSWIKGQIQKAVLLETARIVRKFLSLEP

SEQ ID NO: 10820 - protein, 1113 aa, Ptilodon capucinus
MRWTSSMNENVMRAYYEATEGGTNLTAYRDRMLPLFQSLEPAVNVSAQRLSDQVRVIQRGNMLADTVLDRLRSEVQSRRVVPVASSQPAAQPVARATVTSRLAADSDVDRDNAPIDVSTQYNNLLRSTLEDVVREYRSMPNHLRPRIPRLPMHKGNRALVGALDSLLSIYFDSSDDLVDTHSILYCAAITVCRVARIKVFNTDTTTRPKPAVPAWQCRIERRISEARALIGKLSCFREGNTRPRVMRFVKRAFAGTDVSPREYISRVTERIDFLKQKIYAWANRIRRYKARVDRYSQNSMFQRDQRWVYRSWERPNEPVSELQRPDDNAMTTFWRDIWSVPVTHYEGNWIGDVERMCEPIKEMEAISIGPLDVANAVRSLPNWKAPGPDGLHNFWLKWLRSSHVRLASQFQSALQSGSLPEFITTGVTHLLHKTGSTTDPKNYRPITCLPTIYKTLTSILRAKIARHVEDNSIMSASQNGCRSGSRGTKELLLIDMAICQQARRNRKDLSTCWIDYKKAYDSVPHTWLVRVLELYKIDTTLRTFLESCMRQWKTVLLCPGSRQILGNGEPIRIERGIFQGDSLSPLWFCLALNPLSTLLEESGFGFRLRRGGQVISHLLYMDDLKLFAPTALQLSGLLKVTETFSNSIRMEFGVDKCAVMHAKQGRMVESEGIQLSDFIQLRSLAATETYKYLGMSQGLGISETDMKQLLRDRFLGRLKKVLKSLLSGGNKVRAYNGWVMPVLMYSFGILKWTQTELDALDRTVRTTLTAYRMHHPRSSIMRLYIPRKCGGRGFLNVKTLHNREICSLREYFLRADGEMHVDVVAVDNGLTPLSLAKENWRKPVVLTTDDRRVVWQGKELHGRYYRALHGPDVDLAASVAWLRFGDLFGETEGFVCAIMDEVVMTNNYRRYILRDGTIDICRACHRPGESLRHIISGCSRLANGQYLHRHNQVARIVHQQLALKYRLVTSEVPYYRYEPQPVLEEGHITLYWDRSIITDRTIVANKPDIVLIDRQERRAMIIDITVPHDENLVKAEKDKESKYLDLAHEVVDMWDIDAAIIVPIVVSAHGLLAKSLDKHLKRLALGSWIKGQIQKAVLLGTARIVRKFLSLEP

SEQ ID NO: 10821 - protein, 1111 aa, Agrochola circellaris
MRWTQTVNENVMRAYFGATEGGSNLTAYRGRMLSLFQVLEPAVNVSAQRLSDQVRVIQRNHMLDDAVLDRLRLESRNNRVTPASPLVAVQLQNSLSATPRPDHVGEEVDDGVISVSSQCNARLRNALEDAFREYRSTPPGLRPRLPRLPMHKKNKALVCTLDSLLSNYFDGSKDLADTHSILYCTAVAACRVAHVKFPSSDRAPRPKPAVPAWQCRIERRIGEARVLIGKLICFREGNTRPRVMRFVKRAFSGTDTSSRDYLTRVTERIDFLKQKICAWANRIRRYRRRVERYTQNRTFQSDERWVYRAWERLDQGVIDTRLPDDDAMCSFWRSIWSAPVNHTEGDWTGKIERACERIPEMGAINISPQDVACAVRPLPNWKSPGPDGLHNFWIKWLQRSHARLASQFQSALESGSLPQFLTTGITHLLHKSGSTAEPKNYRPITCLPTVYKVFTSILRTKINKHIDTNSIMSASQNGCKNGSRGTKELLLIDMAINQQVRRSRRDLSTCWIDYKKAYDSVPHTWLMRVLELYKVDATLRTFLISCMGQWRTVLRYPGCRQIQRNSEPIRIERGIFQGDSLSPLWFCLALNPLSTLLEDSGLGYRLRRGGQVISHLLYMDDLKLFAPNNLQLVELLKVTETFSSAIRMEFGVDKCAVMHVKRGGIVESGGTQLPDSIHLRSLSSIETYKYLGMSEALGINTADMKQSLKERFFDRLNKVLNSLLSGGNKVRAFNGWVMPVLMYSFGILKWTQTELDALDRRVRTLLTVNRMHHPRSSVMRLYIPRKCGGRGFLNAKTLHNREVCSLREYFLEADVGMHRDVVSVDKGLTPLSLANENWRKPIVLDTNDRREVWQSKELHGRFYRALHGPDVDLLASVSWLRFGDLFGETEGFVFAIMDEVMMTNNYRKYIVKDGTVDICRACHRPGESIRHIISGCSRLANGDYLHRHNLVARIIHQQLALKYNLVESEVPYYKYVPDPVLENGNITLYWDRSIITDRTIVANKPDIVVIDRLERRTMIIDIAVPHDENLVKAEKDKQIKYLDLAREVVDMWDVDTAVIVPIVVTANGVIAKSLDQHLRRLSLGSWIKGLIQKAVLLDTARIVRRFLSQEP

SEQ ID NO: 10822 - protein, 1111 aa, Agrochola circellaris
MRWTQTVNENVMRAYFGATEGGSNLTAYRGRMLSLFQVLEPAVNVSAQRLSDQVRVIQRNHMLDDAVLDRLRLESRNNRVTPASPLVAVQLQNSLSATPRPDHVGEEVDDGVISVSSQCNARLRNALEDAFREYRSTPPGLRPRLPRLPMHKKNKALVCTLDSLLSNYFDGSKDLADTHSILYCAAVAACRVAHVKFPSSDRAPRPKPAVPAWQCRIERRIGEARVLIGKLICFREGNTRPRVMRFVKRAFSGTDTSSRDYLTRVTERIDFLKQKICAWANRIRRYRRRVERYTQNRTFQSDERWVYRAWERLDQGVIDTRLPDDDAMCSFWRSIWSAPVNHTEGDWTGKIERACERIPEMGAINISPQDVACAVRPLPNWKSPGPDGLHNFWIKWLQRSHARLASQFQSALESGSLPQFLTTGITHLLHKSGSTAEPKNYRPITCLPTVYKVFTSILRTKINKHIDTNSIMSASQNGCKNGSRGTKELLLIDMAINQQVRRSRRDLSTCWIDYKKAYDSVPHTWLMRVLELYKVDATLRTFLISCMGQWRTVLRYPGCRQIQRNSEPIRIERGIFQGDSLSPLWFCLALNPLSTLLEDSGLGYRLRRGGQVISHLLYMDDLKLFAPNNLQLVELLKVTETFSSAIRMEFGVDKCAVMHVKRGGIVESGGTQLPDSIHLRSLSSIETYKYLGMSEALGINTADMKQSLKERFFDRLNKVLNSLLSGGNKVRAFNGWVMPVLMYSFGILKWTQTELDALDRRVRTLLTVNRMHHPRSSVMRLYIPRKCGGRGFLNAKTLHNREVCSLREYFLEADVGMHRDVVSVDKGLTPLSLSNENWRKPIVLDTNDRREVWQSKELHGRFYRALHGPDVDLLASVSWLRFGDLFGETEGFVFAIMDEVMMTNNYRKYIVKDGTVDICRACHRPGESIRHIISGCSRLANGDYLHRHNLVARIIHQQLALKYNLVESEVPYYKYVPDPVLENGNITLYWDRSIITDRTIVANKPDIVVIDRLERRTMIIDIAVPHDENLVKAEKDKQIKYLDLAREVVDMWDVDTAVIVPIVVTANGVIAKSLDQHLRRLSLGSWIKGLIQKAVLLDTARIVRRFLSQEP

SEQ ID NO: 10823 - protein, 1032 aa, Agrochola circellaris
MRNSHATAPPSQTVMVAPQFTINQVDEGIDDMATNVSAQYNEELRSALERAIREYRSMSPELRPRLPRLPMHNKNRALVAALDSQLSNYFDDCEDLTDTHSILYCAAVAACRVAHVKFANDSRATRPKPAVPAWQCRIERRIGGARALIGKLICFREGNTRPRVMRFVRRAFSGTDISPEDYVSRATERIDFLKQKVYAWANRIRRYKRRVERYTQNRTFQSDERRVYRAWEQPDQGVADARLPDDDAMCSFWRSIWSAPVSHTEGDWTREVERACDPIPEMGAITICPQDVARAVRPLPNWKSPGPDGLHNFWIKWFKRSHARLAAQYQTALESGSLPEFLTTGVTHLLHKSGSTADPKNYRPITCLPTVYKVLTSILRAKINKHIDTNSIMSASQNGCRNGSRGTKELLLIDMTISQQVRRSRKDLSTCWIDYKKAYDSVPHTWLMRVLELYKVDATLRTFLLSCMGQWRTVLRYPGCRNIQRNSEPIRIERGIFQGDSLSPLWFCLALNPLSTLLEGSDLGYRLRRGGQVISHLLYMDDLKLFAPNNFQLMELLKVTETFSRAIRMEFGVDKCAVMHVKRGEIVESVGTQLTDSINFRALSASETYKYLGMSETLGINVTDMKQSLKERFFGRLTKVFNSFLSGGNKVRAFNGWVMPVLMYSFGVLKWTQTELDALDRRVRTLLTGYRMHHPRSSVMRLYIPRKCGGRGFLNAKTLHNREICSLREYFLEADVGMHRDVVAVDKGLTPLSLAKENWRKPAVLDTNDRKEVWQNKELHGRYFRALHGPDVDLLASVAWLRFGDLFGETEGFVCAIMDEVMMTNNYRRFIVKDGTVDICRACHRPGESIRHIISGCSRLANEEYLHRHNLVARIIHQQLALKYSLVESEVPYYRYVPDPVLESGHITLYWDRSIITDRSIVANKPDIVVVDRAERRTMIIDITVPHDGNLVKAEKDKQIKYLDLAREVVDMWDVDSAIIVPIVVSANGLIAKSLDQHLRRLSLGGWIKGLIQKAVLLDTARIVRRFLSLEP

SEQ ID NO: 10824 - protein, 1207 aa, Amphipyra tragopoginis
MLTRSRAKTLQRTHPTPSASSLSSASQPPEPASIVSDVTPAAAVASSSSDEYFSPATSPSPPPARRRGRGRPPTCLGPRGPPASDRVPAPGGSVQRMRWTQSMNENCMRAYFGATEGGTNLTAYRGRMLSLFQTLEPAVNVSAQRLSDQVRVIQRDHRLDDAALGRLRDEMQNSHATPPPSQIRTQPLVPPAVPLQPNHADKEEQDRAISAGTQYSEIMRSALEDALREFRSTPPELRPQLPRLPMHNKNRALVCALDSLLSNVLESSKDIGDTHSILYCAAVAACRVAHVKFPNDNRATRPKSTVPAWQCRIERRIDEARVLIGKLTCFREGNIRPRVMRFVRRAFSGTDVSPGEYVSRVTERIDFLKQKVYAWANRIRRYRRRVDRYTQNRIFQSDQRWVYRTWERPDQGVSDTHLPDNDVMNAFWRNIWSVPVTHTEGDWMQEVQRACEPIQEMGAVTIGPQDVTSAVRPMPNWKSPGPDGLHNFWIKWLRSSHARLASQFQSSLESGSLPSFLTTGVTHLLFKSGSTAEPKNYRPITCLPTVYKLLTSILRAKINNHIDNNAIMSDSQNGCRNGSRGTKELLLIDMAISQQVRRSRKDLSTCWIDYKKAYDSVPHTWLMRVLELYKINATLRTFLMSCMGQWRTVLHYPGCRQIQGNGELIRIERGIFQGDSLSPLWFCLALNPLSTLLEGSGLGYRLRRGGQVISHLLYMDDLKLFAPNNLQLVELLKVTETFSNSIRMEFGVDKCAVMHVKRGRIMESVGTQLSDAIHLRSLSSTETYKYLGMSEALGINEADMKQSLKERFFGRLIKVLKSLLSGGNKVRAFNGWVMPVLMYSFGMLRWTQTELDALDRRVRTLLTAYRMHHPRSSVMRLYIPRKCGGRGFLNAKTLHNREVCSLREYFSQADVGMHRDVVAVDKGLTPLSLAKENWRKPVVLDTNGRREVWRSKELHGRFYRALHGPDVDFLASVAWLRFGDLFGETEGFVCAIMDEVMMTNNYRKYIVKDGTVDICQACHCPGESIRHIVSGCSRLANGEYLHRHNLVARIIHQQLALKYNLVDTEVPYYKYVPDPVLENGHVTLYWDRSIITDRTIVANKPDIVVIDRLERRTVIVDIAVPHDENLVKAENDKKIKYLDLAHEVVDMWDVDSAVIVPIVVTANGLIAKSLDQHLMRLSLGSWIKGLIQKAVLLDTARIVRKFLSLEP

SEQ ID NO: 10825 - protein, 1205 aa, Amphipyra tragopoginis
MITRSQVRLQRTRPPSSASSLSSASQPPESSPTVSAVTPAAAVASSSSDEYFSPPTSPPPARRRGGRRPPDRLGLRGPLASDRVPAPGGSVTRMRWTKTIKENAMRAYFGATEGGTNLTAYRSRMLSLFQVLEPTVNVSAQRLSDQVRAIQRGHMLDDTVLDWLRSEIQCSPVISSSPQAPGLISRNIPVTSPRLQQVVEEDDDRATVVSIQCNEQLRRALEDAMREYRSTRPEVRPRLPRLPMHRKNRALMCALDSLLSNYFDGSEDLGDTHSILYCAAVAACRVAHVKFINNERATRPKNAVPAWQCRIERRIAEARALIGKLVCFREGNTRPRVMRFVRRAFSGTDVSPREYMSRVTERIDFLKQKVYAWANRIRRYRRRVDRYNQNRMFRSDERWVYRTWERPDQGVDAAHLPDDDAMNSFWRSIWSVPVTHTEGDWMRDVERMCEPILDMGAITISPQDVAGAVRPLPNWKSPGPDGLHNFWLKWLRSSHARLASQFQSSLETGTLPQFLTTGVTHLLHKSGSTAEPKNYRPITCLPTVYKVLTSILRTKINSHIDNNSIMSASQNGCRNGSRGTKELLLIDMAISQQVRRSRKDLSTCWIDYKKAFDSVPHTWLMRVLELYKVNTTLRTFLTSCMGQWRTVLHYPGCRQIQGRGEPIRIERGIFQGDSLSPLWFCLALNPLSTLLEGSGLGYRLRRGGQVISHLLYMDDLKLFAPNNLQLMELLKVTETFSNSIRMEFGVDKCAVMHVKRGGIMESVGTQLSDSIHLRSLSSTETYKYLGMSEALGINVTDMKQSLRERFYGRLKKVLKSLLSGGNKVRAFNGWVMPVLMYSFGILKWTQTELDALDRRVRSLLTAYRMHHPRSSVMRLYIPRKCGGRGFLNAKTLHNREVCSLREYFSQTSVGMHRDVVAVDKGFTPLSLAKENWRKPVVLDTNGRREVWRSKELHGRFYRALHGPDVDFLASVAWLRFGDLFGETEGFVCAIMDEVMMTNNYRKYIVKDGTVDICRACHCPGESIRHIVSGCSRLANGEYLHRHNLVARIIHQQLALKYNLVDAEVPYYKYVPDPVLENGHVTLYWDRSIITDRTIVANKPDIVVIDRSERLTMIVDIAVPHDENLVKAEKDKEIKYQDLAHEVVDMWNVDSAVIVPIVVTANGLIAKSLDQHLKRLSLGGWIKGLIQKAVLLDTARIVRKFLSLRP

SEQ ID NO: 10826 - protein, 1204 aa, Amphipyra tragopoginis
MMTRSRAKAQSTQPPPSASSLSSASQPPEAASTVSDVTPAAAVASSSSDEYFSPATSPPPARRRGRGRPPASLGPRGPPASDRVPAPGGSVQRMRWTQSMNENCMRAYFGATEGGTNLTAYRGRMLSLFRALEPAVNVSAQRLSDQVRVIQRDRRLDDAALDRLRSEVQSSRIGALQSQTAVQSQVPLGVVPRSIPADEEGDDRVTNVSTQCNEQLRSALELAIREYRSTPPDLRPRLPRLPMNKKNKALMCALDSLLSSYFDGSEDLTDTHSILYCAAVAACRVAHVKVDNNDRATRPKLAVPAWQCRIERRIGEARALIGKLICFGEGNTRPRVMRFVRRAFSGTDTNPRDYMSRVTERIDFLKQKVYAWANRIRRYKRRVERYTQNRMFQRDQRWVYRAWERSDQGVGDAHLPDDDAMNSFWRSIWSVPVSHTEGGWIRDVERVCEPILDMGAISISPQDVASAVRPLPNWKSPGPDGLHNFWLKWLRSSHARLASQFQSSLETGTLPQFLTTGVTHLLHKSGSTAEPKNYRPITCLPTVYKLLTSILRGRISSHIENNSIMSASQNGCRNGSRGTKELLLIDMAISQQVRRSRKDLSTCWIDYKKAYDSVPHTWLMRVLELYKINATLRTFLMSCMGQWRTVLHYPGCRQIQGNGELIRIERGIFQGDSLSPLWFCLALNPLSTLLEGSGLGYRLRRGGQVISHLLYMDDLKLFAPNNLQLLELLKVTETFSNSIRMEFGVDKCAVMHVKRGGIMESVGTQLSDSIQLRSLSSTETYKYLGMSEALGINEADMKQSLKERFFGRLIKVLKSLLSGGNKVRAFNGWVMPVLMYSFGMLRWTQTELDALDRRVRTLLTAYRMHHPRSSVMRLYIPRKCGGRGFLNAKTLHNREVCSLREYFSQADVGMHGDVVAVDKGLTPLSLAKENWRKPVVLDTNGRREVWQSKELHGRFYRALHGPDVDFLASVAWLRFGDLFGETEGFVCAIMDEVMMTNNYRKYIVKDGTVDICRACHCPGESIRHIVSGCSRLANGEYLHRHNLVARIIHQQLALKYDLVDSEVPYYRYVPDPVLENGHVTLYWDRSIITDRTIVANKPDIVVIDRSERRAMIVDITVPHDENLVKAENDKKIKYLDLAHEVVDMWDIDSAFIVPIVVTANGLIAKSLDQHLMRLSLGSWIKGLIQKAVLLDTARIVRKFLSLEP

SEQ ID NO: 10827 - protein, 1201 aa, Amphipyra tragopoginis
MLTRARTREARPPPPDSPLSSASQPPESSPTVSAVTPAAAVASSSSDEYFSPPTSPTPVRRQGRRRPPNSLGPRGPPAPSRVLATGGCVQRMKWTQSINENVMRAYYGSTEGGTNLTAYRVRMLTLFRELEPAINVSAQRLSDQVRVIQRNHRLDDAALDRLRLEVQNSRVTPVPSQTAVHHININVVPPRSDCVDGDVDDRAVTVSSQYNDRLRSALEDAIREYRANPELRPRLPRLPMHNKNRALVCALDSLLSSYFESSEDLVDTHSILYCAAVATCRVANVKFNNSERATRPKPAIPAWQCRIERRIDGARALIGKLICFREGNTRPRVMRFVRRAFSGTGISPREYMSQVTERIDFLKQKVCAWASRIRRYKRRVERYAQNRMFQCDQRWVYRAWDRPDQGVSDGRLPDDDAMSSFWRSIWSVPVTHTEGDWTRDIERACEPIEEMGEILISPQDVASAARPLPNWKSPGPDGLHNFWIKWLRSSHARLASQFQSSLESGSLPQFLTTGVTHLLHKSGSTAEPKNYRPITCLPTVYKLLTSILRTKINTHVENNSIMSPSQNGCRNGSRGTKELLLIDMAISQQVRRSRKNLSTCWIDYKKAYDSVPHTWLMRVLELYKINTTLRTFLTSCMRQWRTVLRYPGCRPILGSGEPISIERGIFQGDSLSPLWFCLALNPLSTLLEGSGLGYPLRRGGQVVSHLFYMDDLKLFAPTKLQLVELLKVTETFSNSIRMEFGVDKCAVMHVRRGGIMESEGLQLSDSIHLRSLSANDTYKYLGMSEGLGISEADMKQSLRERFFGRLKKVLKSLLSGGNKVRAFNGWVMPVLMYSFGILKWTQTELEALDRRVRTLLTANRMHHPRSSVMRLYIPRKCGGRGLLNAKTLHNREVCSLREYFLHADAGMHRDVVAVDKGLTPLNLAKENWRKPVVLSTNDRREVWQSKELHGRFYRALHGPDVDFLASVSWLRFGDLFGETEGFVCAIMDEVIMTNNYRKYIVKDGTVDICRACHCPGESLRHIISGCSRLANGEYLHRHNQVARIIHQQLALKYNLVESEVPYYKYVPDPVLENGHITLYWDRSIITDRTIVANKPDIVVIDRSERRTMIVDVTIPHDENLVKAEKDKQIKYLDLAHEVVNMWDVDSATIVPIVVTANGLMAKSLDQHLKRLSLGGWIKGLIQKAVLLDTARIVRRFLSLEP

SEQ ID NO: 10828 - protein, 1200 aa, Amphipyra tragopoginis
MLTRSKARARDAHPPPPDSSPSSASQQQGLDPASPAAAVASSSSDEYYSPPSSPPPARRRGGTRPPGGLGLRGPLASDRVPAPGGIVPRMKWTQKINESVMRAYYGATEGGTNLTAYRGRMFSLFQVLEPAVNVSAQRLSDQVRVIQRGHMLDDTVLDRIRSEVQSSPVISPSPQVLEQSQNLAATLPRPNPADEEDDDRATNVSTQCNEELRSALEDAMREYRYTRSDLRPRIPRLPMHRKNRALMCALDSLLSNYFDGSEDLGDTHSILYCAAVAACRVAHVKFIDSERVTRPKNAVPAWQCRIERRIAEARALIGKLVCFREGNTRPRVMRFVRRAFSGTDVSPREYMSRVTERIDFLKQKVYAWASRIRRYRRRVDRYTQNRLFQSDERWVYRTWERPDQRVSDTHLPDNDVISAFWRNIWSVPVTHTEGDWMQEVQRACEPIQEMGDIIISPQDVASAVRPMSNWKSPGPDGLHNFWLKWLRSSHACLASQFQSSLESESLPQFLTTGVTHLLHKSGSTAEPKNYRPITCLPTVYKLLASILRSKINFHIENNCIMSPSQNGCRNGSRGTKELLLIDMAISQQVRRSRKDLSTCWIDYKKAYDSVPHTWLMRVLELYKVNTTLCAFLTSCMRQWRTVLRYPGCRQIQGIGEPIRIERGIFQGDSLSPLWFCLALNPLSTLLEGSGLGYRLRRGGQVISHLLYMDDLKLFAPNKLQLLELLKVTETFSNSIRMEFGVDKCAVMHVKRGRIMESVGTQLTDSIHLRSLSSTETYKYLGMSEALGINGTDMKQSLRERFCGRLKKVLNSLLSGGNKVRAFNGWVMPVLMYSFGILKWTQTELDALDRRVRSLLTAYRMHHPRSSVMRLYIPRKCGGRGFLNAKTLHNREVCSLREYFSQADVGMHRDVVAVDKGFTPLSLAKENWRKPVVLDTNDRREVWRSKELHGRFYRALHGPDVDFLASVAWLRFGDLFGETEGFVCAIMDEVMMTNNYRKYIVKDGTVDICRACHCPGESIRHIVSGCSRLANGEYLHRHNLVARIIHQQLALKYNLVDAEVPYYKYVPDPVLENGHITLYWDRSIITDRTVVANKPDIVVIDRSERLTMIVDITVPHDENLVKAEKDKEIKYQDLAHEVVAMWDVDSAIIVPIVVTANGLIAKSLDQHLKRLSLGSWIRGLVQKAVLLDTARIVRKFLSLRP

SEQ ID NO: 10829 - protein, 1201 aa, Amphipyra tragopoginis
MLTRARNRTPRPPPPDSPLSFASQPPESSPTVSAVTPAAAVASSSSDEYFSPPTSPTPVRRQGRRRPPNSLGPRGPPAPSRVLATGGCVQRMKWTQKINENVMRAYYGSTEGGTNLTAYRVRMLTLFQELEPAINVSAQRLSDQVRVIQRNHRLDDAALDRLRLEVQNSHVTPVPSQTAVHQLNISVVPPRSDCVGGDVDDRAVTVSSQYNDQLRSALEDAIREYRANPELRPRLPRLPMHNKNRALVCALDSLLSSYFESSEDLCDTHSILYCAAVAACRVANVKFNNSERATRPKPAVPVWQCRIERRIDEARALIGKLICFREGNTRPRVMRFVRRAFSGTGIRPREYISRVTERIDFLKQKVYAWASRIRRYKRRVERYTQNRMFQCDQRWVYRAWERPDQGVSDGRLPDDDAMNSFWRSIWSVPVIHTEGDWTRDIERACEPIEEMGEILISPQDVASAVRPLPNWKSPGPDGLHNFWIKWLRSSHARLASQFQSSLESGSLPQFFTTGVTHLLHKSGSTAEPKNYRPITCLPTVYKLLTSILRTKINTHVENNSIMSPSQNGCRNGSRGTKELLLIDMAISQQVRRSRKNLSTCWIDYKKAYDSVPHTWLMRVLELYKINATLRTFLMSCMGQWRTVLRYPGCRPIRGSDEPISIERGIFQGDSLSPLWFCLALNPLSTLLEGSRLGYPLRRGGQVVSHLLYMDDLKLFAPTKLRLVELLKVTETFSNSIRMEFGVDKCAVMHVRRGGIVESEGLQLSDSIHLRSLSANDTYKYLGMSEGLGISEADMKQSLKERFFGRLKKVLKSLLSGGNKVRAFNGWVMPVLMYSFGILKWTQTELDALDRRVRTLLTANRMHHPRSSVMRLYIPRKCGGRGLLNAKTLHNREVCSLREYFLHADAGMHRDVVAVDKGLTPLNLAKENWRKPVVLSTNDRREVWQSKELHGRFYRALHGPDVDFLASVSWLRFGDLFGETEGFVCAIMDEVIMTNNYRKYIVKDGTVDICRACHCPGESLRHIISSCSRLANGEYLHRHNQVARIIHQQLALKYNLVESEVPYYRYVPDPVLENGHITLYWDRSIITDRTIVANKPDIVVIDRSERRTMIVDVTIPHDENLVKAEKDKQIKFLDLAHEVVNMWDVDSATIVPIVVTANGLMAKSLDQHLKRLSLGGWIKGLIQKAVLLDTARIVRRFLSLEP

SEQ ID NO: 10830 - protein, 1204 aa, Noctua pronuba
MITRSRAKQQKAHPPSPGSSLSSASQPPGRATSVSSVSPVAAVASSSSDEFFSPPSTPSPPRRRGRGRPPAGLGPRGQQAPNRVPAAGGNVSRMRWTQSINENVMRAYYGATEGGSNLTAYRGRMLSLFQVLEPGVSVSAQRLSDQVRVIQRNHMLDDTVLDRLRFDSRSNLVTPASPMIAVQLQNVSSAPPRSDHDGEEDDDEVISVSTQCNAQLRSALEGAFREYRSIPPELRPRLPRLPMHKKNKALVCALDSQLSTCFDSSKDLADTHSILYCGAVAACRVAHVKFPNNDRATRPKLAVPAWQRRIERRIGEARALIGKLICFREGNTRPRVMRFVRRAFSGTGISFRDYLARVTERIDFLKQKICAWANRIRRYKRRVERYTQNRTFQSDERWVYRAWERPDQGVTDTRLPDADAMCLFWRSIWSVPVSHTEGDWTREVEQACEPIPEMGAIIISPQDVACAVRPLPNWKSPGPDGLHNFWIKWFQRSHARLASQFQSALESGSLPQFLTTGITHLLHKSGSTAEPKNYRPITCLPTVYKVLTSILRAKINHHIDSNSIMSASQNGCRNGSRGTKELLLIDMAISQQVRRSRRDLSTCWIDYKKAYDSVPHTWLMRVLELYKVDATLRTFLKSCMGHWRTVLRYPGCRQIQGNSEPIRIERGIFQGDSLSPLWFCLALNPLSTLLEGSGLGYRLRRGGQVISHLLYMDDLKLFAPNNLQLMKLLKVTETFSSAIRMEFGVDKCAVMHVKRGEIMESVGTQLSDSIHLRSLSSTETYKYLGMSEALGINTTDMKQSLRERFFGRLNKVLGSLLSGGNKVRAFNGWVMPVLMYSFGILKWTQTELDALDRRVRALLTANRMHHPRSSVMRLYIPRKCGGRGFLNAKTLHNREVCSLREYFLEADVGMHRDVVSVDKGLTPLSLANENWRKPRVLDTNDRKEVWQGKELHGRFYRALHGPDVDFLASVSWLRFGDLFGETEGFVCAIMDEVMMTNNYRKYIVKDGTVDICRACHRPGESIRHIISGCSRLANGEYLHRHNLVARIIHQQLALKYNLVESEVPYYKYAPDPVLDDGNITLYWDRSIITDRTIVANKPDIVVIDRLERRAMIVDITVPHDENLVKAEKDKQFKYLDLAREVVDMWDVSTAVIVPIVVSANGLIAKSLDQHLRRLSLGSWIKRLIQKAVLLDTARIVRRFLSQEP

SEQ ID NO: 10831 - protein, 1026 aa, Noctua pronuba
MIAVQLQNVSSAPPRSDHDGEDGNDEVISVSTQCNAQLRSALEGAFREYRSTPPELRPRLPRLPMHKKNKALVCALDSQLSTCFDSSKDLADTHSILYCGAVAACRVAHVKFPNNDRATRPKLAVPAWQSRIERRIGEARALIGKLICFREGNTRPRVMRFVRRAFSGTGISFRDYLARVTERIDFLKQKICAWANRIRRYKRRVERYTQNRTFQSDERWVYRAWERPDQGVTDTRLPDDDAMCLFWRSIWSVPVSHTEGDWTREVEQACDPIPEMGAIIISPQDVACAVRPLPNWKSPGPDGLHNFWIKWFQRSHARLASQFQSALESGSLPQFLTTGITHLLHKSGSTAEPKNYRPITCLPTVYKVLTSILRAKINQHIESNSIMSASQNGCRNGSRGTKELLLIDMAISQQVRRSRKDLSTCWIDYKKAYDSVPHTWLMRVLELYKVDATLRTFLRSCMGCWRTVLRYPGCRQIQRNSEPIRIERGIFQGDSLSPLWFCLALNPLSTLLEGSGLGYRLRRGGQVISHLLYMDDLKLFAPNNLQLMKLLKVTETFSSAIRMEFGVDKCAVMHVKRGEIMESVGTQLSDSIHLRSLSSTETYKYLGMSEALGINTADMKQSLRERFFGRLNKVLGSLLSGGNKVRAFNGWVMPVLMYSFGILKWTQTELDALDRRVRTLLTANRMHHPRSSVMRLYIPRKCGGRGFLNAKTLHNREVCSLREYFLEADVGMHRDVVSVDKGLTPLSLANENWRKPKVLVTNDRKEVWQSKELHGRFYRALHGPDVDFLASVSWLRFGDLFGETEGFVCAIMDEVMMTNNYRKYIVKDGTVDICRACHRPGESIRHIISGCSRLANGEYLHRHNLVARIIHQQLALKYNLVESEVPYYKYAPDPVLDNGNITLYWDRSIITDRTIVANKPDIVVIDRLERRAMIVDITVPHDENLVKAEKDKQFKYLDLAHEVVDMWDVNTAVIVPIVVSANGLIAKSLDQHLKRLALGSWIKGLIQKAVLLDTARIVRRFLSQEP

SEQ ID NO: 10832 - protein, 1207 aa, Noctua pronuba
MSPMLTRRRAKLLETHPPSPGSSLSSASQPPGRATSVSAASPVAAVASSSSDEFFSPPSTPPSPRRRGRRPPAGLGPRSQQAPNRVPAAGGNVSRIRWTQSMNENVMRAYYGATEGGINLTAYRCRMLSLFQALEPAVNVSAQRLSDQVRVIQNNHRLDDATLDRLRSELRISPASNPLPSQNVTHVPAALPLRANQHAEEEDDRAVSADNLCNEELRSALEDAIREYRFTSPDLRPRLPRLPMNKKNRALVCALDALLPNFIASSANLCDTHSILYCTAVAACRVANVKFPNTDSATRPKSAVPVWQCRIERRINEARALIGKLICFREGNTRPRVMRFVRRAFSGTDISPREYMSRVTERIDFLKQKVYAWANRIRRYRRRVDRYTQNRMFQSDERWVYRIWERPVTIQGVTDTHLPDNDAMSAFWRSIWSVPVSHTEGDWMRVVEQACDSIPEMEAISISPLDVARAVRPLPNWKSPGPDGLHNFWIKWLQRSHACLASQFQSSLETGSLPSFFTTGVTHLLHKSGSTAEPKNYRPITCLPTVYKVLTSILRAKIVRHIDNNSIMSVSQNGCRNGSRGTKELLLIDMAISQQVRRSRRDLSTCWIDYKKAYDSVPHTWLRRVLELYKIDATLRTFLVSCMGQWSTVLLYPGCRQVLGNDEPIRIERGIFQGDSLSPLWFCLALNPLSTLLEDSGLGYRLKRGGQVISHLLYMDDLKIFAPSNLQLMELLKVTETFSSAIRMEFGVDKCAVMHVKRGEIMESVGTQLSDSIYLRSLSSTETYKYLGMSEALGINATDMKQSLKERFFGRLNKVLKSLLSGGNKVRAFNGWVMPVLMYSYGILKWTQTELDALDRKVRTLLTANRMHHPRSSVMRLYIPRKCGGRGFLNAKTLHNREVCSLREYFLETDVGMHRDVVSVDKGLTPLSLANENWRKPVVLDTNDRKEVWQSKELHGRFFRALHGPDVDLLASVSWLRFGDLFGETEGFVCAIMDEVIMTNNYRKYIVKDGTVDICRACHRPGESIRHIVSGCSRLANGEYLHRHNLVARIIHQQLALQYNLVGTEVPYYKYVPDPVLENGHATLYWDRSIITDRTILANKPDIVVIDRRERRAMIVDITVPHDENLVKAENDKKIKYLDLAHEVVDMWDVDSAIIVPIVVTVNGLIAKSLDQHLRRLSLRGWVKGLIQKAVLLDTARIVRRFLSLEP

SEQ ID NO: 10833 - protein, 1200 aa, Tinea trinotella
MLTRSRARHQRTQLPSSGSSLSSASQPPESMPTVSPVISVAAVASSSSDECFSPPTISPSARRRGGGRPPASLEPRGPSASGGVPATSGRVQRMRWTQSINENVMRSYFGATEGGISLTAYRGRMLTLFQVLEPAVNVSAQRLSDQVRVIQRNRMLDDVVLDRLRLESRSSHVSPVSPPVAVQLQPSALPRPNNIEENDDDVTISVSNQYNEQLRSALENAFREYRSTPPGLRPRIPRLPMHKKNRALVCALDSQLANQFESSKDLADTHSILYCAAVAVCRVAHVKFPNNDRAARLAVPAWQCRIERRISDARALIGKLISFREGNTRPRVMRFVRRAFSGTDISSRDYQTRVTERIDFLKQKIYAWANRIRRYKRRVERYTQNRTFENNERWVYRAWERPDQDVSDTCLPDDDAMSLFWRNIWSVPVGHTEGEWTREVERACDLIPEMGAINISPQDVACAVRPLPNWKSPGLDGLHNFWIKYFQRSHACLAAQFQSALELGSLPQFLTTGITHLLHKSGSTAEPKNYRPITCLPTVYKVLTSILRAKINNHIDANCIMSASQNGCRSGSRGTKELLLIDVAISQQVRRSRRDLSTCWIDYKKAYDSVPHTWLMRVLELYKVDAALRTFLVSCMGQWRTVLHYPGCRRILGNGEPIKIERGIFQGDSLSPLWFCLALNPLSTLLDGSGQGYRLRRDGQVISHLLYMDDLKLFAPNNLQLMKLLKVTETFSSAISMEFGADKCATMHVKRGEIMESVGIQLSDSIHLRSLCSTETYKYLGMSEALGINAVDVKQSLKDRFFGRLNKVLNSLLSGGNKVRAFNGWVMPVLMYSFGILKWTQTELDALDRRVRTLLTANRMHHPRSSVMRLYIPRKCGGRGFLNAKTLHNREVCSLREYFLKTDVGMHRDVVAVDKGLTSLSLANENWRKPVVLDTNDRREVWQSKELHGRFFRALHGPDVDFLASVSWLRFGDLFGETEGFVCAIMDEVMMTNNYRKYIVKDGTVDICRACHRPGESIRHIISGCSRLANGDYLHRHNLVARIIHQQLALKYNLVESEVPYYRYVPDPVLENGNITLYWDRSIITDRTIVANKPDIVVIDRLERRTIIVDVAVPHDENLVKAEKDKQIKYLDLAREVVDMWEVDAAIIVPIVVTANGLIAKSLDKHLKRLSLGSWIKRLIQKAVLLDTARIVRRFLAQEP

SEQ ID NO: 10834 - protein, 1198 aa, Spilosoma lubricipeda
MLTRARSRALLPSSDSSLRSALPSSDARTEVPTVAEASSSSSSDEFFSPPTSPTPVRRQGRDRPPTSLGPRGPLTSNRAPAAGGDVRRMKWTQSINENVMRAYFRATELGTNLTAYRVRLVSLFQELEPAVNVSAQRLSDQVRAIQRCHLLDDVVLERIRSDVRGTLTVPSSSHSVDLVATTPQLPHNEYVDEQVESEVMTVSTQCNDRIRRALEDAIQEYRHVDYKNRPRLPRLPIHKRNLALVSALNSLLPDYFGNSEDLSDTHSILYCAAIAVCRVAGVKFVEQITTTRPKNEVPAWQCRIERRITETRTLIGKLITFQSGNTRPRVMRFVKQAFLGTTISPQQYMSSVTERIDFLKQKVYAWANRIRRYRKRVDRFIQNRMFQRNEKWVYRKWEEPSPRVGEGRFPDENVTNTFWRNIWSVPVTHTEGDWYRDVERSCESITSMEPITISKDDIGCAVRSLPNWKSPGPDGLHNFWLKWFRSSHACLASQYQAAVDLGSLPQFLTTGITHLLYKSGSAMDPKNFRPITCLPTMYKLLTSILRLKISAHINNNLIMSVSQNGCRSGSRGTKELLIIDMTISQQVRRNRKSLATCWIDYKKAYDSVPHTWLLRVLELYKIDTTLCTFLKSCMGQWRTVLRYPGCWQTAVNDVLINIERGIFQGDSLSPLWFCLALNPLSALLEDSGLGYRLQKDDQVISHLFYMDDLKLLAPTKLQLTALLKVTENFSNSIKMEFGVDKCAVMYVKKGVIVESEGTELSDSTRLRSLSATETYKYLGFSQSLGIPEPDMKQSLRERFFGRLKKVLKSLLSGGNKVRAYNGWVMPVLMYSFGILRWTQTELDALDRRVRTLLTAFRMHHPRSSVMRLYIPRKFGGRGLLNAKTLHNREIYNLREYFLHTDVGVHRSVVAVDTGLTPLALAKENWRKPVVLSTNDRREVWKGKELHGRFYRALNGPDIDFKASTSWLRYGDLFGESEGFVCAIMDEVIMTNNYRKYILKDGTVDICRACHRPGESIRHIISGCSRLANGEYLHRHNQVARIVHQQLALKYHLVSSEVPYYRYVPDPVLENGRATLYWDRSIITDRTIVANKPDIVVIDRLERRAMIVDIAVPHDENLVKVEKEKQIKYLDLSHEIVDMWNVDSAIIVPIVVSAHGLIAKSLDQHLKRLTLEGWIKGLMQKAVLLDTARIVRRFLSLEP

SEQ ID NO: 10835 - protein, 1199 aa, Spilosoma lubricipeda
MLTRARSRAQLLTPDSSLRSALPSSDARTEVPTVAEASSSSSSDEFFSPPTSPTPVRRQERHRPPDSLGPRGPLTSNRAPAAGGNVRRMKWTHSINENVMRAYFRATELGTNLTAYRVRLVSLFQELEPAVNVSAQRLSDQVRAIQRCHLLDDAVLERIRSDIRNSLAVPSSSHVVDTIVNTTSQLPRSEYIDERVDSEIISVSTQCNDTIRSTLEDAIREYRYVDSNNRPRLSRLPIHKRNLALVSALDSLLPDYFNNSEDLSDTHSILYCAAIAVCRVAGVNFVECKTATRPKNTVPAWQCRIERRIAGTRTLIGKLISFRSGNTRPKVMRFVKQAFLGTTVSPQQYMSCVTERIDFLKQKVYAWANRIRRYRKRTDRYNQNRTFQRNEKWVYQKWEKLSPCMSDEHLPDENATNYFWRNIWSTPVTHTEGHWCRDVERSCDSITPMEPVRIDKEDVSCAVRSLANWKAPGPDGLHNFWLKWFRSSHAYLASQFQTALDSGSLPQFLTTGITHLLHKSGSTTDPKNFRPITCLPTLYKLLTSILRLKIAAHINNNSIISVSQNGCRSGTRGTKELLIIDMTISQQVRRNRKSLATCWIDYKKAYDSVPHTWLLRVLELYKIDTTLCTFLKSCMGQWRTVLRYPGCRQSTMNDVLIKIERGIFQGDSLSPLWFCLALNPLSALLEDSGLGYRLQKDDQVISHLFYMDDLKLLAPTKLQLTALLKVTENFSNSIKMEFGVDKCAVMYVKKGVIVESEGTELSDSTRLRSLSATETYKYLGFSQSLGIPEPDMKQSLRERFFGRLKKVLKSLLSGGNKVRAFNGWVMLVLMYSFGILRWTQTELDAIDRRVRTLLTAFRMHHPRSSVMRLYIPRKLGGRGLLNAKTLHNREIYNLREYFLHTDVGMHRSVVTVDIGLTPLALAKENWRKPVVLSTNDRREVWKGKELHGRFYRALNGPDIDFKASTSWLRYGDLFGETEGFVCAIMDEVIMTNNYRKYILKDGTVDICRACHRPGESIRHIISGCSRLANGEYLHRHNQVARIVHQQLALKYHLVSSEVPYYRYVPDPVLENGRATLYWDRSIITDRTIVANKPDIVVIDRLERRAMIVDIAVPHDENLVKVEKEKQIKYLDLSHEIVDMWNVDSAIIVPIVVSAHGLIAKSLDQHLKRLTLEGWIKGLMQKAVLLDTARIVRRFLSLEP

SEQ ID NO: 10836 - protein, 1127 aa, Ochropleura plecta
MLHGNTASGQGRSQPLGHGKSQQSVLIYLKNVMRSYYGATEGGNNLTAYRVRMLSLFQVLEPAVNVSAQRLSDQVRVIQRNRMLDDTVLDRLRTEMQSSQVITSSSQAVVPPKPHQLVNRVNEVSNDVATNVSTQCSEEMRSTLEGAIREFRYISPELRPRLPRLPMHNKNRALVAALDLQLSNYFDNCENLTDAHSILYCAAVAACRVAHVKFPDDRATRPKPAIPFWQCRIERRIGAARALIGKLTCFREGNTRPRVMRFVRRAFAGTDISPPDYISRVAERIDFLKQKVYAWANRIRRYKRRVERYTQNRTFQSDERWVYRAWERPDQGVSDTHLPDDDAMCLFWRNIWSVPVSHTEGEWTREVERACDPIPEMGALTISPQDVACAVRPLPNWKSPGPDGLHNFWIKWIQRSHVCLAALFQSALESGSLPKFLTTGITHLLHKSGSTAEPKNYRPITCLPTLYKVLTSILRAKITKHIDDNSIMSASQNGCRNGSRGTKELLLIDMAISQQVRRSRRHLSTCWIDYKKAYDSVPHTWLMRVLDLYKIDATLRTFLISCMRQWSTVLRYPGCRQIQRNSEPIRIERGIFQGDSLSPLWFCLALNPLSTLLENSGLGYRLRRGGQVISHLLYMDDLKLFAPNDLQLMELLKVTETFSSAIRMEFGVDKCAVMHVKRGEIVESVGTRLSDSINLRSLSATETYKYLGMSEALGINVADMKQSLKERFFGRLRKVFNSLLSGGNKVRAFNGWVMPVLMYSFGILKWTQTELDALDRKVRTLLTAFRMHHPRSSVMRLYIPRSCGGRGFLNAKTLHNREVCSLREYFLETDVGMHRDVVAVDKGLTPLSLAKENWRKPVVLDTNDRREVWQSKELHGRFFRALHGPDVDQLASVAWLRSGDLFGETEGFVCAIMDEVMMTNNYRRFIVKDGTVDICRACHRPGESIRHIISGCSRLANGEYLHRHNLVARIIHQQLALKYNLVESEVPYYRYEPDPVLEHGNITLYWDRSIITDRTIVANKPDIVVVDRSERRAMIVDITVPHDENLVKAEKDKQIKYIDLAREVVDMWDVDSAVIVPIVVSANGLIAKSLDQHLRRLSLGSWIKGLIQKAVLLDTARIVRRFLSLEP

SEQ ID NO: 10837 - protein, 1198 aa, Ochropleura plecta
MITRLAARQHARLPPPDSPLSSASPPPEPSLIVSAVTPAVAVASSSSDEYFSPPTTPPPACRRGGRRPPDGLGLRGPPASDRVPAPGGSVQRMRWTSSINENVMRSYYGATEGGNNLTAYRVRMLSLFQVLEPAVNVSAQRLSDQVRVIQRNRMLDDTVLDRLRTEMQSSQVITSSSQAVVPPQSHQLVSHDDEVSNDMATNVSTQCNEEMRIALEGAIREYRYISPELRPRLPRLPMHNKNRALVAVLDSQLSNYFDNCENLTDAHSILYCAAVAACRVAHVKFHDDGATRPKPVVPFWQCRIERRIGVARALIGKLICFREGNTRPRVMRFVRRAFAGTDISPPDYMSHITERIDFLKQKVYAWANRIRRYKRRVERYTLNRTFQSDERWVYRAWERPDQGVSDTHLPDDDAMCLFWRNIWSVPVSHTEGEWTREVERACDPIPEMGALTISPQDVACAVRPLPNWKSPGPDGLHNFWLKWIQRSHARLATLFQTALESGSLPKFLTTGITHLLHKSGSTTEPKNYRPITCLPTIYKVLTSILRAKITKHIDDNSIMSASQNGCRNGSRGTKELLLIDMAISQQVRRSRRHLSTCWIDYKKAYDSVPHTWLMRVLELYKVDATLRTFLSSCMRQWNTVLRYPGCRQIQRNSEPIRIERGIFQGDSLSPLWFCLALNPLSTLLEDSGLGYRLRRGGRVISHLLYMDDLKLFAPNDSQLMELLKVTETFSSAISMEFGVDKCAVMHVKRGEIVESVGTQLSDSIHLRSLSANETYKYLGMSEALGINVADMKQSLKERFFGRLRKVFNSLLSGGNKVRAFNGWVMPVLMYSFGILKWTQTELDALDRKVRTLLTAYRMHHPRSSVMRLYIPRSCGGRGFLNAKTLHNREICSLREYFLEADVGMHRDVVTVDKGFTPLSLAKENWRKPVVLDTNDRREVWQSKELHGRFFRALHGPDVDQPASVAWLRSGDLFGETEGFVCAIMDEVMMTNNYRRFIVKDGTVDICRACHRPGESIRHIISGCSRLANGEYLHRHNLVARIIHQQLALKYSLVESEVPYYRYEPDPVLEHGNITLYWDRSIITDRTIVANKPDIVVVDRSERRAMIVDITVPHDENLVKAEKDKQIKYIDLAREVVDMWDVDSAIIVPIVVSANGLIAKSLDQHLRRLSLGSWIKGLIQKAVLLDTARIVRRFLSLEP

SEQ ID NO: 10838 - protein, 868 aa, Ochropleura plecta
MRFVRRAFAGTDISPPDYMSHITERIDFLKQKVYAWANRIRRYKRRVERYTLNRTFQSDERWVYRAWERPDQGVSDTSLPDDDAMCLFWRNIWSVPVSHTEGEWTREVERACDPIPEMGALTISPQDVACAVRPLPNWKSPGPDGLHNFWLKWIQRSHARLATLFQTALESGSLPKFLTTGITHLLHKSGSMTEPKNYRPITCLPTIYKVLTSILRAKITKHIDDNSIMSASQNGCRNGSRGTKELLLIDMAISQQVRRSRRHLSTCWIDYKKAYDSVPHTWLMRVLELYKVDATLRTFLSSCMRQWNTVLRYPGCRQIQRNSEPIRIERGIFQGDSLSPLWFCLALNPLSTLLEDSGLGYRLRRGGRVISHLLYMDDLKLFAPNDSQLMELLKVTETFSSAISMEFGVDKCAVMHVKRGEIVESVGTQLSDSIHLRSLSANETYKYLGMSEALGINVADMKQSLKERFFGRLRKVFNSLLSGGNKVRAFNGWVMPVLMYSFGILKWTQTELDALDRKVRTLLTAYRMHHPRSSVMRLYIPRSCGGRGFLNAKTLHNREICSLREYFLEADVGMHRDVVTVDKGFTPLSLAKENWRKPVVLDTNDRREVWQSKELHGRFFRALHGPDVDQLASVAWLRSGDLFGETEGFVCAIMDEVMMTNNYRRFIVKDGTVDICRACHRPGESIRHIISGCSRLANGEYLHRHNLVARIIHQQLALKYSLVESEVPYYRYEPDPVLEHGNITLYWDRSIITDRTIVANKPDIVVVDRLERRAMIVDITVPYDENLVKAEKDKQIKYIDLAREVVDMWDVDSAIIVPIVVSANGLIAKSLDQHLRRLSLGSWIKGLIQKAVLLDPARIVRRFLSLEP

SEQ ID NO: 10839 - protein, 1196 aa, Ochropleura plecta
MITRLAARQHARLPPPDSPLSSASPPPEPSLIVSAVTPAVAVASSSSDEYFSPPTTPPPACRRGGRRPPDGLGLRGPPASDRVPAPGGSVQRMRWTSSINENVMRSYYGATEGGNNLTAYRVRMLSLFQVLEPAVNVSAQRLSDQVRVIQRNRMLDDTVLDRLRTEMQSSQVITSSSQAVVPPQSHQLVSHDDEVSNDMATNVSTQCNEEMRIALEGAIREYRYISPELRPRLPRLPMHNKNRALVAVLDSQLSNYFDNCETDAHSILYCAAVAACRVAHVKFPDDGATRPKPVVPFWQCRIERRIGVARALIGKLICFREGNTRPRVMRFVRRAFAGTDISPPDYMSHITERIDFLKQKVYAWANRIRRYKRRVERYTLNRTFQSDERWVYRAWERPDQGVSDTHLPDDDAMCLFWRNIWSVPVSHTEGEWTREVERACDPIPEMGALTISPQDVACAVRPLPNWKSPGPDGLHNFWLKWIQRSHARLATLFQTALESGSLPKFLTTGITHLLHKSGSTTEPKNYRPITCLPTIYKVLTSILRAKITKHIDDNSIMSASQNGCRNGSRGTKELLLIDMAISQQVRRSRRHLSTCWIDYKKAYDSVPHTWLMRVLELYKVDATLRTFLSSCMRQWNTVLRYPGCRQIQRNSEPIRIERGIFQGDSLSPLWFCLALNPLSTLLEDSGLGYRLRRGGRVISHLLYMDDLKLFAPNDSQLMELLKVTETFSSAISMEFGVDKCAVMHVKRGEIVESVGTQLSDSIHLRSLSANETYKYLGMSEALGINVADMKQSLKERFFGRLRKVFNSLLSGGNKVRAFNGWVMPVLMYSFGILKWTQTELDALDRKVRTLLTAYRMHHPRSSVMRLYIPRSCGGRGFLNAKTLHNREICSLREYFLEADVGMHRDVVTVDKGFTPLSLAKENWRKPVVLDTNDRREVWQSKELHGRFFRALHGPDVDQPASVAWLRSGDLFGETEGFVCAIMDEVMMTNNYRRFIVKDGTVDICRACHRPGESIRHIISGCSRLANGEYLHRHNLVARIIHQQLALKYSLVESEVPYYRYEPDPVLEHGNITLYWDRSIITDRTIVANKPDIVVVDRSERRAMIVDITVPHDENLVKAEKDKQIKYIDLAREVVDMWDVDSAIIVPIVVSANGLIAKSLDQHLRRLSLGSWIKGLIQKAVLLDTARIVRRFLSLEP

SEQ ID NO: 10840 - protein, 1200 aa, Hecatera dysodea
MLTRSRTRAQTTQSTSSGSSLSSASQPPGPTPAVSPEIPVAAVASSSSDEYFSPPTTPPPARRRGRGRPPTSLGPRGPPASDRVPAIGGSVQRMRWTQSINENVMRSYFGATEGGTNLTAYRGRMLSLFQVLEPAVNVSAQRLSDQVRVIQRNRMLDDAVLDRLRLESRSSRVSPASPPAAVQIQPSISPRPDHVSEDVDDGAITVSNQCNERLRSALEDAFREYRSTPPGLRPRLPRLPMHNKNRALVCALDSQLENCFNSSKDLADTHSILYCAAAAACRVAHVKFPSSDRAARPAVPAWQCRIERRIGEARALIGKLICFREGNTRRRVMRFVRRAFSGTDISPRDYLTRVTERIDFLKQKVYAWASRIRRYKRRVERYTQNRTFQSNERWVYRAWERPDQVVTDTHLPDDDAMCSFWRSIWSVPVSHTEGDWTREVERTCDPIPEMGAITISPQDVARAVRPLLNWKSPGPDGLHNFWIKWFTRSHARLASQFQSALESRSLPQFLTTGITHLLHKSGSTAEPKNYRPITCLPTVYKVLTSILRAKINDHIESNSIMSTSQNGCRNGARGTKELLLIDVAISQQVRRSRKDLSTCWIDYKKAYDSVPHTWLMRVLELYKVNTVLRTFLMSCMGQWRTVLHYPGCRQTQANSEPIRIERGIFQGDSLSPLWFCLALNPLSTLLEGSGQGYRLRRGGQVISHLLYMDDLKLFAPNNLQLMKLLKVTETFSSDISMEFGVDKCAVMHVKRGEIMESVGTQLSDSIYLRSLCSTETYKYLGMSEALGINATSVKQSLKERFFGRLNKVLNSLLSGGNKVRAFNGWVMPVLMYSFGILKWTQTELDALDRRVRSLLTANRMHHPRSSVMRLYIPRKCGGRGFLNAKTLHNREVCSLREYFLEADVGMHRDVVAVDKGLTPLSLANENWRKPVVLDTNDRREVWQSKELHGRFYRVLHGPDVDFLASVAWLRFGDLFGETEGFICAITDEVMMTNNYRKYIVKDGTVDICRACHRPGESIRHIISGCSSLANGDYLHRHNLVARIIHQQLALKYNLVESEVPYYRYVPDPVLENGNCTLYWDRSIITDRTIVANKPDIVVIDRLERRAMIVDIAVPHDENLVKAEKDKQSKYLDLAREVVDMWNVNTAVIVPIIVTANGIIAKSLDQHLKRLSLGCWIKGLIQKAVLLDTARIVRRFLSREP

SEQ ID NO: 10841 - protein, 1196 aa, Hecatera dysodea
MLTRAAARRARLPPPASSLSSASPPPEPSPTVSAATPAVAVASSSSDEYFSPPTSPPPARRRRGRRPPDGLGPRGPPVSDRVPAPGGSVQRMRWTQTINENVMRSYYGATEGGTNLTAYRGRMLSLFQVLEPAVNVSAQRLSDQVRVIQRNRMLDDSVLDRLRTEICSHVIVPSPQTVAPPQLTQIPCHADEENNDRVTNVSTQCNDELRSALEGAIREYRYVSPELRPRIPRLPMHNKNRALVAALDSQLSNYFDNCEDLTDAHSIMYCAAVAACRVAHVKMPSDRVTRPKVAVPAWQCRIERRIGGARALIGKLICFREGNTRPRVMRFVRRAFSGTNISPSDYLSRVTERIDFLKQKVYAWANRIRRYKRRVERYTQNRTFRSNERWVYKAWERPDQDVTDMHPPDDDAMCSFWRNIWSVPVCHTEGDWIREVERACDPLPEMGAIIISPQDVARAVRSLPNWKSPGPDGLHNFWIKWFKGSHACLASRYQAALESGSLPEFFMTGVTHLLHKSGSTAEPKNYRPITCLPTVYKVLTSILRDKINQHINSNNIMSASQNGCRNGSRGTKELLLIDMVISQQVRRSQKDLSTCWIDYKKAYDSVPHSWLMRVLELYKIDTTLRTFLMSCMGQWRTVLRYPGCRNIQRNSEPVRIERGIFQGDSLSPLWFCLALNPLSTLLENSGLGYRLRRGGQVISHLLYMDDLKLFAPTNLQLMELLKVTETFSNAIRMEFGVDKCAVMHVKRGEIMESVGTQLSDSINLRSLSSTETYKYLGMSEALGINVTDMKQSLRERFFGRLKKVLNSLLSGGNKVRAFNGWVMPVLMYSFGVLKWTQTELDALDRRVRTLLTAYRMHHPRSSVMRLYIPRKCGGRGFLNAKTLHNREICSLREYFLAVDVGMHRDVVAVDKGLTPLSLANENWRKPAVLDTNDRRAVWQSKELHGRFFRALHGPDVDQLASVAWLRFGDLFGETEGFVCAIMDEVIMTRNYRRFIVKDGTVDICRACHRPGESIRHIVSGCSSLANGEYLHRHNLVARIIHQQLALKYSLVESEVPYYRYVPDPVLDNGNITLYWDRSIITDRTIVANKPDIVVVDRIVRRAMIVDITVPHDENLVKAEKDKQIKYLDLAREVVDMWDVDSAIIVPIVVSVNGLIAKSLDQHLRRLTLGGWIKGLIQKAVLLDTARIVRRFLSLEP

SEQ ID NO: 10842 - protein, 1200 aa, Hecatera dysodea
MLTRSRAQAQTAQATSSGSSLSSASQPPGPAPPVSPEIPVAAVASSSSDEYFSPPTTPPPARRRGRGRPPNSLGPRGPPASDRVPAIGGSVQRMRWTQSINVNVMRSYFGVTEGGTNLTAYRGRMLSLFQVLEPAVNVSAQRLSDQVRVIQRNNMLDDAVLDRLRLESRSSCVSTASPPVTAQQQTSVLPRPAHDGEEDEDGAISVSTQCNERLRSALEDAYREYRSTPPELRPRLPRLPMHNKNRALVCALDSQLSIYFDSSENLTDTHSILYCGAAAACRVAHVKLPNSDRVARLAIPAWQCRIERRIGEARALIGKLICFREGNTRPRVMRFVRRAFSGTDISPRDYLTRVTERIDFLKQKVYAWANRIRRYKRRVERYTQNRTFQRNERWVYRAWERPDQGVTDTRLPNDEAMLSFWRNIWSVPVSHTEGDWTREVERACDPIPEMGAINISPQDVARAVRPLPNWKSPGPDGLHNFWIKWFKGSHARLAAQFQAALGSGSLPKFLTTGITHLLHKSGSTAEPKNYRPITCLPTVYKVLTSILRAKINNHIDSNSIMSASQNGCRNGSRGTKELLLIDVAISQQVRRSRRDLSICWIDYKKAYDSVPHTWLMRVLELYKVDAVLRTFLMSCMGQWRTVLHYPGCRQTQANSEPIRIERGIFQGDSLSPLWFCLALNPLSTLLEGSGQGYRLRRGGQVISHLLYMDDLKLFAPNNLQLMKLLKVTETFSSDISMEFGVDKCAVMHVKRGEIMESVGTQLSDSIHLRSLCSTETYKYLGMSEALGINATGVKQSLKERFFGRLNKVLNSLLSGGNKVRAFNGWVMPVLMYSFGILKWTQTELDALDRRVRSLLTANRMHHPRSSVMRLYIPRKCGGRGFLNAKTLHNREVCSLREYFLEADVGMHRDVVAVDKGLTPLSLANENWRKPVVLDTNDRREVWKSKELHGRFYRVLHGPDVDFLASVAWLRFGDLFGETEGFICAITDEVMMTNNYRKYIVKDGTVDICRACHRPGESIRHIISGCSSLANGDYLHRHNLVARIIHQQLALKYNLVESEVPYYRYAPDPVLENGNCTLYWDRSIITDRTIVANKPDIVVIDRLERRAMIVDIAVPHDENLVKAEKDKQSKYLDLAHEVVDMWNVNTAVIVPIVVTANGIIAKSLDQHLKRLSLGSWIKGLIQKAVLLDTARIVRRFLSREP

SEQ ID NO: 10843 - protein, 1200 aa, Hecatera dysodea
MLTRSRAQAQTAQATSSGSSLSSASQPPGPAPPVSPEIPVAAVASSSSDEYFSPPTTPPPARRRGRGRPPTSLGPRGPPASDRVPAIGGSVQRMRWTQSINVNVMRSYFGATEGGTNLTAYRGRMLSLFQVLEPAVNVSAQRLSDQVRVIQRNNMLDDAVLDRLRLESRSSCVSTASPPVTAQQRTSVLPRPDHDGEEDEDRAISVSSQCNEQLRSALEDAFREYRSTPPELRPRLPRLPMHNKNRALVCALDSQLSIYFDSSENLTDTHSILYCGAAAACRVAHVKLPNSDRVARLAIPAWQYRIERRIGEARALIGKLICFRGGNTRPRVMRFVRRAFSGTDISPRDYLTRVTERIDFLKQKVYAWANRIRRYKRRVERYTQNRTFQRNERWVYRAWERPDQGVTDTRLPDDEAMLSFWRNIWSVPVSHTEGDWTREVERACDPIPEMGAINISPQDVARAVRPLPNWKSPGPDGLHNFWIKWFKGSHARLASQFQTALGSGSLPEFLTTGITHLLHKSGSTSEPKNYRPITCLPTVYKVLTSILRAKINNHIDSNSIMSASQNGCRNGSRGTKELLLIDVAISQQVRRSRRDLSTCWIDYKKAYDSVPHTWLMRVLELYKVDAVLRTFLMSCMGQWRTVLHYPGCRQTQANSEPIRIERGIFQGDSLSPLWFCLALNPLSTLLEGSGQGYRLRRGGQVISHLLYMDDLKLFAPNNLQLMKLLKVTETFSSDISMEFGVDKCAVMHVKRGEIMESVGTQLSDSINLRSLCSTETYKYLGMSEALGINATGVKQSLKERFFGRLNKVLNSLLSGGNKVRAFNGWVMPVLMYSFGILKWTQTELDALDRRVRSLLTANRMHHPRSSVMRLYIPRKCGGRGFLNAKTLHNREVCSLREYFLEADVGMHRDVVVVDKGLTPLSLANENWRKPVVLDTNDRREVWKSKELHGRFYRVLHGPDVDFLASVAWLRFGDLFGETEGFICAITDEVMMTNNYRKYIVKDGTVDICRACHRPGESIRHIISGCSSLANGDYLHRHNLVARIIHQQLALKYNLVESEVPYYRYAPDPVLENGNCTLYWDRSIITDRTIVANKPDIVVIDRLERRAMIVDIAVPHDENLVKAEKDKQSKYLDLAHEVVDMWNVNTAVIVPIVVTANGIIAKSLDQHLKRLSLGSWIKGLIQKAVLLDTARIVRRFLSREP

SEQ ID NO: 10844 - protein, 1200 aa, Hecatera dysodea
MLTRSRTRAQTTQSTSSGSSLSSASQPPGPTPAVSPEIPVAAVASSSSDEYFSPPTTPPPARRRGRGRPPTSLGPRGPPASDRVPAIGGSVQRMRWTQSINENVMRSYFGATEGGTNLTAYRGRMLSLFQVLEPAVNVSAQRLSDQVRVIQRNRMLDDAVLDRLRLESRSSRVSPASPPAAVQIQPSISPRPDHVSEDVDDGAITVSTQCNERLRSALEDAFREYRSTPPELRPRLPRLPMHNKNRALVCALDSQLENCFNSSKDLADTHSILYCAAAAACRVAHVKFPNSDRATRPAVPAWQCRIERRIGEARALIGKLICFREGNTRRRVMRFVRRAFSGTDISPRDYLTRVTERIDFLKQKVYAWASRIRRYKRRVERYTQNRTFQSNERWVYRAWERPDQVVTDTHLPDDDAMCSFWRSIWSVPVSHTEGDWTREVERTCDPIPEMGAITISPQDVARAVRPLPNWKSPGPDGLHNFWIKWFTRSHVRLASQFQSALESRSLPQFLTTGITHLLHKSGSTAEPKNYRPITCLPTVYKVLTSILRAKINDHIESNSIMSTSQNGCRNGARGTKELLLIDVAISQQVRRSRKDLSTCWIDYKKAYDSVPHTWLMRVLELYKVDAVLRAFLMSCMGQWRTVLHYPGCRQTQANSEPIRIERGIFQGDSLSPLWFCLALNPLSTLLEGSGQGYRLRRGGQVISHLLYMDDLKLFAPNNLQLMKLLKVTETFSSDISMEFGVDKCAVMHVKRGEIMESVGTQLSDSIHLRSLCSTETYKYLGMSEALGINATSVKQSLKERFFGRLNKVLNSLLSGGNKVRAFNGWVMPVLMYSFGILKWTQTELDALDRRVRSLLTANRMHHPRSSVMRLYIPRKCGGRSFLNAKTLHNREVCSLREYFLEADVGMHRDVVAVDKGLTPLSLANENWRKPVVLDTNDRREVWQSKELHGRFYRVLHGPDVDFLASVAWLRFGDLFGETEGFICAITDEVMMTNNYRKYIVKDGTVDICRACHRPGESIRHIISGCSSLANGDYLHRHNLVARIIHQQLALKYNLVESEVPYYRYVPDPVLENGNCTLYWDRSIITDRTIVANKPDIVVIDRLERRAMIVDIAVPHDENLVKAEKDKQSKYLDLAREVVDMWNVNTAVIVPIVVTANGIIAKSLDQHLKRLSLGSWIKGLIQKAVLLDTARIVRRFLSREP

SEQ ID NO: 10845 - protein, 1200 aa, Mythimna impura
MLTRAAARRARPPPPDSSFSSASPPPEPSPIVSAVTSAAAVASSSSDEYFSPPTTPPPARRRGGRRPPSGLGPRGPPASDRVPAPGGSVQRMRWTRSINENVMRSYYGATEGGNNLTAYRVRMLSLFQVLEPAVNVSAQRLSDQVRVIQRNHMLDDTVLDRLRTEMGSHAIASSSQTVAPSQVSPSNHLPNHADEESTDMVTHVSTQCSNELRSALECAIREYRNMPLELRPRLPRLPMCNKNKALVAALDLQLSNYFDDCEDLTDTHSIMYCAAVAACRVAHVKFPNSDVATRPKPAVPAWQCRIERRIGGARALIGKLICFREGNTRPRVMRFVRRAFSGTDISPRDYMSCVTERIDFLKQKVYAWANRIRRYKRRVERYTQNRTFRSNERWVYRAWEQPDQGGADTRLPDDDAMSSFWRNIWSVPVSHTEGGWTREVERACEPIPEMGAITISPQDVARAVRPLPNWKSPGPDGLHNFWIKWLQRSHARLASQYQTALESGSLPEFLTTGVTHLLHKSGSTAEPKNYRPITCLPTVYKVLTSILRAKINHHVDNNGIMSASQNGCRNGSRGTKELLLIDMAISQQVRRSRKDLSTCWIDYKKAYDSVPHTWLMRVLELYKIDATLRTFLMSCMRQWRTVLRYPGCRHIQRNSEPVRIERGIFQGDSLSPLWFCLALNPLSTLLENSGLGYRLKRGGQVISHLLYMDDLKLFAPNNLQLMELLKVTETFSSAIRMEFGVDKCAVMHVKRGEIVESVGTQLSDSINLRSLSPTETYKYLGMSEALGINATDMKQTLRERFFGRLKKVFNSLLSGGNKVRAFNGWVMPVLMYSFGVLKWTQTELEALDRRVRTLLTAYRMHHPRSSVMRLYIPRKCGGRGFLNAKILHNREVCSLREYFLTADVGMHRDVVAVDKGLTPLSLANESWRKPVVLDTNDRREVWQSKELHGRFFRALHGPDVDQLASVAWLRVGDLFGETEGFVCAIMDEVIMTNNYRRFIVKDGTVDICRACHRPGESIRHIISGCSRLANGEYLHRHNLVARIIHQQLALNYSLVESEVPYYRYVPDPVLDNGDITLYWDRSIITDRTIVANKPDIVVVDRRERRTMIVDISVPHDENLVKAEKDKQIKYIDLAREVVDMWDVDSAIIVPIVVSANGLIAKSLDQHLRRLALGGWIKGLIQKAVLLDTARIVRRFLSLEP

SEQ ID NO: 10846 - protein, 1200 aa, Mythimna impura
MLTRSRAREQETHPTSSGSSLSSASQPPGPAPAVSPVIPAAAVASSSSDEYFSPPTTPPPARRRGRGRPPASLRPRGPPASDRVPAAGGSVQRMRWTQSINENVMRSYFGATEGGSNLTAYRGRMLSLFQVLEPTVNVSAQRLSDQVRVIQRNRMLDDAVLDRLRLESQRSRASSATPPAAVQLQPSALPRPDHVGDADDDAAISVSTQCNERLRSALEDAFREYRSTPPGLRPRLPRLPMHKRNRALVCALDSQLSNCFDSSKDLADTHSILYCAAAAACRVAHVKFPNCDRATRPAVPAWQRRIERRIGEARALIGKLICFREGNTRPRVMRFVRRAFLGTDISPQNYLPCVTERIDFLKQKVYAWASRIRRYKRRVERYTQNRTFQSNERWVYRTWERPDQDVTDTRLPDDDAMCSFWRRIWSVPVSHIEGDWIREVERTCDLLPEMGAITISPQDVARAVRPLPNWKSPGPDGLHNFWIKWFQGSHARLASQFQSALESGSLPEFLTTGITHLLHKSGSTADPKNYRPITCLPTVYKVLTSILRAKINTHIETNSIMSASQNGCRNGSRGTKELLLIDMAISQQVRRSRKDLSTCWIDYKKAYDSVPHTWLMRVLELYKVDTTLRTFLMSCMRQWRTVLHYPGCRQIRENSEPIRIEHGIFQGDSLSPLWFCLALNPLSTLLEGSGLGYRLKRGGQVISHLLYMDDLKLFAPNNLHLMELLKVTETFSNAIRMEFGVDKCAVMHVKRGEIMESVGTQLSDSIYLRSLCSTETYKYLGMSEALGINAADAKQSLKERFFGRLNRVLKSLLSGGNKVRAFNGWVMPVLMYSFGILKWTQTELDALDRRVRTLLTANRMHHPRSSVMRLYIPRKCGGRGFLNAKTLHNREVCSLREYFLETDVGMHRDVVAVDNGLTPLSLANGNWRKPIILDTNDRREVWQSKELHGRFYRALHGPDVDLLASVSWLRFGDLFGETEGFVCAIMDEVVMTNNYRKYIVKDGTADICRACHRPGESIRHIISGCSHLANGDYLHRHNLVAKIIHQQLALKYNLVESEVPYYKYVPDPVLDNGSITLYWDRSIITDRTIVANKPDIVVIDRLERRTMIVDIAVPHDDNLVKAEKDKQTKYLDLAREVVDMWEVDTAVIVPIVVTANGLISKSLDQHLRRLSLGSWIKGLIQKAVLLDTARIVRRFLSQEP

SEQ ID NO: 10847 - protein, 1144 aa, Mythimna impura
MLTRAAARRARLPPPASSLSSASPPPEPSHTVSAVTPAVAVASSSSDEYFSPPTSPPPARRRRGRRPPSGLGPRGPPASDRVPAPGGSVQRMRWTQSINENVMRAYYGATEGGNNLTAYRVRMLSLFQVLEPAVNVSAQRLSDQVRVIQRNHMLDDTVLDRLRTEMSNHAIAPSSQSVVPVMVPPSYHLSGHVDEEITDMVTHVSTQCNNELRSALECAIREYRNMPLELRPRLPRLPMHNKNKALVAALDLQLSNYFDDCKDLTDTHSIMYCAAVAACRLAHVKFPNCDVATRPKPAVPAWQCRIERRIGGARALIGKLICFREGNTRPRVMRFVRRAFSGTDISPRDYMSRVTERIDFLKQKVYAWANRIRRYKRRVDRYTQNRTFRSNERWVYRAWERPDQGVTDACLPDDDAMSSFWRSIWSVPVSHTEGDWTREVERACDPIPQMGAIDISPQDVARAVRPLPNWKSPGPDGLHNFWIKWFTRSHARLAYQFQSALESGSLPQFLTTGITHLLHKSGSTAEPKNYRPITCLPTVYKVLTSILRSKINSHIDKNLIMSPSQNGCRNGSRGTKELLLIDMTISQQVRRSRKDLSTCWIDYKKAYDSVPHTWLMRVLELYKIDTTLRTFLMSCMRQWSTVLRYPGCRHTQRNSEPVRIERGIFQGDSLSPLWFCLALNPLSTLLENSGLGYRLKRGGQVISHLLYMDDLKLFAPNNLQLMELLKVTESFSSAIRMEFGVDKCAVMHVKRGEVVESVGTQLTDFINLRSLSPTETYKYLGMSEALGINITDMKQSLKERFFGRLKKVFNSLLSGGNKVRAFNGWVMPVLMYSFGVLKWTQTELDALDRKVRTLLTAYRMHHPRSSVMRLYIPRKCGGRGFLNAKTLHNREVCSLREYFLAADVGMHRDVVTVDKGLTPLSLANENWRKPVVLDTNDRREVWQSKELHGRFFRALHGPDVDQLASVAWLRSGDLFGETEGFVCAIMDEVIMTNNYRRFIVKDGTVDICRACHRPGESIRHIISGCSRLANGEYLHRHNLVARIIHQQLALNYSLVESEVPYYRYVPDPVLDNGDITLYWDRSIITDRTIVANKPDIVVVDRRERRTMIVDISVSHDENLVKAEKDKQIERKKERNNIYWYKRRA

SEQ ID NO: 10848 - protein, 1200 aa, Mythimna impura
MLTRSRAQKLHTHPTSSGSSLSSASQPPGPAPTVSPEIPVAAVASSSSDEYFSPPTTPPPARRRGRGRPPASLGPRGPPASDRVPAAGGSVQRMRWTSSINENVMRSYFGATEGGINLTAYRSRMLSLFQVLEPAVNVSVQRLSDQVRVIQRNRMLDDAVLDRLRLESQSSRVSPATTPAAVQRLPTASPRPVQVGDADDDAAISVSTQCNDRLRGALEDAFREYRSTPPGLRPRLPRLPMHKRNRALVCALDSQLSNCFDSSKDLTDTHSILYCAAVAACRVAHVKFPNCDRATRPAVPAWQCRIEHRIGEARALIGKLICFREGNTRPRVMRFVRRAFSGTDISPRDYLPCVTERIDFLKQKIYAWANRIRRYKRRVERYTRNRTFQSNERWVYRDWERSDQGVTDTRLPDDDAMCSFWRSIWSAPVSHTEGDWIREVERACDLLPEMGAITISPQDVARAVRPLPNWKSPGPDGLHNFWVKWFQRSHARLASQFQSALESGSLPQFLTTGITHLLHKSGSTAEPKNYRPITCLPTVYKVLTSILRAKINSHIETNSIMSASQNGCRNGSRGTKELLLIDIAISQQVRRYRKNLSACWIDYKKAYDSVPHTWLMRVLELYKVDATLRTFLMSCMGQWRTVLHYPGCRQIQENNEPIRIERGIFQGDSLSPLWFCLALNPLSTLLEGSGLGYRLKRGGQVISHLLYMDDLKLFAPNNLQLVELLKVTETFSSAIRMEFGVDKCAVIHVKRGEIMESVGIQLSDSIHLRSLCSTETYKYLGMSESLGINTDDVKQSLKERFFGRLNKVLNSLLSGGNKVRAFNGWVMPVLMYSFGILKWTQTELDALDRRVRTLLTANRMHHPRSSVMRLYIPRKCGGRGFLNAKTLHNREVCSLREYFLKTDVGMHRDVVAVDKGLTPLSLANENWRKPIVLDTNDRREVWQSKELHGRFYRALHGPDVDLLASVSWLRFGDLFGETEGFVFAIMDEVMMTNNYRKYIVKDGTVDICRACHRPGESIRHIISGCSHLANGDYLHRHNLVARIIHQQLALKYNLVESEVPYYRYVPDPVLDNGNITLYWDRSIITDRTIVANKPDIVVIDRLERRTMIVDIAVPHDENLVKAEKDKQTKYLDLAREVVDMWEVDKAIIVPIVVTANGLIAKSLEQHLRRLSLGSWIKGLIQKAVLLDTARIVRRFLSQEP

SEQ ID NO: 10849 - protein, 1107 aa, Mythimna impura
MRWTSSINENVMRSYFGATEGGINLTAYRGRMLSLFQVLEPAVNVSVQRLSDQVRVIQRNRMLDDAVLDRLRLESQSSRVSPATTPVAVQRLPTASPRPVQVGDADDDAAISVSTQCNDRLRGALEDAFREYRSIPPGLRPRLPRLPMHKRNRALVCALDSQLSNCFDSSKDLTDTHSILYCAAVAACRVAHVKFPNCDRATRPAVPAWQCRIEHRIGEARALIGKLICFREGNTRPRVMRFVRRAFSGTDISPRDYLPCVTERIDFLKQKIYAWANRIRRYKRRVERYTRNRTFQSNERWVYRDWERSDQGVTDTRLPDDDAMCSFWRSIWSAPVSHTEGDWIREVERACDLLPEMGAITISPQDVARAVRPLPNWKSPGPDGLHNFWVKWFQRSHARLASQFQSALESGSLPQFLTTGITHLLHKSGSTAEPKNYRPITCLPTVYKVLTSILRAKINSHIETNSIMSASQNGCRNGSRGTKELLLIDIAINQQVRRSRKNLSACWIDYKKAYDSVPHTWLMRVLELYKVDATLRTFLMSCMGQWRTVLHYPGCRQIQENNEPIRIERGIFQGDSLSPLWFCLALNPLSTLLEGSGLGYRLKRGGQVISHLLYMDDLKLFAPNNLQLEELLKVTETFSSAIRMEFGVDKCAVIHVKRGEIMESVGIQLSDSIHLRSLCSTETYKYLGMSESLGINTDDVKQSLKERFFGRLNKVLNSLLSGGNKVRAFNGWVMPVLMYSFGILKWTQTELDALDRRVRTLLTANRMHHPRSSVMRLYIPRKCGGRGFLNAKTLHNREVCSLREYFLKTDVGMHRDVVAVDKGLTPLSLANENWRKPIVLDTNDRREVWQSKELHGRFYRALHGPDVDLLASVSWLRFGDLFGETEGFVFAIMDEVMMTNNYRKYIVKDGTVDICRACHRPGESIRHIISGCSHLANGDYLHRHNLVARIIHQQLALKYNLVESEVPYYRYVPDPVLDNGNITLYWDRSIITDRTIVANKPDIVVIDRLERRTMIVDIAVPHDENLVKAEKEKQTKYLDLAREVVDMWEVDRAIIVPIVVTANGLIAKSLEQHLRRLSLGSWIKGLIQKAVLLDTARIVRRFLSQEP

SEQ ID NO: 10850 - protein, 962 aa, Mythimna impura
MHNKNKALVAALDLQLSNYFDDCEDLTDTHSIMYCAAVAACRVAHVKFPNCDVATRPKPAVPAWQCRIERRIGGARALIGKLICFREGNTRPRVMRFVRRAFSGTDISPRDYMSRVTERIDFLKQKVYAWANRIRRYKRRVERYTQNRTFRSNERWVYRAWERPDQGVTDACLPDDDAMSSFWRSIWSVPVSHTEGDWTREVERACDPIPQMGAIDISPQDVARAVRPLPNWKPPGPDGLHNFWIKWFTRSHARLAYQFQSALDSGSLPQFLTTGITHLLHKSGSTAEPKNYRPITCLPTVYKVLTSILRSKINSHIDKNLIMSPSQNGCRNGSRGTKELLLIDMTISQQVRRSRKDLSTCWIDYKKAYDSVPHTWLMRVLELYKIDTTLRTFLMSCMRQWSTVLRYPGCRHTQRNSEPVRIERGIFQGDSLSPLWFCLALNPLSTLLENSGLGYRLKRGGQVISHLLYMDDLKLFAPNNLQLMELLKVTETFSNAIRMEFGVDKCAVMHVKRGEVVESVGTQLTHSINLRSLSPTETYKYLGMSEALGINITDMKQSLRERFFGRLKKVFNSLLSGGNKVRAFNGWVMPVLMYSFGVLKWAQTELDALDRKVRTLLTAYRMHHPRSSVMRLYIPRKCGGRGFLNAKTLHNREVCSLREYFLAADVGMHRDVVAVDKGLAPLSLANENWRKPVVLDTNDRREVWQSKELHGRFFRALHGPDVDQLASVAWLRSGDLFGETEGFVCAIMDEVIMTNNYRRFIVKDGTVDICRACHRPGESIRHIISGCSRLANGEYLHRHNLVARIIHQQLALKYSLVESEVPYYRYEPDPVLYNGHITLYWDRSIITDRTIVANKPDIVVVDRSERRAMIVDISVPHDENLVKAEKDKQIKYIDLAREVVDMWDVDSAIIVPIVVSGNGLIAKSLDQHLRRLALGDWIKGLIQKAVLLDTARIVRRFLSLEP

SEQ ID NO: 10851 - protein, 1200 aa, Mythimna impura
MLTRAAARRTRLPPPASSLSSASPPPESSPTVSAVTPAVAVASSSSDEYFSPPTSPPPARRRRGRRPPSGLGPRGPPASDRVPAPGGSVQRMRWTQSINENVMRAYYGATEGGNNLTAYRVRMLSLFQVLEPAVNVSAQRLSDQVRVIQRNHMLDDTVLDRLRTEMSNHAIAPSSQPVVPVMVPPSYHLSDHADEEITDMVTHVSTQCNNELRSALECAIREYRNMPLELRPRLPRLPMHNKNKALVAALDLQLSNYFDDCEDLTDTHSIMYCAAVAACRVAHVKFPSCDVSTRPKPAVPAWQCRIERRIGGARALIGKLICFREGNTRPRVMRFVRRAFSGTDISPRDYMSRVTERIDFLKQKVYAWANRIRRYKRRVERYTQNRTFRSNERWVYRAWERPDQGVTDTRLPDDDAMSSFWRSIWSVPVSHTEGDWTREVERACDPIPQMGAIDISPQDVARAVRPLPNWKSPGPDGLHNFWIKWFTRSHARLAYQFQSALESGSLPQFLTTGITHLLHKSGSTAEPKNYRPITCLPTVYKVLTSILRSKINSHIDKNLIMSPSQNGCRNGSRGTKELLLIDMTISQQVRRFRKDLSTCWIDYKKAYDSVPHTWLMRVLELYKIDTTLRTFLMSCMRQWSTVLRYPGCRHIQRNSEPVRIERGIFQGDSLSPLWFCLALNPLSTLLENSGLGYRLKRGGQVISHLLYMDDLKLFAPNNLQLMELLKVTETFSSAIRMEFGVDKCAVMHVKRGEVVESVGTQLTDSINLRSLSPTETYKYLGMSEALGINITDMKQSLKERFFGRLKKVFNSLLSGGNKVRAFNGWVMPVLMYSFGVLKWTQTELDALDRRVRTLLTAYRMHHPRSSVMRLYIPRKCGGRGFLNAKTLHNREVCSLREYFLATDVGMHRDVVAVDKGLTPLSLANENWRKPVVLDTNDRREVWQSKELHGRFFRAFHGPDVDQLASVAWLRFGDLFGETEGFGCAIMDEVIMTNNYRRFIVKDGTVDICRACHRPGESIRHIISGCSRLANGEYLHRHNLVARIIHQQLALKYSLVESEVPYYRYEPDPVLDNGHITLYWDRSIITDRTIVANKPDIVVVDRSERRAMIVDISVPHDENLVKAEKDKQIKYIDLAREVVDMWDVDSAIIVPIVVSANGLIAKSLDQHLRRLALGGWIKALIQKAVLLDTARIVRRFLSLEP

SEQ ID NO: 10852 - protein, 1200 aa, Phlogophora meticulosa
MLTRSAARRARPPPLASSLSSASPPPESSPIVSTVTPAVAIASSSSDEYFSPPTSPPPARRRRGRRPPDSIGPRGPPASDRVPASGGSVQRMRWTQSINENVMRSYYGATEGGTNLTAYRGRMLSLFQMLEPAVNVSAQRLSDQVRVIQRNHMLDDVVLDRLRLNSRIYHVTPALPPVAVQLQSLPSVSPRPDYVGEEDDDAAISVSSQCNVRLRSALEDAFREYRSTPPELRSRLPRLPMHKKNKALMSALDSLLTKSFDNSKDLTDTHSILYCAAAAACRVANVKFPNTERATRPTVPAWQCRIQRRIDEARALIGKLICFREGNTRPRVMRFVRRAFSGTDISSRDYLTRVTERIDFLKQKICAWANRIRRYKRRVERYTQNRTFRSDERWVYRAWERSDQGVTDTCLPDDEAMCSFWRSIWSVPVSHTEGNWTREIERACEPLPEMGAINISPQDVASAVRPLPNWKSPGPDGLHNFWIKWLQSSHARLACQFQSALESGSLPKFLTTGITHLLHKSGSTAEPRNYRPITCLPTVYKVLTSILRSKINNHIDSNLIMSFSQNGCRNGSRGTKELLLIDTAISQQVRRSRKDLSTCWVDYKKAYDSVPHTWLMRVLELYKVDATLRTFLMSCMGQWRTVLRYPGCQQTRENSEPIRIERGIFQGDSLSPLWFCLALNPLSTLLEGSGLGYRLRTGGQVISHLLYMDDLKLFAPNNLQLMELLKVTETFSSAIRMDFGVDKCAVMHVKRGEIVESVGTQLSDSIYLRSLSSTETYKYLGMSEALGINATDMKQSLKERFFGRLNKVLNSLLSGGNKVRAFNGWVMPVLMYSFGILKWTQTELDALDRRVRTLLTANRMHHPRSSVMRLYIPRKCGGRGFLNAKTLHNREICSLREYFLKADVGMHRDVVAVDKTFTPLSLANKNWRKPIVLDTADRMEIWKSKELHGRFYRVLHGPDVDLVASISWLRFGDLFGETEGFVCAIMDEVIMTNNYRKYIVKDGTVDICRACHRPGESIRHIISGCSRLANGDYLHRHNLVARIIHQQLALKYNLVDLEVPYYKYVPDPVLENGSITLYWDRSIITDRTIVANKPDIVVIDRSERRTMIIDITVPHDENLMKAEKEKQMKYLDLAREVVDMWDVNTAVIVPIVVTANGIIAKSLDQHLKRLSLGSWIKGLIQKAVLLDTARIVRRFLSQEP

SEQ ID NO: 10853 - protein, 1203 aa, Phlogophora meticulosa
MLLDEMLTRSAARRARPPPPASSLSSASSPPKPSTIVSTVKPAVPVASSSSDEYFSPPTSPPPARRRRGRRPPDGLGPRGPPASDRVPAPGGSVQRMRWTQSINENVMRSYYGATEGGSNLTAYRVRMLSLFQVLEPAVNVSAQRLSDQVRVIQRNHMLDDVVLDRLRTEMQSSRVITSPSHTVVPPQYNIVLSSFADGEGSDKVTNVSTQYNEELRSALEGAIREYRFMLPALRPRLPRLPMHNKNRALVAALDSQLSNYFDNCDDLTDAHSILYCAAVAACRVAHVKFPYDIATRPKPAVPAWQCRIERRIAGARALIGKLVCYREGNTRPRVMRYVRRAFLGTDISPRDYMSRVTERIDFLKQKVYAWASRIRRYKRRVERYTQNRTFQSNERWVYRAWERPVQGVTDTHLPDDDVMCSFWRNIWSVPVSHTEGDWTREVERACDPIPQMGAITISPQDVARAVRPLPNWKSPGPDGLHNFWIKWLQKSHARLASQFQSALETGSLPQFLTTGITHLLHKSGSTAEPKNYRPITCLPTVYKVLTSILRVKINNHIDSNSIMSASQNGCRNGSRGTKELLLIDTAISQQVRRSRKDLSTCWIDYKKAYDSVPHTWLKRVLELYKVDATLRTFLTSCMGQWRTVLRYPGCRQIQRNSEPIRIERGIFQGDSLSPLWFCLALNPLSTLLEDSGLGYRLKRGGQVVSHLLYMDDLKLFAPSDLQLMELLTVTKTFSSAIRMEFGVDKCAVMHVKRGKIVESVGTQLPDFINFRALSPIETYKYLGMSEALGINAADMKQSLKERFFGRLKKVCNSLLSGGNKVRAFNGWVMPVLMYSFGILKWTQTELDALDRRVRTFLTASRMHHPRSSVMRLYIPRKCGGRGFLNAKTLHNREICSLRDYFLETDVGMHRDVVAVDQGLTPLSLAKENWRKPVVLDTNDRKEVWQSKELHGRFFQALHGPDVDQLASVSWLRFGDLFGETEGFVCAIMDEVIMTNNYRRFIVKDGTVDICRACHRPGESIRHIISGCSRLANEEYLHRHNLVARIIHQQLALKYSLVESEVPYYKYVPDPVLENGSVTLYWDRSIITDRTIVANKPDIVVMDRIERRATIIDVTVPHDGNLVKAEKDKQIKYLDLAREVVDMWDVDSAIVVPIVVSANGLIAKSLDQHLRRLALGSWIKGLIQKAVLLDTARIVRRFLSLEP

SEQ ID NO: 10854 - protein, 1109 aa, Phlogophora meticulosa
MRWTQSINENVVRSYYGATEGGTNLTAYRSRMLSLFQVLEPAVNVSAQRLSDQVRVIQRNHMLDDTVLDRLRLNSRSNRVMPASPLVAVQLPSLPIVSPRPDYVGEEDDDAAISVSSQCNVRLRSALEDAFREYRSTPPELRQRLPRLPMHKKNKALMCALDSLLSNSFDNSKDLADTHSILYCAAAAACRVANVKFPNSKKATRPAVPAWQCRIERRIGEARVLIGKLICFREGNTRPRVMRFVRRAFSGTDISSRDYLTRVTERIDFLKQKICAWANRIRRYKRRVERYTQNRTFRSDERWVYRAWERPDQGVIDTCLPDDEAMYSFWRSIWSVPVSHTEGDWTREVERACEPLPVMGTINISPQDVACAVCPLPNWKSPGPDGLHNFWIKWLKSSHARLATQFQSALESGSLPQFLTTGITHLLHKSGSTAEPKNYRPITCLPTVYKVLTSILRSKINNHIETSSIMSVSQNGCKNGSRGTKELLLIDMAISQQVRRSRKDLSTCWIDYKKAYDSVPHTWLMRVLELYKIDATLRTFLTSCMRQWRTVLHYPGCRQFRENSEPIRIERGIFQGDSLSPLWFCLALNPLSTQLEGSGLGYRLRRGTQVISHLLYMDDLKLFAPNNLQLMELLKVTETFSSAIRMHFGVDKCAVMHVKRGGIVESAGTQLSDSIYLRSLSSTETYKYLGMSEALGINAADMKQSLKERFFFRLNKVLNSLLSGGNKVRAFNGWVMPVLMYSFGILKWTQTELDALDRRVRTLLTANRMHHPRSSVMRLYISRKCGGRGFLNAKTLHNREVCSLRKYFIEADVGMHRDVVAVDKGLTPLSLANENWRKPIVLDTTDRMEIWKSKELHGRFYRVLHGPDVDLLASISWLRFGDLFGETEGFVCAIMDEVIMTNNYRKYIVKDGTVDICRACHRPGESIRHIISGCSRLANGEYLHRHNLVARIIHQQLALKYNLVELEVPYYKYVPDPVLENGNITLYWDRSIITDRTIVANKPDIVVIDRSERRTMIVDITVPHDENLVKAEKEKQMKYLDLAREVVDMWEVNTAVIVPIVVTANGIIAKSLDQHLRRLSLGSWIKGLIQKAVLLETARIVRRFLSQEP

SEQ ID NO: 10855 - protein, 1202 aa, Phlogophora meticulosa
MLTRSRARVLNAPKTSSGSSLSSASQLPGPAPDVSPVTPAAAVASSSSDEYYSPPTSPPPVRRCGRGRPPASLGLRGPPASARVPASGGSVQRMRWTQSINENVMRSYYGATEGGTNLTAYRSRMLSLFQVLEPAVNVSAQRLSDQVRVIQRNHMLDDTVLDRLRLNSRSNRVMPASPLVAVQLPSLPIVSPRPDYVGEEDDYAAISVSSQCNVRLRSALEDAFREYRSTPPELRQRLPRLPMHKKNKALMCALDSLLSNSFDNSKDLADTHSILYCAAAAACRVANVKFPNSKKATRPAVPAWQCRIERRIGEARVLIGKLICFREGNTRPRVMRFVRRAFSGTDISSRDYLTRVTERIDFLKQKICAWANRIRRYKRRVERYTQNRTFRSDERWVYRTWERPDQGVTDTFLPDDEAMCLFWRSIWSVPVSHTEGDWTREVERTCEPLPEMGAINISPQDVACAVRPLPNWKSPGPDGLHNFWIKWLKSSHARLASQFQSALESGSLPQFLTTGITHLLHKSGSTAEPKNYRPITCLPTVYKVLTSILRSKINNHIDSTSIMSVSQNGCKNGSRGTKELLLIDMAISQQVRRSRKDLSTCWIDYKKAYDSVPHTWLMRVLELYKIDATLRTFLKSCMGQWRTVLHYPGCQQFQENSEPIRIERGIFQGDSLSPLWFCLALNPLSTLLEGSGLGYRLRRGGQVISHLLYMDDLKLFAHNNLQLMKLLKVTETFSSAIRINFGVDKCAVMHVKRGGIVESAGTQLSDSIYLRSLSSTETYKYLGMSEALGINTADMKQSLKERFFGRLNKVLNSLLSGGNKVRAFNGWVMPVLMYSFGILKWTQTELDALDRRVRTLLTANRMHHPRSSVMRLYISRKCGGRGFLNAKTLHNREVCSLREYFLETDVGMHRDVVAMDKALTPLSLANENWRKPIVLDTTDRMEIWKSKELHGRFYRVLHGPDVDLSASVSWLRFGDLFGETEGFVCAIMDEVIMTNNYRKYIVKDGTVDICRACHRSGESIRHIISGCSRLANGDYLHRHNLVAKIIHQQLALKYNLVESEVPYYKYVPDPVLENGNITLYWDRSIITDRTIVANKPDIVVIDRLERRTMIVDITVPHDENLVKAEKEKQIKYLDLAREVVDMWDVNTAVIVPIVVTANGIIAKSLDQHLRRLSLGSWIKGLIQKAVLLDTARIVRRFLSQEP

SEQ ID NO: 10856 - protein, 1198 aa, Xestia xanthographa
MLTRSAAARRARLPPPDSSLSSASPPPEPSPIVSAVTPAVAVASSSSDEYFSPPTTPPPARRRGGRRPPDGLGPRGPPASDRVPAPGGSVQRMRWTQSINANVMRAYYGATEGGNNLTAYRVRMLSLFQVLEPAVNVSAQRLSDQVRVIQRNRMLDDTVLDRLRTEIQSNHVIATPSQAVVPPQSSIIPNCDNDVSNDMVTNVSTQCNVEMRSALEGAIREYRFMQPDLRPRIPRLPMHNKNRALVAVLDSQLSNYFDNCEDLTDVHSILYCAAVATCRVAHVKFPSDRATRPKPAVPAWQYRIERRIGGARALIGKLVCFREGNTRPRVMRFVRQAFSGTDISPRDYMSRVTERIDFLKQKVYAWANRIRRYKRRVDRYTQNRTFQKDEKWVYRAWERPDQGVADTRLPDDDAMCSFWRSIWSVPVSHAEGEWTRVIERACDPISEMGAITISPQDVARAVRPLPNWKSPGPDGLHNFWIKWFTRSHARLATLFQSALESGSLPEFLTTGITHLLHKSGSTAEPKNYRPITCLPTVYKVLTSILRTKISKHIDDNSVMSASQNGCRNGSRGTKELLLIDMAISHQVRRSRKDLSTCWIDYKKAYDSVPHTWLMRVLQLYKVDATLRTFLMSCMGQWRTVLHYPGCRQIQRNSEPIRIERGIFQGDSLSPLWFCLALNPLSTLLEDSGLGYRLRKDGQVISHLLYMDDLKLFAPNDLRLMELLKVTETFSNAIRMEFGVDKCAVMHVKRGEIVESVGTQLSDSITLRSLSATETYKYLGMSEALGVNVADMKQSLKERFFGRLKKVLNSLLSGGNKVRAFNGWVMPVLMYSFGILKWTQTELDALDTKVRKLLTAYRMHHPRSSVMRLYIPRKCGGRGFLNAKTLHNREICSLREYFLGTDVGMHRDVVTMDKGLTPLSLAKENWRKPPVLDTNDRREVWQSKELHGRFFRALHGPDVDLSASVAWLRSGDLFGETEGFVCAIMDEVMMTNNYRRFIVKDGTVDICRACHRPGESIRHIISGCSRLANGEYLHRHNLVARIIHQQLALKYNLVESEVPYYRYVPDPVLDNGCITLYWDQSIITDRTIVANKPDIVVVDRSERRAMIVDITVPHDENLVKAEKDKQIKYLDLAREVVDMWEVDSAIIVPIVVSAHGLIAKSLDQYLRRLSLGSWIKGLIQKAVLLDTARIVRRFLSLEP

SEQ ID NO: 10857 - protein, 1197 aa, Xestia xanthographa
MLTRSAAARRARLPPPDSSLSSASPPPEPSPIVSAVTPAVAVASSSSDEYFSPPTTPPPARRRGGRRPPDGLGPRGPPASDRVPAPGGSVQRMRWTQSINANVMRAYYGATEGGNNLTAYRVRMLSLFQVLEPAVNVSARLSDQVRVIQRNRMLDDTVLDRLRTEIQSNHVIATPSQAVVPPQSSIIPNCDNDVSNDMVTNVSTQCNVEMRSALEGAIREYRFMQPDLRPRIPRLPMHNKNRALVAVLDSQLSNYFDNCEDLTDVHSILYCAAVATCRVAHVKFPSDRATRPKPAVPAWQYRIERRIGGARALIGKLVCFREGNTRPRVMRFVRQAFSGTDISPRDYMSRVTERIDFLKQKVYAWANRIRRYKRRVDRYTQNRTFQKDERWVYRAWERPDQGVADTHLPDDDAMCSFWRSIWSVPVSHAEGEWTRVIERACDPISEMGAITISPQDVARAVRPLPNWKSPGPDGLHNFWIKWFTRSHARLATLFQSALESGSLPEFLTTGITHLLHKSGSTAEPKNYRPITCLPTVYKVLTSILRTKISKHIDDNSVMSASQNGCRNGSRGTKELLLIDMAISHQVRRSRKDLSTCWIDYKKAYDSVPHTWLMRVLQLYKVDATLRTFLMSCMGQWRTVLHYPGCRQIQRNSEPIRIERGIFQGDSLSPLWFCLALNPLSTLLEDSGLGYRLRKDGQVISHLLYMDDLKLFAPNDLRLMELLKVTETFSNAIRMEFGVDKCAVMHVKRGEIVESVGTQLSDSITLRSLSATETYKYLGMSEALGVNVADMKQSSKERFFGRLKKVLNSLLSGGNKVRAFNGWVMPVLMYSFGILKWTQTELDALDTKVRKLLTAYRMHHPRSSVMRLYIPRKCGGRGFLNAKTLHNREICSLREYFLGTDVGMHRDVVTMDKGLTPLSLAKENWRKPPVLDTNDRREVWQSKELHGRFFRALHGPDVDLSASVAWLRSGDLFGETEGFVCAIMDEVMMTNNYRRFIVKDGTVDICRACHRPGESIRHIISGCSRLANGEYLHRHNLVARIIHQQLALKYNLVESEVPYYRYVPDPVLDNGCITLYWDQSIITDRTIVANKPDIVVVDRSERRAMIVDITVPHDENLVKAEKDKQIKYLDLAREVVDMWEVDSAIIVPIVVSAHGLIAKSLDQYLRRLSLGSWIKGLIQKAVLLDTARIVRRFLSLEP

SEQ ID NO: 10858 - protein, 1198 aa, Xestia xanthographa
MLTRSAAARRARLPPPDSSLSSASPPPEPSPIVSAVTPAVAVASSSSDEYFSPPTTPPPARRRGGRRPPDGLGPRGPPASDRVPAPGGSVQRMRWTQSINENVMRAYYGATEGGNNLTAYRVRMLSLFQVLEPAVNVSAQRLSDQVRVIQRNRMLDDTVLDRLRTEIQSSHVIATPSQAVVPPQSSIIPNCDNDVGNDMVTNVSTQCNVEMRSALEGAIREYRFMQPDLRPRIPRLPMHNKNRALVAVLDSQLSNYFDNCEDLTDVHSILYCAAVAACRVAHVKFPSDRATRPKPAVPAWQYRIERRIGGARALIGKLVCFREGNTRPRVMRFVRQAFSGTDISPRDYMSRVTERIDFLKQKVYAWANRIRRYKRRVDRYTQNRTFQKDERWVYRAWERPDQGVADTHLPDDDAMCSFWRSIWSVPVSHAEGEWTRVIERACDPVSEMGAITISPQDVARAVRPLPNWKSPGPDGLHNFWIKWFTRSHARLATLFQSALESGSLPEFLTTGITHLLHKSGSTAEPKNYRPITCLPTVYKVLTSILRTKISKHIDDNSVMSASQNGCRNGSRGTKELLLIDMAISHQVRRSRKDLSTCWIDYKKAYDSVPHTWLMRVLELYKVDATLRTFLMSCMGQWRTVLRYPGCRQIQRNSEPIRIERGIFQGDSLSPLWFCLALNPLSTLLEDSGLGYRLRKDGQVISHLLYMDDLKLFAPNDLQLMELLKVTDTFSSAIRMEFGVDKCAVMHVKRGEIVESVGTQLSDSITLRSLSATETYKYLGMSEALGVNVADMKQSLKERFFGRLKKVFNSLLSGGNKVRAFNGWVMPVLMYSFGILKWTQTELDALDTKVRKLLTAYRMHHPRSSVMRLYIPRKCGGRGFLNAKTLHNREICSLREYFLETDVGMHRDVVTVDKGLTPLSLAKENWRKPPVLDTNDRREVWQSKELHGRFFRALHGPDVDLPASVAWLRSGDLFGETEGFVCAIMDEVMMTNNYRRFIVKDGTVDICRACHRPGETIRHIISGCSRLANGEYLHRHNLVARIIHQQLALKYNLVESEVPYYRYVPDPVLNNGCITLYWDQSIITDRTIVANKPDIVVVDRSERRAMIVDITVPHDENLVKAEKDKQIKYLDLAREVVDMWEVDSAIIVPIVVSAHGLIAKSLDQYLRRLSLGSWIKGLIQKAVLLDTARIVRRFLSLEP

SEQ ID NO: 10859 - protein, 1199 aa, Cosmia trapezina
MKMLTRSATRRARLPPPDSSLSSASPPPVPSLTVNAVSTPAAVVASSSSDEYFSPPTTPPPARRRGGRRPPDCLGPRGPPASDRVPAPGGSVQRMRWTRAINENVMRSYYGATEGGNNLTAYRVRMHSLFQVLEPALNVSAQRLSDQVRVIQRNHMLDDTVLDRLRSEMQSSRVIAPLSQTIVAPQCSTSQADEGSDGTAANVSTQCNEELRSALEGAIQEYRFVSPELRPRLPRLPMHNKNRALVAALDSQLSNYFDDCEDLTDTHSILYCAAVAACRVAHVKFANDSRATRPKPAVPAWQCRIERRIGGARALIGKLICFREGNTRPRVMRFVRRVFSGTDVSPQDYMSRVTERIDFLRQKVYAWANRIRRYKRRVDRYTQNRTFQSDERWVYRGWERPDQGVADTRLPDDDAMCSFWRSIWSVPVSHTEGDWTREVERACDPIPEMGAITICPQDVARAVRPLPNWKSPGPDGLHNFWIKWFRGSHARLAAQYQSALQSGSLPQFLTTGITHLLHKSGSTAEPKNYRPITCLPTVYKVLTSILRAKINEHIDTNSIMSASQNGSRNGSRGTKELLLIDMAISQQVRRSRKDLSTCWIDYKKAYDSVPHTWLMRVLELYKVDATLRTFLMSCMEQWRTVLRYPGCRNIQRNSEPIRIERGIFQGDSLSPLWFCLALNPLSTLLEDSGLGYRLRRGGQVISHLLYMDDLKLFAPNNLQLMELLKVTETFSSAIRMEFGVDKCAVMHVKRGEIVESVGTQLSDSINFRTLSASETYKYLGMSEALGINVADMKQSLKERFFGRLKKVFNSLLSGGNKVRAFNGWVMPVLMYSFGILKWTQTELDALDRRVRTLLTAYRMHHPRSSVMRLYIPRKCGGRGFLNAKTLHNREICSLREYFLEADVGMHRDVVAVDKGLTPLSLAKENWRKPVVLDTNDRMEVWQSKELHGRFFRALHGPDVDLLASVAWQRSGDLFGETEGFVCAIMDEVIMTNNYRRFIVKDGTVDICRACHRPGESIRHIISGCSRLANEEYLHRHNLVARIIHQQLALKYSLVESEVPYYRYVPDPVLENGNITLYWDRSIITDRTIVANKPDIVVVDRTERRAMVIDITVPHDGNLVKAEKDKQIKYLDLAREVVDMWDVDSAIIVPIVVSANGLIAKSLDQHLRRLSLGSWIKGLIQKAVLLDTARIVRRFLSLEP

SEQ ID NO: 10860 - protein, 1200 aa, Cosmia trapezina
MLTRSATRKARLPPPDSSLSSASPPPVPSLTVSAVSTPAAVVASSSSDEYFSPPTTPPPARRRGGRRPPDGLGPRGPPASDRVPAPGGSVQRMRWTRAINENVMRSYYGATEGGNNLTAYRVRMHSLFQVLEPALNVSAQRLSDQVRVIQRNHMLDDTVLDRLRNEMQSSRVIAPLSQTIVAPPPPQCNTTQADEGSDGTAANVSTQCNEELRSALEGAIQEYRFVSPELRPRLPRLPMHNKNRALVAALDSQLSNYFDDCEDLTDTHSILYCAAVAACRVAHVKFANDSRATRPKPAVPAWQCRIERRIGGARALIGKLICFREGNTRPRVMRFVKRAFSGTDVSPQDYMSRVTERIDFLRQKVYAWANRIRRYKRRVDRYTQNRTFQSDERWVYRGWERPDQGVTDTRLPDDDAMCSFWRSIWSVPVSHTEGDWAREVRRACDPIPEMGAITICPQDVARAVRPLPNWKSPGPDGLHNFWIKWFLGSHARLAAQYQSALQSGSLPQFLTTGITHLLHKSGSTTEPKNYRPITCLPTVYKVLTSILRAKINEHIDTNSIMSASQNGSRNGSRGTKELLLIDMAISQQVRRSRRDLSTCWIDYKKAYDSVPHTWLMRVLELYKVDATLRTFLMSCMGQWRTVLRYPGCRNIQRNSEPIRIERGIFQGDSLSPLWFCLALNPLSTLLENSGLGYRLRRGGQVISHLLYMDDLKLFAPSNLQLMELLKVTETFSSAIRMEFGVDKCAVMHVKRGEIVESVGTQLPDSINLRTLSAAETYKYLGMSEALGINVADMKQSLKERFFGRLKKVFNSLLSGGNKVRAFNGWVMPVLMYSFGILKWTQTELDALDRRVRTLLTAYRMHHPRSSVMRLYIPRKCGGRGFLNAKTLHNREICSLREYFLETDVGMHRDVVAVDKGLTPLSLAKENWRKPVVLDANDRMEVWQSKELHGRFFRALHGPDVNLLASVAWLRSGDLFGETEGFVCAIMDEVIMTNNYRRFIVKDGTVDICRACHRPGESIRHIISGCSRLANEEYLHRHNLVARIIHQQLALKYSLVESEVPYYRYVPDPVLENGHITLYWDRSIITDRTIVANKPDIVVVDRTERRAMIVDITVPHDGNLVKAEKDKQIKYIDLAREVVDMWDVDSAVIVPIVVSANGLIAKSLDQHLRRLSLGSWIKGLIQKAVLLDTARIVRRFLSLEP

SEQ ID NO: 10861 - protein, 1204 aa, Cosmia trapezina
MMQTRAKTRIQAHPPSPDSSLSSASQPVRASTVSAVSPVAAVASSSSDEFFSPLSSPTPPRRRGRGRPPAGLGPRGQPAPNRVPAAGGNVSRMRWTQSINENVMRAYYGATEGGINLTAYRGRMLSLFQVLEPAVNVSAQRLSDQVRVIQHNHRLDNATLDRLRSEMQSSSASNPPPSQNVMHVPAEIPLRANQRDEEENARAISADNLCNVEIRSALEDAIREYRFTSPDLRPRLPRLPMNKKNRALVCALDALLPNFIESSADLCDTHSILYCTAVAACRVACVKFPNTDRATRPKPAAPAWQCRIERRINEARVLIGKLICFREGNTRPRVMRFVRRAFSGTNVSPQEYVSRVTERIDFLKQKVYAWANRIRRYRRRVDRYSQNRMFQSDERWVYRAWERPIPTQGVTDVRPPDNETMSAFWRSIWSVPVSHTEGDWMRIVEQACDSIPNMDAVTISPLDVACAVRPLPNWKSPGPDGLHNFWIKWLQRSHACLASQFQSSLETGSLPLLFTTGVTHLLHKSGSTAEPKNYRPITCLPTVYKVLTSILRAKIAHHIYNNSIMSVSQNGCRNGSRGTKELLLIDMTISQQVRRSRKDLSTCWIDYKKAYDSVPHTWLIRVLELYKIDATLRTFLMSCMGQWKTVLLYPGCRRIPGIDEPIRIERGIFQGDSLSPLWFCLALNPLSTMLEDSGLGYRLRRGGQVISHLLYMDDLKLFAPNNLRLMELLKVTENFSSAIRMEFGVDKCAVMHVKRGEIMESVGTQLSDSIHLRSLSSTETYKYLGMSEALGINVADMKQSLKERFFGRLKKVFNSLLSGGNKVRAFNGWVMPVLMYSFGVLKWTQTELDALDRRVRTLLTAYRMHHPRSSVMRLYIPRKCGGRGFLNAKTLHNREICSLREYFLEADVGMHRDVVAVDKGLTPLSLAKENWRKPAVLDTNDRREVWQGKELHGRFFRALHGPDVDFLASVSWLRFGDLFGETEGFVCAIMDEVIMTNNYRKYIVKDGTVDICRACHHPGESIRHIVSGCSRLANGEYLHRHNLVARIIHQQLALQYNLVESEVPYYRYVPDPVLENGQATLYWDRSIITDRTIVANKPDIVVIDRRERRAIIVDIAVPHDENLVKAEKDKKIKYLDLAHEVVDMWDVDSAIIVPIIVTVNGLIAQSLDQHLRRLSLRGWIKGLIQKAVLLDTARIVRRFLSLEP

SEQ ID NO: 10862 - protein, 1200 aa, Mamestra brassicae
MLTRSRARAQTAQPTSSGSSLSSASQPPGPAPAVSPEIPVAAVASSSSDEYFSPPTTPPPARRRGRGRPPTSLGPRGPPASDRVPAIGGSVQRMRWTQTINENVMRSYYGATEGGTNLTAYRGRMLSLFQVLEPAVNVSAQRLSDQVRVILRNRMLDDAVLDRLRLESRSGRISPASPPAAVQIQSSISPRSNNVDEDDDDGAISVSTQCNERLRSALEDAFREYRSTPPELRPRLPRLPMHNKNRALVCALDSQLTNCFDSSEDLADTHSILYCAAAAACRVAHVKFLNSDRATRPAVPAWQCRIERRIGEARALIGKLICFREGNTRRRVMRFVRRAFSGTDTSPRDYLTRVTERIDFLKQKIYAWANRIRRYKRRVERYTQNRTFQSNERWVYRAWERPDQGVTDTRLPDDDVMCSFWRNIWSVPVSHTEGDWIREVERACDPILEMGATTISPQDVARAVRPLPNWKSPGPDGLHNFWIKWFTGSHARLASQFQSALESGSLPQFLTTGITHLLHKSGSTAEPKNYRPITCLPTVYKVLTSILRAKINHHIESNSIMSASQNGCRNGSRGTKELLLMDIAISQQVRRSRKDLSTCWIDYKKAYDSVPHTWLMRVLELYKVDAVLRTFLMSCMGQWRTVLRYPGCRQIQVNGDPIRIERGIFQGDSLSPLWFCLALNPLSTLLEGSGQGYRLRRGGQVISHLLYMDDLKLFAPNNLQLMELLKVTETFSSAISMEFGVDKCAVMHVKRGEIMESVGTQLSDSIHLRSLSSTETYKYLGMSEALGINANDMKQSLKERFFGRLNKVLNSLLSGGNKVRAFNGWVMPVLMYSFGILKWTQTELDALDRRVRSLLTANRMHHPRSSVMRLYIPRKCGGRGFLNAKTLHNREICSLREFFLEADVGMHRDVVAVDKGLTALSLANENWRKPVVLDTNDRREVWQSKELHGRFYRVLHGPDVDFLASVAWLRFGDLFGETEGFVCAIMDEVMMTNNYRKYIVKDGTVDICRACHRPGESIRHIISGCSSLANGDYLHRHNLVARIIHQQLALKYNLVESEVPYYRYVPDPVLENGNCTLYWDRSIITDRTIVANKPDIVVIDRLERRAMIVDIAVPHDENLVKTEKDKQTKYLDLAREVVDMWDVNTAVIVPIVVTANGIIAKSLDQHLKRLSLGSWIKGLIQKAVLLDTARIVRRFLSQGP

SEQ ID NO: 10863 - protein, 1198 aa, Mamestra brassicae
MLTRAAAQRARLPPPASSLSSASPPPEPSPTVSAVIPAVAVASSSSDEYFSPPTSPPPARRRRGRRPPDGLGPRGPPASDRVPAPGGSVQRMRWTQTINENVMRSYYGATEGGTNLTAYRGRMLSLFQVLEPAVNVSAQRLSDQVRVIQRNRMLDDAVLDRLRLESRNGRVSAASPPAAVQIQFSVSPRPNIVGEDDDDGAISVSTQCNERLRSALEDAFREYRSTLPELRPRLPRLPMHNKNRALVCALDSQLANCFDSSEDLADTHSILYCAAAAACRVAHVKFPNSDRATRPAVPAWQCRIERRIGEARALIGKLICFREGNTRRRVMRFVRRAFSGTDTSPRDYLTRVTERIDFLKQKIYAWANRIRRYKRRVERYTQNRTFQSNERWVYRAWERPDQGVTDTRLPDDDVMCSFWRNIWSVPVSHTEGDWTREVERACDPIPEMGAITISPQDVARAVRPLPNWKSPGPDGLHNFWIKWFKKLHARLASQFQSALESGSLPQFLTTGITHLLHKSGSTAEPKNYRPITCLPTVYKVLTSILRAKINQHIETNSIMSASQNGCRNRSRGTKELLLIDVAISQQVRRSRRDLSTCWIDYKKAYDSVPHTWLMRVLELYKVDAVLRTFLMSCMGQWRTVLRYPGCRQIQANSDPIRIERGIFQGDSLSPLWFCLALNPLSTLLEGSGQGYRLRRGGQVISHLLYMDDLKLFAPNNLQLMKLLKVTETFSSAISMEFGVDKCAVMHVKRGEIMESVGTQLSDSIHLRSLSSTETYKYLGMSEALGINANDVKQSLKERFFGRLNKVLNSLLSGGNKVRAFNGWVMPVLMYSFGILKWTQTELDALDRRVRSLLTANRMHHPRSSVMRLYIPRKCGGRGFLNAKTLHNREICSLREFFLEADVGMHRDVVAVDKGLTALSLANENWRKPVVLDTNDRREVWQSKELHGRFYRVLHGPDVDFLASVAWLRFGDLFGETEGFVCAIMDEVMMTNNYRKYIMKDGTVDICRACHRPGESIRHIISGCSSLANGDYLHRHNLVARIIHQQLALKYNLVESEVPYYRYVPDPVLENGNCTLYWDRSIITDRTIIANKPDIVVIDRLERRAMIVDIAVPHDVNLVKTEKDKQTKYLDLAREVVDMWDVNTAVIVPIVVTANGIIAKSLDQHLKRLSLGSWIKGLIQKAVLLDTARIVRRFLSQGP

SEQ ID NO: 10864 - protein, 1044 aa, Mamestra brassicae
MTPYLIDCVWNHGMAASQLLHHRPRYIIQSSVSPRPNIVGEDDDDGAISVSTQCNERLRSALEDAFREYRSTPPELRPRLPRLPMHNKNRALVCALDSQLANCFDSSEDLADTHSILYCAAAAACRVAHVKFPNSDRATRPAVPAWQCRIERRIGEARALIGKLICFREGNTRRRVMRFVRRAFSGTDTSPRDYLTRVTERIDFQKQKIYAWANRIRRYKRRVERYTQNRTFQSNERWVYRAWERPDQGVTDTRLPDDDVMCSFWRNIWSVPVSHTEGDWTREVERACDPIPEMGAITISPQDVARAVRPLPNWKSPGPDGLHNFWIKWFKRSHARLASQFQSALESGSLPQFLTTGITHLLHKSGSTAEPKNYRPITCLPTVYKVLTSILRAKINQHIETNSIMSASQNGCRNRSRGTKELLLIDVAISQQVRRSRRDLSTCWIDYKKAYDSVPHTWLMRVLELYKVDAVLRTFLMSCMGQWRTVLRYPGCRQIQANSDPIRIERGIFQGDSLSPLWFCLALNPLSTLLEGSGQGYRLRRGGQVISHLLYMDDLKLFAPNNLQLMKLLKVTETFSSAISMEFGVDKCAVMHVKRGEIMESVGTQLSDSIHLRSLSSTETYKYLGMSEALGINAADMKQSLKERFFGRLNKVLNSLLSGGNKVRAFNGWVMPVLMYSFGILKWTQTELDALDRRVRSLLTANRMHHPRSSVMRLYIPRKCGGRGFLNAKTLHNREICNLREFFLEADVGMHRDVVAVDKGLTALSLANENWRKPVVLDTNDRREVWQSKELHGRFYRVLHGPDVDFLASVAWLRFGDLFGETEGFVCAIMDEVMMTNNYRKYIVKDGTVDICRACHRPGESIRHIISGCSSLANGDYLHRHNLVARIIHQQLALKYNLVESEVPYYRYVPDPVLENGNCTLYWDRSIITDRTIIANKPDIVVIDRLERRAMIVDIAVPHDVNLVKTEKDKQTKYLDLAREVVDMWDVNTAVIVPIVVTANGIIAKSLDQHLKRLSLGSWIKGLIQKAVLLDTARIVRRFLSQGP

SEQ ID NO: 10865 - protein, 1198 aa, Mamestra brassicae
MLTRAAAQRARLPPPASSLSSASPPPEPSPTVSAVIPAVAVASSSSDKYFSPPTSPPPARRRRGRRPPDGLGPRGPPASDRVPAPGGSVQRMRWTQTINENVMRSYYGATEGGTNLTAYRGRMLSLFQVLEPAVNVSAQRLSDQVRVIQRNRMLDDAVLDRLRLESRNGRVSAASPPAAVQIQFSVSPRPNIVGEDDDDGAISVSTQCNERLRSALEDAFREYRSTPPELRPRLPRLPRHNKNRALVCALDSQLANCFDSSEDLADTHSILYCAAAAACRVAHVKFPNSDRATRPAVPAWQCRIERRIGEARALIGKLICFREGNTRRRVMRFVRRAFSGTDTSPRDYLTRVTERIDFLKQIIYAWANRIRRYKRRVERYTQNRTFQSNERWVYRAWERPDQGVTDTRLPDDDVMCSFWRNIWSVPVSHTEGDWTREVERACDPIPEMGAITISPQDVARAVRPLPNWKSPGPDGLHNFWIKWFKRSHARLASQFQSALESGSLPQFLTTGITHLLHKSGSTAEPKNYRPITCLPTVYKVLTSILRAKINQHIETNSIMSASQNGCRNRSRGTKELLLIDVAISQQVRRSRRDLSTCWIDYKKAYDSVPHTWLMRVLELYKVDAVLRTFLMSCMGQWRTVLRYPGCRQIQANSDPIRIERGIFQGDSLSPLWFCLALNPLSTLLEGSGQGYRLRRGGQVISHLLYMDDLKLFAPNNLQLMKLLKVIETFSSAISMEFGVDKCAVMHVKRGEIMESVGTQLSDSIHLRSLSSTETYKYLGMSEALGINANDVKQSLKERFFGRLNKVLNSLLSGGNKVRSFNGWVMPVLMYSFGILKWTQTELDALDRRVRSLLTANRMHHPRSSVMRLYIPRKCGGRGFLNAKTLHNREICSLREFFLEADVGMHRDVVAVDKGLTALSLANENWRKPVVLDTNDRREVWQSKELHGRFYRVLHGPDVDFLASVAWLRFGDLFGETEGFVCAIMDEVMMTNNYRKYIVKDGTVDICRACHRPGESIRHIISGCSSLANGDYLHRHNLVARIIHQQLALKYNLVESEVPYYRYVPDPVLENGNCTLYWDRSIITDRTIIANKPDIVVIDRLERRAMIVDIAVPHDVNLVKTEKDKQTKYLDLAREVVDMWDVNTAVIVPIVVTANGIIAKSLDQHLKRLSLGSWIKGLIQKAVLLDTARIVRRFLSQGP

SEQ ID NO: 10866 - protein, 1198 aa, Noctua fimbriata
MLTRSAARRARLSPPDPSLSSASPPPESSPVVSAVTPAVAVASSSSDEYFSPPTTPPPVRRRGGRRPPDGLGPRGPPASDRVPAPGGSVQRMRWTQSINANVMRAYYGATEGGNNLTAYRVRMLSLFQVLEPAVNVSAQRLSDQVRVIQRNRMLDDTVLDRLRTEMQSSHVIATPPPQAVVPPQSTIIPNRDNDVSNDIVTNVSTQCNEEMRSALEGAIREYRFMQPDLRPRIPRLPMHNKNRALVAVLDSQLSNYFDNCEDLTDAHSILYCAAVAACRVAHVKFSDDRATRPKPAVPPWQYRIERRIGGARALIGKLICFREGNTRPRVMRFVRRAFSGTDISPRDYMSRITERIDFLKQKVYAWANRIRRYKRRVDRYTQNRTFQRDERWVYRAWERPDQGVADTRLPDDDAMCSFWRSIWSVPVSHTEGEWTQGVERACDLVPEMGAITISPQDVVRAVRPLPNWKSPGPDGLHNFWIKWFTRSHARLAILFQSALESGSLPEFLTTGITHLLHKSGSTAEPKNYRPITCLPTVYKVLTSILRAKINKHIDDNSIMSASQNGCRNGSRGTKELLLIDMAISQQVRRSRSDLSTCWIDYKKAYDSVPHTWLMRVLELYKVDATLRTFLMSCMGQWRTVLRYPGCRQIQRNSEPIRIERGIFQGDSLSPLWFCLALNPLSTLLEDSGLGYRLRRGGQVISHLLYMDDLKLFAPNDLQLMELLKVTETFSSAIRMEFGVDKCAVMHVKRGEIVESVGTQLSDSINLRSLSATETYKYLGMSEALGINVADMKQSLKERFFGRLKKVFNSLLSGGNKVRAFNGWVMPVLMYSFGILKWTQTELDALDRRVRTLLTAYRMHHPRSSVMRLYIPRKCGGRGFLNAKTLHNREICSLREYFLETDVGMHRDVVAVDKGLTPLSLAKENWRKPLVPDTNDRMEVWQSKELHGRFFRALHGPDVDLSASVAWLRCGDLFGETEGFVCAIMDEVMMTNNYRRFIVKDGTVDICRACHRPGESIRHIISGCSRLANGEYLHRHNLVARIIHQQLALKYNLVESEVPYYKYVPDPVLENGSITLYWDQSIITDRTIVANKPDIVVVDRSERRTMIVDITVPHDENLVKAEKDKKIKYLDLAREVVDMWDVDSAIIVPIVVSAHGLIAKSLDQYLRRLSLGSWIKGLIQKAVLLDTARIVRRFLSLEP

SEQ ID NO: 10867 - protein, 1198 aa, Atethmia centrago
MLTRSAAVRARLPPPDSSLSSASPPPVPSPTVCAVTTPTAAVASSSSDEYFPPPTTPPPVRRRGGRRPPDGLGSRGPPASDRVPAPGGSVKRMRWTQSVNENVMRSYYGATEGGNNLTAYRVRMLSLFQVLEPAVNVSAQRLSDQVRVIQRNHMLDDTVLDRLRSEMQRSHVIVPPSQTVVHSPQLSTNQADEGSDDRATNVSTQCNVELRSALEDAIREYRLMSPELRPRLPRLPMHKKNRALVAALDSQLSNYFDDCEDLTDTHSILYCTAVAVCRVAHVKFAKDSRTTRPKPTVPAWQCRIESRIGGARALIGKLICFREGNTRPRVMRFVRRAFSGTDIGPQDYMTRVTERIDFLKQKVYAWAHRIRRYKRRVERYTQNRTFQSDERWVYRGWERPDQDVTDTRLPDDDVMCSFWRSIWSVPVSHTEGDWARKVERACDPIPEMGAITICPQDVARAVRPLPNWKSPGPDGLHNFWLKWFLRSHARLAAQYQTALESGSLPQFLTTGVTHLLHKSGSTAEPKNYRPITCLPTVYKLLTSILRAKINKHIDTNSIMSASQNGCRNGSRGTKELLLIDMTISQQFRRSRKDLSTCWIDYKKAYDSVPHTWLMRVLELYKVDATLRTFLISCMGQWRTVLRYPGCRNIQRNSEPIRIERGIFQGDSLSPLWFCLALNPLSTLLEDSGLGYRMRRGGQVISHLLYMDDLKLFASNNLQLMELLKITESFSSAIRMEFGVDKCAVMHVKRGKIVESVGTQLSDSINLRTLSASETYKYLGMSEALGINVTDMKQSLKERFFGRLKKVFNSLLSGGNKVRAFNGWVMPVLMYSFGILKWTQTELDALDRRVRTLLTAYRMHHPRSSVMRLYIPRKCGGRGFLNAKTLHNREVCSLREYFLEADVGMHRDLVAVDKGLTPLSLAKENWRKLVVLDTNDRREVWQSKELHGRFFRALHEPDVDFQASVAWLRFGDLFGETEGFVCAIMDEVIMTKNYRRFIVKDGTVDVCRACHRPGESIRHIISGCSRLANEEYLHRHNLVARIIHQQLALKYSLVESEVPYYRYVPDPVLDNGNITLYWDRSIITDRTIVANKPDIVVVDRTERRAMIVDITVSHDGNLVKAEKDKQIKYLDLAREVVDMWDVDSAIIVPIVVSANGLIAKSLDQHLKRLTLDGWIKGLIQKAVLLDTARIVRRFLSLEP

SEQ ID NO: 10868 - protein, 1106 aa, Atethmia centrago
MRWTRSINENVMRSYYGATEGGNNLTAYRVRMLSLFQVLEPAVNVSAQRLSDQVRVIQRNHMLDDTVLERLRSEIQSSHVIASPSQTVVVLPQLDTHQADEGSDDRATNVSTQCNVELRSALEDAIREYRFMSPEVRPRLPRLPMHKKNRALVAVLDSQLSNYFDDCEDLSDTHSILYCAAVAVCRVAHVIFPNDSRATRPKPTVPIWQCRIERRIGGARALIGKLICFREGNTRPRVMRFVRRAFSGTDISPQDYMSRVTERIDFLKQKVYAWANRIRRYKRRVDRYTQNRTFQSDERWVYRGWEQRDQGVTDTRLPDDDVMCSFWRSIWSVPVSHTEGDWARKVERACDPLPEMGAITICPQDVARAVRPLPNWKSPGPDGLHNFWLKWFLGSHARLAAQYQTALESGSLPQFLTIGVTHLLHKSGSTAEPKNYRPITCLPTVYKVLTSILRAKINKHIDTNSIMSASQNGCRNGSRGTKELLLIDMTISQQVRRFRKDLSTCWIDYKKAYDSVPHTWLMRVLELYKVDATLRTFLMSCVGQWRTVLRYPGCRNIQRNSEPIRIERGIFQGDSLSPLWFCLALNPLSTLLEDSGLGYRLRRGGQVISHLLYMDDLKLFASNNLQLMELLKITETFSSAIRMEFGVDKCADMHVKRGEIVESVGTQLSDSINLRALSASETYKYLGMSEALGINVTDMKQSLKQRFFDRLKKVFNSLLSGGNKVRAFNGWVMPVLMYSFGILKWTQTELDALDRRVRTLLTAYRMHHPRSSVMRLYIPRKCGGRGFLNAKTLHNREVCSLREYFLEADVGMHRDVVAVDKGLTPLSLAKENWRKLVVLDTNDRREVWQSKELHGRFFRALHVPDVDFQASVAWLRFGDLFGETEGFVCAIMDEVIMTKNYRRFIVKDGTVDMCRACHRPGESIRHIISGCSRLANEEYLHRHNLVARIIHQQLALKYSLVESEVPYYRYVPDPVLDNGNITLYWDRSIITDRTIVANKPDIVVVDRTERRAMIVDITVPHDGNLVKAEKDKQIKYLDLAREVVDMWDVDSAIIVPIVVSANGLITKSLDQHLRRLTLDGWIKGLIQKAVLLDTARIVRRFLSLEP

SEQ ID NO: 10869 - protein, 1198 aa, Atethmia centrago
MLTRSAAVRARLPPPDSSLSSASPPPVPSPTVCAVTTPTAAVASSSSDEYFSPPTMPPPVRRRGGRRPPDGLGSRGPPASDRVPAPGGSVKRMRWTQSVNENVMRSYYGATEGGNNLTAYRVRMLSLFQVLEPAVNVSAQRLSDQVRVIQRNHMLDDTVLDRLRSEMQRSHVIVPPSQTVVHSPQLSTNQADEGSDDRATNVSTQCNVELRSALEDAIREYRLMSPELRPRLPRLPMHKKNRALVAALDSQLSNYFDDCEDLTDTHSILYCAAVAVCRVAHVKFAKDSRTTRPKPTVPAWQCRIESRIGGARALIGKLICFREGNTRPRVMRFVRRAFSGTDIGPQDYMTRVTERIDFLKQKVYAWANRIRRYKRRVERYTQNRTFQSDERWVYRGWERPDQDVTDTRLPHDDVMCSFWRSIWSVPVSHTEGDWARKVERACDPIPEMGAITICPQDVARAVRPLPNWKSPGPDGLHNFWLKWFLRSHARLAAQYQTALESGSLPQFLTTGVTHLLHKSGSTAEPKNYRPITCLPTVYKLLTSILRAKINKHIDTNSIMSASQNGCRNGSRGTKELLLIDMTISQQVRRSRKDLSTCWIDYKKAYDSVPHTWLMRVLELYKVDATLRTFLISCMGQWRTVLRYPGCRNIQRNSEPIRIERGIFQGDSLSPLWFCLALNPLSTLLEGSGLGYRMRRGGQVISHLLYMDDLKLFASNNLQLMELLKITESFSSAIRMEFGVDKCAVMHVKRGKIVESVGTQLSDSINLRTLSASETYKYLGMSEALGINVTDMKQSLKERFFGRLKKVFNSLLSGGNKVRAFNGWVMPILMYSFGILKWTQIELDALDRRVRTLLTAYRMHHPRSSVMRLYIPRKCGGRGFLNAKTLHNREVCSLREYFLEADVGMHRDVVAVDKGLTPLSLAKENWRKLVVLDTNDRREVWQSKELHGRFFRALHEPDVDFQASVAWLRFGDLFGETEGFVCAIMDEVIMTKNYRRFIVKDGTVDVCRACHRPGESIRHIISGCSRLANEEYLHRHNLVARIIHQQLALKYSLVESEVPYYRYVPDPVLDNGNITLYWDRSIITDRTIVANKPDIVVVDRTERRAMIVDITVPHDGNLVKAEKDKQIKYLDLAREVVDMWDVDSAIIVPIVVSANGLVAKSLDQHLKRLTLDGWIKGLIQKAVLLDTARIVRRFLSLEP

SEQ ID NO: 10870 - protein, 1197 aa, Mesoligia furuncula
MLTRLAARRARLPPPDSSLSSASPPPVPSLTVSAVTTPAVAVASSSSDEYFSPPTTPPPARRRGGRRPPDGLGPRGPPASDRVPAPGGSVQRMRWTRSINENVMRSYYGATEGGNNLTAYRVRMLSLFQVLEPAVNVSAQRLSDQVRVIQRNHMLDDTVLDRLRNEMQSSHVIAPQPQTAVLLPQCNTNHADEGSNDRATNVSTQCNEELRSALEDAIREYRFMSPEHRPRLPRLPMHNKNRALVAALDSQLSNYFDDCEDLTDTHSILYCAAVAVCRVAHVKFANDSRATRPKPAIPAWQCRIERRIGGARALIGKLICFREGNTRPRVMRFVRRAFLGTDISPQDYMSCVTERIDFLKQKVYAWANRIRRYKRRVERYTQNRTFQSDERWVYRSWEQPDQSVADTCLPDDEAMCSFWRNIWSVPVSHTEGDWAREVERACDPIPEMAITICPQDVARAVRPLPNWKSPGPDGLHNFWIKWFLRSHARLASQFQTALESGSLPQFLTTGITHLLHKSGSTTEPKNYRPITCLPTVYKVLTSILRAKIDKHINTNSIMSVSQNGCKNGSRGTKELLLIDMAISQQVRRSRKDLSTCWIDYKKAYDSVPHTWLMRVLELYKIDATLRTFLMSCMGQWRTVLRYPGCRNIQRNSEPIRIERGIFQGDNLSPLWFCLALNPLSTLLEDSGLGYRLRRGGQVISHLLYMDDLKLFAPNNLQLMELLKVTQTFSSAIRMEFGVDKCAVMHVKRGEIVESVGTQLSDSTNLRALSASETYKYLGMSEALGINVTDMKQSLKERFFGRLKKVLNSLLSGGNKVRAFNGWVMPVLMYSFGILKWTQTELDALDRRVRTLLTANRMHHPRSSVMRLYIPRKCGGRGFLSAKTLHNREICSLREYFLETDVGMHRDVVAVDKGLTPLSLAKENWRKPVVLDTNDRMEVWQSKDLHGRFFRALHGPDVDLLASVAWLRFGDLFGETEGFVCAIMDEVMMTNNYRRFIMKDGTVDICRACHRPGESIRHIISGCSRLANGEYLHRHNLVARIIHQQLALKYSLVESEVPYYRYVPDPVLENGNISLYWDRSIITDRTIVANKPDIVVVDRSERRAMIVDITVPHDENLVKAEKDKQIKYLDLAREVVDMWDVDSAIIVPIVVTANGLIAKSLDQHLRRLSLGSWIKGLIQKAVLLDTARIVRRFLSLEP

SEQ ID NO: 10871 - protein, 1206 aa, Mesoligia furuncula
MLTRSRARYLLENTHPTSSGSPLSSASQLPDPAPDVSSVRPAAAVASSSSDEYFSPPTTPPPVCRRGRGRPPASLGLRGPPASDRVPAPGGSVQRMRWTQTVNENVMRAYFGATEGGSNLTAYRGRMLSLFQVLEPAVNVSAQRLSDQVRVIQRNHMLDNVVLDRLRLESRNSHVTPASSSVAVHLQNVPSVSPRPDHVHVEDDDEAISVSSQCNARLRSALEDAFREYRSIPPGLRPRLPRLPMHKKNKALVCALDSQLSNCFNNSKDLTDTHSILYCAAVAACRVAHVKFPNSDRAPRPKPAVPAWQCRIECRIGEARALIGKLICFREGNTRPRVMRFVRRAFSGTDISSRDYLSRVTERIDFLKQKIYAWANRIRRYRRRVERYTQNRTFQSDERWVYRAWERPDHGVTDTRLPDDGAMCSFWRNIWSVPVSHTEGDWTAKIERACDLIPEMGVLTISPQDVARAVRPLPNWKSPGPDGLHNFWIKWFQGSHARLASQFQSALESGSLPQFLTTGITHLLHKSGSTADPKNYRPITCLPTVYKVLTSILKAKINKHIDTNSIMSVSQNGCKNGSRGTKELLLIDMTISQQVRRFRKDLSTCWIDYKKAYDSVPHTWLMRVLELYKVDTTLRTFLMSCMRQWRTVLRYPGCRNIQRNSEPIRIERGIFQGDSLSPLWFCLALNPLSTLLEDSGLGYRMRRGGQAISHLLYMDDLKLFAPNNLQLMELLKITETFSSAIRMEFGVDKCAVMHVKRGVIVESVGIQLSDSTNLRALSASETYKYLGMSEALAINVTDMKQSLKERFFGRLKKVFNSLLSGGNKVRAFNGWVMPVLMYSFGILKWTQTELDALDRKVRTLLTANRMHHPRSSVMRLYIPRKCGGRGFLNVKTLHNREICSLREYFLETDVGMHRDVVAVDKGLTPLSLGKENWRKPVVLDTNGRMEVWQSKELHGRFFRALHGPDVDFIASVAWLRFGDLFGETEGFVCAIMDEVMMTNNYRRFIVKDGTVDICRACHRPGESIRHIISGCSRLANGEYLHRHNLVARIIHQQLALKYSLVESEVPYYRYVPDPVLENGNITLYWDRAIITDRTIVANKPDIVVVDRSERRAMIVDITVPHDENLVKAEKDKQVKYLDLAREVVDMWDVDSAIIVPIVVTANGLIAKSLDQHLKRLSLGSWIKGLIQKAVLLDTARIVRRFLSLEP

SEQ ID NO: 10872 - protein, 975 aa, Mesoligia furuncula
MSPEHRPRLPRLPMHNKNRALVAALDSQLSNYFDDCEDLTDTHSILYCAAVAVCRVAHVKFANDSRATRPKPAIPAWQCRIERRIGGARALIGKLICFREGNTRPRVMRFVRRAFLGTDISPQDYMSCVTERIDFLKQKVYAWANRIRRYKRRVERYTQNRTFQSDERWVYRSWERPDQSVADTCLPDDEAMCSFWRNIWSVPVSHTEGDWAREVERACDPIPEMGAITICPQDVARAVRPLPNWKSPGPDGLHNFWIKWFLRSHARLASQFQTALESLSLPQFLTTGITHLLHKSGSTTEPKNYRPITCLPTVYKVLTSILRAKIDKHINTNPIMSVSQNGCKNGSRGTKELLLIDMAISQQVRRSRKDLSTCWIDYKKAYDSVPHTWLIRVLELYKIDATLRTFLMSCMGQWRTVLRYPGCRNIQRNSEPIRIERGIFQGDSLSPLWFCLALNPLSTLLEDSGLGYRLRRGGQVISHLLYMDDLKLFAPNNLQLMELLKVTQTFSSAIRMEFGVDKCAVMHVKRGEIVESVGTQLSDSTNLRALSASETYKYLGMSEALGINVTDMKQSLKERFFGRLKKVLNSLLSGGNKVRAFNGWVMPVLMYSFGILKWTQTELDALDRRVRTLLTANRMHHPRSSVMRLYIPRKCGGRGFLNAKTLHNREICSLREYFLETDVGMHRDVVAVDKGLTPLSLAKENWRKPVVLDTNDRMEVWQSKELHGRFFRALHGPDVDLLASVAWLRFGDLFGETEGFVCAIMDEVMMTNNYRRFIMKDGTVDICRACHRPGESIRHIISGCSRLANGEYLHRHNLVARIIHQQLALKYSLVESEVPYYRYVPDPVLENGNISLYWDRSIITDRTIVANKPDIVVVDRSERRAMIVDITVPHDENLVKAEKDKQIKYLDLAREVVDMWDVDSAIIVPIVVTANGLIAKSLDQHLRRLSLGSWIKGLIQKAVLLDTARIVRRFLSLEP

SEQ ID NO: 10873 - protein, 1175 aa, Mesoligia furuncula
MLTRSALRKARLPPPDSSLSSASPPPVPSLTVSAVTTPALAVASSSSDEYFSPPTTPPPARRRGGRRPPDGLGPRGPPASDRVPAPGGSVQRMRWTRSINENVMRSYYGATEGGNNLTAYRVRMLSLFQVLEPAVNVSARLSDQVCVIQRNHMLDDTVLDRLRSEMQSSHVIAPQPQTAVLLPQCNTIHADEGSNDRATNVSTQCNEELRSALEDAIREYRFMSPEHRPRLPRLPMHNKNRALVAALDSQLSNYFDDCEDLTDTHSILYCAAVAACRVAHVKIANDSRATRPKPAIPAWQCRIERRIGGARALIGKLICFREGNTRPRVMRFVRRAFLGTDISPQDYMSCVTERIDFLKQKVYAWANRIRRYKRRVERYTQNRTFQSDERWVYRGWERPDQSVADMCLPDDEAMCSFWRSIWSVPVSHTEGDWAREVERACDPIPEMGAITICPQDVARAVRPLPNWKSPGPDGLHNFWIKWFLRSHARLASQFQTALESGSLPQFLTTGITHLLHKSGSTAEPKNYRPITCLPTVYKVLTSILRAKIDKHINTNSIMSVSQNGCKNGSRGTKELLLIDMAIIQQVRRSRKDLSTCWIDYKKAYDSVPHTWLMRVLELYKVDATLCTFLMSCMGQWRTVLRYPGCRNILRNSEPIRIERGIFQGDSLSPLWFCLALNPLSTLLEDSGLVYRLRRGGQVISHLLYMDDLKLFAPNNLQLMELLKVTQTFSSAIRMEFGVDKCAVMHVKRGEIVESVGTQLSDSTNLRALSASETYKYLGMSEALGINVTDMKQSLKERFFGRLKKVLNSLLSGGNKVRAFNGWVMPVLMYSFGILKWTQTELDALDRRVRTLLTANRMHHPRSSVMRLYIPRKCGGRGFLNAKTLHNRKICSLREYFLETDVGMHRDVVAVDKGLTPLSLAKENWRKPVVLDTNDRMEVWQSKELHGRFFRALHGPDVDLLASVAWLRFGDLFGETEGFVCAIMDEVMMTNNYRRFIVKDGTVDICRACHRPGESIRHIISGCSRLANGEYLHRHNLVARIIHQQLALKYSLVESEVPYYRYVPDPVLENGNISLYWDRSIITDRTIVANKPDIVVVDRSERRAMIVDITVPHDENLVKAEKDKQIKYLDLAREVVDMWDVDSAIIVPIVVTANGLIAKSLDQHLRRLSLGSWSRA

SEQ ID NO: 10874 - protein, 1201 aa, Mesoligia furuncula
MLTRLAARRARLPPPDSSLSSAPPPPESSPIVSAVTPAVAVASSSSDEYFSPPTSPTPVRWQGRGRPPNSLGLRGHPAPSRVPATGGCVQRMRWTQSMNENVMRAYYRSTEGGINLTAYRDRMLSLFQELEPTVNVSAQRLSDQVRVIQRNHRLDDIALDRLRSEVLSNHIVSTSAQTAAQASTVDAIPPRSNHVEEEDDRVDTVSSQCNVRLRSALEDALCEYRSTPTELRPRLPRLPMHKKNRALVCALDSQLKNFFESSEDLVDTHSILYCAAVAACRLANVKFPSCDGATRPKSAVPAWQRRIERRIDGTRVLIGKLYCFREGNTRPRVMRFVRRAFSGTGISPREYMSRLTERIDFLKQKVCAWASRIRRYKRRVDRYTQNRMFQSDERWVYRAWERPEQNVTDVCRPDDAATSAFWCSIWSVPVCHTEAGWMQDVERVCESIPQMETVLITPSDVAKAVRPLPNWKSPGPDGLHNFGLKWLISSHTCLASQFQSSLESGSLPQFLTTGVTHLLHKSGSPAEPKNYRPITCLSAVYKLLTSILRAKINTHIESNSIMSASQNGCRNGSRGTKELLLIDMAISQQVRRSRKDLSTCWIDYKKAYDSVPHTWLMKVLELYKIDATLRTFLESCMRQWKTVLRYPGCRQIQGNDEPVWIKRGIFQGDSLSPLWFCLALNPLSTLLEDSGLGYRLRRDGQVISHLLYMDDLKLFAPNKLRLMELLKVTETFSSAIRMVFGVDKCAVMHVKRGEIVESVGTQLLDSTNLRALSASETYKYLGMSEALGINVTDMKQSVKERFFGRLKKVLNSLLSGGNKVRAFNGWVMPVLMYSFGILKWTQTELDALDRRVRTLLTANRMHHPRSSVMRLYIPRKCGGRGFLNAKTLHNREICSLREYFLETDVGMHRDVVIVDKGLTPLSLAKENWRKPVVLDTNDRIEVWQSKELHGRFLRALRGPDVDLQASVAWLRFGNLFGETEGFVCAIMDEVMMTNNYRRFIVKDGTVDICRACHRPGESIRHIISGCSRLANGEYLHRHNLVARIIHQQLALKYNLVESEVPYYRYVPDPVLENGNITLYWDRSIITDRTIVANKPDIVVVDRSERRAMIVDITVPHDENLVKAEKDKQIKYLDLAREVVDMWDVDTAIIVPIVVTANGLIAKSLDQHLRRLSLGSWIKGLIQRAVLLDTARIVSRFLSLEP

SEQ ID NO: 10875 - protein, 1206 aa, Mesoligia furuncula
MLTRSRARYLLENTHPTSSGSPLSSASQLPDPAPDVSSVRPAAAVASSSSDEYFSPPTTPPPVCRRGRGRPPASLGLRGPPASDRVPAPGGSVQRMRWTQTVNENVMRAYFGATEGGSNLTAYRGRMLSLFQVLEPAVNVSAQRLSDQVRVIQRNHMLDNVVLDRLRLESRNSHVTPASSSVAVHLQNVPSVSPRPDHVHVEDDDEAISVSSQCNARLRSALEDAFREYRSIPPGLRPRLPRLPMHKKNKALVCALDSQLSNCFNNSKDLTDTHSILYCAAVAACRVAHVKFPNSDRAPRPKPAVPAWQCRIECRIGEARALIGKLICFREGNTRPRVMRFVRRAFSGTDISSRDYLSRVTERIDFLKQKIYAWANRIRRYRRRVERYTQNRTFQSDERWVYRAWERPDHGVTDTRLPDDGAMCSFWRNIWSVPVSHTEGDWTAKIERACDLIPEMGVLTISPQDVARAVRPLPNWKSPGPDGLHNFWIKWFQGSHARLASQFQSALESGSLPQFLTTGITHLLHKSGSTADPKNYRPITCLPTVYKVLTSILKAKINKHIDTNSIMSVSQNGCKNGSRGTKELLVIDMTISQQVRRFRKDLSTCWIDYKKAYDSVPHTWLMRVLELYKVDTTLRTFLMSCMRQWRTVLRYPGCRNIQRNSEPIRIERGIFQGDSLSPLWFCLALNPLSTLLEDSGLGYRMRRGGQAISHLLYMDDLKLFAPNNLQLMELLKITETFSSAIRMEFGVDKCAVMHVKRGVIVESVGIQLSDSTNLRALSASETYKYLGMSEALAINVTDMKQSLKERFFGRLKKVFNSLLSGGNKVRAFNGWVMPVLMYSFGILKWTQTELDALDRKVRTLLTANRMHHPRSSVMRLYIPRKCGGRGFLNVKTLHNREICSLREYFLETDVGMHRDVVAVDKGLTPLSLGKENWRKPVVLDTNDRMEVWQSKELHGRFFRALHGPDVDLIASVAWLRFGDLFGETEGFVCAIMDEVMMTNNYRRFIVKDGTVDICRACHRPGESIRHIISGCSRLANGEYLHRHNLVARIIHQQLALKYSLVESEVPYYRYVPDPVLENGNITLYWDRAIITDRTIVANKPDIVVVDRSERRAMIVDITVPHDENLVKAEKDKQVKYLDLAREVVDMWDVDSAIIVPIVVTANGLIAKSLDQHLKRLSLGSWIKGLIQKAVLLDTARIVRRFLSLEP

SEQ ID NO: 10876 - protein, 1199 aa, Spilarctia lutea
MITRARSRALLPPSDSSRSSALPSSEARTEAPTVAEASSSSSSDEFFSPPTSPTPVRRQGRCRPPDSLGPRGPLTSNRAPATGGNVHRMKWTHSINENVMRAYFRATELGTNLTAYRVRLVSLFQELEPAINVSAQRLSDQVRAIQRCHLLDDAALERIRSDIRNSLTVPSSSHVVDVVTNTTPQVPQNEDVSELVDSEIMSVSNQYNDRIRSTLEDAIREYRYVNFNNRPRLSRLPIHKRNLALVSALDSLLPDYFSNSEDLSDAHSILYCAAIAVCRVAGVKFAENTTTTRQENTVPAWQCRIERRIAEARTLIGKLISFRSGNMRPRVMRFVKRAFLGTTISPQEYMSCVTERIDFLKQKVYAWANRIRRYRKRVDRYNQNRMFQRNEKWVYRKWENLRPCLSDGQVPDENATNSFWHSIWSVPVTHTEGDWYRDVERSCESLLPMEPISINEEDVSCAVRSLPNWKAPGPDGLHNFWLKWFRSSHACLASQFQTALDSGSLPQFLTTGITHLLYKSGDAMDPKNFRPITCLPTLYKLLTSILRLKITTHINHNSILSISQNGCRSGTRGTKELLIIDMTISQQVRRNRKSLATCWIDYKKAFDSVPHTWLLRVLELYKIDTTLCTFLKLCMGQWRTALRYPECRQSAMNDVLIKIERGIFQGDSLSPLWFCLALNPLSTLLEGSGLGYRFQKDDRGISHLLYMDDLKLLAPTKLQLTGLLKVTENFSNSIKMEFGVDKCAVMYVKKGEIVESEGIELSDATKLRSLSVTETYKYLGFSQSLGIPEPDMKQTLRERFFSRLKKVLKSLLSSGNKVRACNGWVMPVLMYSFGVLRWTQTELDAIDRRVRTLLTAFRMHHPRSSVMRLYIPRKLGGRGLLNIKTLHNREVYNLREYFLQTDVGVHRSVVTVDTGLTPLALAKENWRKPVVLSTNDRREVWKGKVLHGRFYRALNGPDIDFKASTSWLRYGDLFGETEGFVCAIMDEVIMTSNYRKYILKDGTVDICRACHRPGESIRHIVSGCSRLANGEYLHRHNQVARIVHQQLALKYNLVSSEVPYYRYVPDPVLENGRATLYWDRSIITDRTIVANKPDIVVMDRLERRAMIVDIAVPHDENLVKVEKEKQIKYLDLSHEIVDMWNVDSAIIVPIVVSAHGLIAKSLDQHLKRLTLGGWIKGLIQKAVLLDTARIVRRFLSLEP

SEQ ID NO: 10877 - protein, 1198 aa, Xestia c-nigrum
MLTRAAARRARLPPPDPSLSSASPPPEPSPIVSAVTPAVAVASSSSDEYFSPPTTPPPARRRGGRRPPDGLGPRGPPASDRVPAPGGSVQRMRWTQSNNENVMRAYYGATEGGNNLTAYRVRMLSLFQVLEPAVNVSAQRLSDQVRVIQRNRMLDDTVLDRLRTEMHSSHVIATPPSQAVVPPQSTTITNRDYDVSSDMITNVGTQYSEDMRSALEGAIREYRFMTPELRPRLPRLPMHNKNRMLVAVLDSQLSNYFDNCEDLTDVHSILYCAAVAACRVARVKFSDDRATRPKPAVPAWQYRIEQRIGGARALIGKLICFREGNTRPRVMRFVRRAFSGTDINPRDYMSRVTERIDFLKQKVYAWASRIRRYKRRVDRYTQNRTFQRDERWVYRAWERPDQGVADTRLPDDDAMCSFWRSIWSVPVSHAEGEWTRVIERACDPVPEMGAITISPQDVACAVRPLPNWKSPGPDGLHNFWIKWFTRSHARLATLFQSALESGSLPEFLTTGITHLLHKSGSTAEPKNYRPITCLPTVYKVLTSILRTKICKHVDDNSVMSASQNGCRNGSRGTKELLLIDMAISQQVRCSRKDLSTCWIDYKKAYDSVPHTWLMRVLELYKVDATLRTFLMSCMRQWRTVLRYPGCRQIQRNSEPIRIERGIFQGDSLSPLWFCLALNPLSTLLEDSGLGYQLRKDGRVISHLLYMDDLKLFAPNDLQLMELLKVTETFSSAIRMEFGEDKCAVMHVKRGEIVESVGTQLSDSINLRSLSATETYKYLGMSEALGINGADMKQSLKERFFGRLKKVFNSLLSGGNKVRAFNGWVMPVLMYSFGILKWTQTELDALDTKVRKLLTAFRMHHPRSSVMRLYIPRKCGGRGFLNAKTLHNREICSLRDYFLEADVGMHRDVVTMDKGLTPLSLAKENWRKPIILTTDDRRKEWQGKELHGRFYRALHGPDVDFLASVSWLRSGDLFGETEGFVCAIMDEVMMTNNYRRFIVKDGTVDICRACHRPGESIRHIISGCSRLANGEYLHRHNLVARIIHQQLALKYNLVESEVPYYRYVPDPVLVNGSITLYWDQFIITDRTVIANRPDIVVMDRSERRAMIVDITVPHDENLVKAEKDKQIKYLDLAREVVDMWEVDSAIIVPIVVSAHGLIAKSLDQHLRRLSLGSWIKGLIQKAVLLDTARLVRRFLSLEP

SEQ ID NO: 10878 - protein, 1107 aa, Xestia c-nigrum
MRWTQSNNENVMRAYYGATEGGNNLTAYRVRMLSLFQVLEPAVNVSAQRLSDQVRVIQRNRMLDDTVLDRLRTEMHSSHVIATPPSQAVVPPQSTTITYRDDDVSSDMITNVSTQYSKDMRSALEGAIREYRFMTPELRPRLPRLPMHNKNRMLVAVLDSQLSNYFDNCEDLTDVHSILYCAAVAACRVARVKFSDDRATRPKPAVPAWQYRIEQRIGGARALIGKLICFREGNTRPRVMRFVRRAFSGTDINPRDYMSRVTERIDFLKQKVYAWASRIRRYKRRVDRYTQNRTFQRDERWVYRAWERPDQGVADTRLPDDDAMCSFWRSIWSVPVSHAEGEWTRVIERACDPVPEMGAITISPQDVACAVRPLPNWKSPGPDGLHNFWIKWFTRSHARLATLFQSALESGSLPEFLTTGITHLLHKSGSTAEPKNYRPITCLPTVYKVLTSILRTKICKHVDDNSVMSASQNGCRNGSRGTKELLLIDMAISQQVRRSRKDLSTCWIDYKKAYDSVPHTWLMRVLELYKVDATLRTFLMSCMGQWRTVLRYPGCRQIQRNSEPIRIERGIFQGDSLSPLWFCLALNPLSTLLEDSGLGYQLRKDGRVISHLLYMDDLKLFAPNDLQLMELLKVTETFSSAIRMEFGVDKCAVLHVKRGEIVESVGTQLSDSINLRSLSATETYKYLGMSEALGINVADMKQSLKERFFGRLKKVFNSLLSGGNKVRAFNGWVMPVLMYSFGILKWTQTELDALDTKVRKLLTAYRMHHPRSSVMRLYIPRKCGGRGFLNAKTLHNREICSLREYFLEANVGMHRDVVAMDKGLTPLSLAKENWRKPVVLTTDDRRKEWQSKELHGRFYRALHGPDVDILASVSWLRSGDLFGETEGFVCAIMDEVMMTNNYRRFIVKDGTVDICRACHRPGESIRHIISGCSRLANGEYLHRHNLVARIIHQQLALKYNLVESEVPYYRYVPDPVLDNGSITLYWDQSIITDRTVIANRPDIVVMDRSERRAMIVDITVPHDENLVKAEKDKQIKYLDLAREVVDMWEVDSAIIVPIVVSAHGLIAKSLDQYLRRLSLGSWIKGLIQKAVLLDTARIVRRFLSLEP

SEQ ID NO: 10879 - protein, 1198 aa, Griposia aprilina
MLTRSAARRARPPPPDSSLSSASLPPVSSPTVSAVTTPAAVVASSSSDEYFSPPTTPPPVRRRGGHRPPDGLEPRGPPASDRVPAPGGSVQRMRWTRSINENVMRSYYGATEGGNNLTAYRVRMLSLFQVLEPAVNVSAQRLSDQVRVIQRNHMLDDTVLDRLRNEMQSSHVIAPPSQTVVVLPQSNTSQADEESDDRATNVSTQCNDELRSALEDAIREYRFISPDLRPRLPRLPMHNKNRVLVAALDAQLSNYFDDCVDLTDTHSILYCAAVAVCRVAHVKFANDSRATRPKPAVPAWQCRIERRIGEARALIGKLICFMEGNTRPRVMRFVRRAFAGTNISPQDYISCVTERIDFLKQKVYAWANRIRRYKRRVERYTQNRTFQRDERWVYRGWERPDQGVADTCLPDDDAMCSFWRNIWSVPVSHTEGDWTREVERACDPIPEMGAITICPQDVTRAVRPLPNWKSPGPDGLHNFWIKWFGRSHARLAAQYQVALESGSLPQFLTTGVTHLLHKSGSTAEPKNYRPIACLPTVYKVLTSILRDKINKHIDTNYIMSPSQNGCRNGSRGTKELLLIDMAISQQVRRSRKDLSTCWIDYKKAYDSVPHTWLMRVLELYKVEATLRTFLMSCMGQWRTVLHYPACRNTQRNSEPIRIERGIFQGDSLSPLWFCLALNPLSTLLEYSGLGYRLRRGGQVISHLLYMDDLKLFAPNNSQLMDLLKVTETFSSAIRMEFGVDKCAVMHVKRGEIVESVGTQLSDSINLRALSASETYKYLGMSEALGINGTDMKQSLKDRFFGRLKKVFNSLLSGGNKVRAFNGWVMPVLMYSFGILKWTQTELDALDRKVRTLLTANRMHHPRSSVMRLYIPRKCGGRGFLNAKTLHNREICSLREYFLEADVGMHRDVVTVDKGLTPLSLAKENWRKPVVLDTNDRMEVWQSKELHGRFFWALHGPDVDQLASVAWLRFGDLFGETEGFVCAIMDEVMMTNNYRRFIVKDGTVDICRACHRPGESIRHIISGCSRLANEEYLHRHNLVARIIHQQLALKYSLVESEVPYYRYVPDPVLENGHITLYWDRSIITDRTIVANKPDIVVVDRLERRAMIVDITVPHDGNLVKAEKDKQIKYLDLAREVVDMWDVDSAIIVPIVVTANGLIAKSLDQHLRRLSLGSWIKGLIQKAVLLDTARIVRRFLSLEP

SEQ ID NO: 10880 - protein, 1198 aa, Griposia aprilina
MLTRSAARRARPPPPDSSLSSASLPPVSSPTVSAVTTPAAVVASSSSDEYFSPPTTPPPVRRRGGHRPPDGLGPRGPPASDRVPAPGGSVQRMRWTRSINENVMRSYYGATEGGNNLTAYRVRMLSLFQVLEPAVNVSAQRLSDQVRVIQRNHMLDDTVLDRLRNEMQSSHVIAPPSQTVVVLPQSNTSQADEESDDRATNVSTQCNDELRSALEDAIREYRFISPELRPRLPRLPMHNKNRVLVAALDAQLSNYFDDCVDLTDTHSILYCAAVAACRVAHVKFANDSRATRPKPAVPAWQCRIERRIGEARALIGKLICFREGNTRPRVMRFVRRAFAGTNISPQDYISCVTERIDFLKQKVYAWANRIRRYKRRVERYTQNRTFQRDERWVYRGWERPDQGVADTCLPDDDAMCSFWRNIWSVPVSHTEGDWTREVERACDPIPEMGAITICPQDVTRAVRPLPNWKSPGPDGLHNFWIKWFGRSHARLAAQYQVALESGSLPQFLTTGVTHLLHKSGSTAEPKNYRPIACLPTVYKVLTSILRDKINKHIDTNYIMSPSQNGCRNGSRGTKELLLIDMAISQQVRRSRKDLSTCWIDYKKAYDSVPHTWLMRVLELYKVEATLRTFLMSCMGQWRTVLHYPACRNTQRNSEPIRIERGIFQGDSLSPLWFCLALNPLSTLLEDSGLGYRLRRGGQVISHLLYMDDLKLFAPNNSQLMDLLKVTETFSSAIRMEFGVDKCAVMHVKRGEIVESVGTQLSDSINLRALSASETYKYLGMSEALGINGTDMKQSLKDRFFGRLKKVFNSLLSGGNKVRAFNGWVMPVLMYSFGILKWTQTELDALDRKVRTLLTANRMHHPRSSVMRLYIPRKCGGRGFLNAKTLHNREICSLREYFLEADVGMHRDVVTVDKGLTPLSLAKENWRKPVVLDTNDRMEVWQSKELHGRFFRALHGPDVDQVASVAWLRFGDLFGETDGFVCAIMDEVMMTNNYRRFIVKDGTVDICRACHRPGESIRHIISGCSRLANEEYLHRHNLVARIIHQQLARKYSLVESEVPYYRYVPDPVLENGHITLYWDRSIITDRTIVANKPDIVMVDRLERRAMIVDITVPHDGNLVKAEKDKQIKYLDLAREVVDMWDVDSAIIVPIVVTANGLIAKSLDQHLRRLSLGSWIKGLIQKAVLLDTARIVRRFLSLEP

SEQ ID NO: 10881 - protein, 868 aa, Griposia aprilina
MRFVRRAFAGTNISPQDYMSCVTERIDFLKQKVYAWANRIRRYKRRVERYTQNRTFQRDERWVYRGWERPDQGVADTCLPDDDAMCSFWRNIWSVPVSHTEGDWTREVERACDPIPEMGAITICPQDVTRAVRPLPNWKSPGPDGLHNFWIKWFGRSHARLTAQYQVALESGSLPQFLTTGVTHLLHKSGSTAEPKNYRPIACLPTVYKVLTSILRDKINKHIDTNYIMSPSQNRCRNGSRGTKELLLIDMAISQQVRRSRKDLSTCWIDYKKAYDSVPHTWLMRVLELYKVEATLRTFLMSCMGQWRTVLHYPACRNTQRNSEPIRIERGIFQGDSLSPLWFCLALNPLSTLLEDSGLGYRLRRGGQVISHLLYMDDLKLFAPNNSQLLDLLKVTETFSSAIRMEFGVDKCAVMHVKRGEIVESVGTQLSDSINLRALSASETYKYLGMSEALGINGTDMKQSLKDRFLGRLKKVFNSLLSGGNKVRAFNGWVMPVLMYSFGILKWTQTELDALDRKVRTLLTANRMHHPRSSVMRLYIPRKCGGRGFLNAKTLHNREICSLREYFLEADVGMHRDVVTVDKGLTPLSLAKENWRKPVVLDTNDRMEVWQSKELHGRFFRALHGPDVDQLASVAWLRFGDLFGETEGFVCAIMDEVMMTNNYRRFIVKDGTVDICRACHRPGESIRHIISGCSRLANEEYLHRHNLVARIIHQQLALKYSLVESEVPYYRYVPDPVLENGHITLYWDRSIITDRTIVANKPDIVMVDRLERRAMIVDITVPHDGNLVKAEKDKQIKYLDLAREVVDMWDVDSAIIVPIVVTANGLIAKSLDQHLRRLSLGSWIKGLIQKAVLLDTARIVRRFLSLEP

SEQ ID NO: 10882 - protein, 1198 aa, Griposia aprilina
MLTRSAARRARPPPPDSSLSSASLPPVSSPTVSAVTTPAAVVASSSSDEYFSPPTTPPPVRRRGGHRPPDGLGPRGPPASDRVPAPGGSVQRMRWTRSINENVMRSYYGATEGGNNLTAYRVRMLSLFQVLEPAVNVSAQRLSDQVRVIQRNHMLDDTVLDRLRNEMQSSHVIAPPSQTVVVLPQSNTSQADEESDDRATNVSTQCNDELRSALEDAIREYRFISPELRPRLPRLPMHNKNRVLVAALDAQLSNYFDDCVDLTDTHSILYCAAVAACRVAHVKFANDSRATRPKPAVPAWQCRIERRIGEARALIGKLICFREGNTRPRVMRFVRRAFAGTNISPQDYMSCVTERIDFLKQKVYAWANRIRRYKRRVERYTQNRTFQRDERWVYRGWERPDQGVADTCLPDDDAMCSFWRNIWSVPVSHTEGDWTREVERACDPIPEMGAITICPQDVTRAVRPLPNWKSPGPDGLHNFWIKWFGRSHARLAAQYQVALESGSLPQFLTTGVTHLLHKSGSTAEPKNYRPIACLPTVYKVLTSILRDKINKHIDTNYIMSPSQNGCRNGSRGTKELLLIDMAISQQVRRSRKDLSTCWIDYKKAYDSVPHTWLMRVLELYKVEATLRTFLMSCMGQWRTVLHYPACRNTQRNSEPIRIERGIFQGDSLSPLWFCLALNPLSTLLEDSGLGYRLRRGGQVISHLLYMDDLKLFAPNNSQLMDLLKVTETFSSAIRMEFGVDKCAVMHVKRGEIVESVGTQLSDSINLRALSASETYKYLGMSEALGINGTDMKQSLKDRFFGRLKKVFNSLLSGGNKVRAFNGWVMPVLMYSFGILKWTQTELDALDRKVRTLLTANRMHHPRSSVMRLYIPRKCGGRGFLNAKTLHNREICSLREYFLEADVGMHRDVVTVDKGLTPLSLAKENWRKPVVLDTNDRMEVWQSKELHGRFFRALHGPDVDQLASVAWLRFGDLFGETEGFVCAIMDEVMMTNNYRRFIVKDGTVDICRACHRPGESIRHIISGCSRLANEEYLHRHNLVARIIHQQLALKYSLVESEVPYYKYVPDPVLENGHITLYWDRSIITDRTIVANKPDIVMVDRLERRAMIVDITVPHDGNLVKAEKDKQIKYLDLAREVVDMWDVDSAIIVPIVVTANGLIAKSLDQHLRRLSLGSWIKGLIQKAVLLDTARIVRRFLSLEP

SEQ ID NO: 10883 - protein, 1196 aa, Griposia aprilina
MLTRSRRARPPPPDSSLSSASLPPVSSPTVSAVTTPAAVIASSSSDEYFSPPTTPPPARRRGGHRPPDGLGPRGPPASDRVPAPGGSVQRMRWTRSINENVMRSYYRATEGGSNLTAYRVRMLSLFQVLEPAVNVSAQRLSDQVRVIQRNHMLDDTVLDRLRNEMQSSHVIAPPSQTVIVLPQCNTTQADEESDDRATNVSTQCNEELRSALEDAIREYRFISPELRPRLPRLPMHNKNRVLVAALDAQLSNYFDDCVDLTDTHSILYCAAVAVCRVAHVKFANDSRATRPKPAVPAWQCRIERRIGGARALIGKLICFREGNTRPRVMRFVRRAFAGTNISPQDYMSYVTERIDFLKQKVYAWANRIRRYKRRVERYTQNRTFQRDERWVYRGWERPDQGVADTCLPADDAMCSFWRNIWSVPVSHTEGDWAREVERACDPIPEMGAISICPQDVTRAVRPLPNWKSPGPDGLHNFWIKWFGRSHARLAAQYQVALESGSLPQFLTTGVTHLLHKSGSTAEPKNYRPITCLPTVYKVLTSILRAKINKHIDTNYIMSPSQNGCRNGSRGTKELLLIDMAISQQVRRSRKDLSTCWIDYKKAYDSVPHTWLVKVLELYKVDSTLRTFLKSCMGQWRTVLHYPGCRNIQRDNEPIRIERGIFQGDSLSPLWFCLALNPLSTLLEDSGLGYRLRRGGQVISHLLYMDDLKLFAPNNLQLMELLKVTETFSSAIRMEFGVDKCAVMHVKRGEIVESVRTQLSDSINLRALSASDTYKYLGMSEALGINGTDMKQSLKERFFGRLKKVFNSLLSGGNKVRAFNGWVMPVLMYSFGILKWTQTELDALDRKVRTLLTANRMHHPRSSVMRLYIPRKCGGRGFLNAKTLHNREICSLREYFLEADVGMHRDVVTVDKGLTPLSLAKENWRKPVVLDTNDRMEVWQIKELHGRFFRALHGPDVDQLASVAWLRFGDLFGETEGFVCAIMDEVILTNNYRRHIMKDGTVDVCRACHRPGESIRHIISGCSRLANEEYLHRHNLVARIIHQQLALKYSLVESEVPYYRYVPDPVLENGHITLYWDRSIITDRTIVANKPDIVVVDRLERRAMIVDITVPHDGNLVKAEKDKQIKYLDLAREVVDMWDVDSAIIVPIVVTANGLIAKSLDQHLRRLSLGSWIKGLIQKAVLLDTARIVRRFLSLEP

SEQ ID NO: 10884 - protein, 1197 aa, Griposia aprilina
MLTRSAALRARLPTPDSSLSSASPPPVSSPIVSAVTTPAAVVASSSSDEYFSPPTTPPPARRRGGHRPPDGLGPRGPPASDRVPAPGGSVQRMRWTQSINENVMRSYYGATEGGNNLTAYRVRMLSLFQVLEPAVNVSAQRLSDHVRVIQRNHMLDDTVLDRLRSEMQSSHVIAPPSQTVVVLPQPITSHDEGSDDRATNVSTQCNEELRSALEGAIREYRFMSPELRPRLPRLPMHNKNRALVAALDSQLSNYFDDCVDLTDTHSILYCAAVAACRVAHVKFANDSRATRPKPAVPAWQCRIERRIGGARALIGKLICFREGNTRPRVMRFVRRAFAGTDVSPQDYISCVTERIDFLKQKVYAWASRIRRYKRRVERYTQNRTFQRDERWVYRDWERPDQGVADTYLPDDDAMCSFWHNIWSVPVSHTEGDWTREVERACEPIPEMGAITICPQDVARAVRPLPNWKSPGPDGLHNFWIKWFLKSHARLAAQFQAALESGSLPQFLTTGVTHLLHKSGSIAEPKNYRPITCLPTVYKVLTSILRAKINKHIDTNSIMSASQNGCRNGSRGTKELLLIDMAISQQVRRSRKDLSTCWIDYKKAYDSVPHTWLMRVLELYKVDATLRTFLKSCMGQWRTVLRYPTCRNTQRNSEPIRIERGIFQGDSLSPLWFCLALNPLSTLLEDSGLGYRLRRGGRVISHLLYMDDLKVFAPNNLQLIELLKVTETFSSAIRMEFGLDKSAVMHVKRGEIVESVGTQLSDSMNLRALSASETYKYLGMSEALGVNNTDMKQSLKERFFGRLKKVFNSLLSGGNKVRAFNGWVMPVLMYSFGILKWTQTELDTLDRRVRTLLTANRMHHPRSSVMRLYIPRKCGGRGFLNAKSLHNREICSLREYFLEADVGMHRDVVAVDKGLTPLSLAKENWRKPVVLDTNDRMEVWQSKELHGRFFRALHGPDVDVQASVAWLRFGDLFGETEGFVCAIMDEVMMTNNYRRFIVKDGTVDICRACHRPGESIRHIISGCSRLANEEYLHRHNLVARIIHQQLALKYSFVESEVPYYRYVPDPVLENGTITLYWDRSIITDRTIIANKPDIVLVDRRERRAMIVDITIPHDGNLVKAEKDKQIKYLDLAREVVDMWDVDSAIIVPIVVTANGLIAKSLDQHLRRLSLGSWIKGLIQKAVLLDTARIVRRFLSLEP

SEQ ID NO: 10885 - protein, 1106 aa, Griposia aprilina
MRWTRSINENVMRSYYGATEGGNNLTAYSVRMLSLFQVLEPAVNVSAQRLSDQVRVIQRNHMLDDTVLDRLRNEIQSSHVIAPPSQTVVVLPQPITSQAGEGRDDRATNVSTQCNDELRSALEDAIRKYRFISPELRPRLPRLPMHNKNRALVVALDAQLLNYFDDCEHLTDTHSILYCVAVAACRVAHVKFANDSRATRPKPAVPAWQCRIERRNGGARALIGKLTCFREGNTRPRVMRFVRRVFAGTNISPQDYMSCVTERIDFLKQKVHAWANRIRRYKRRVERYTQNRTFQRDERWVYRDWERPDQGVTDTYLPDDDAMCSFWRNIWSVPVSHTEGDWAREVERACEPIPEMRAITICPQDVARAVRPLPNWRSPGPDGLHNFWIKSFLRSHARLAAQFQVALESGSLPQFLTTGVTRLLHKSGSTAEPKNYRPITCLPTVYKVLTSILRAKINNHIDTNSIMSPSQNGCRNGSHGTKELLLIDMTISQPVRRSRKDLSKCWIDYKKAYDSVPHTWLMRVLELYKVDSTLRTFLKSCMGQWRTVLHYPGCRNVQRNSEPIRIERGIFQGDSLSPLWFCLALNPLSTLLENSGLGYRLRRGGQVISHLLYMDDLKLFAPNNLQLMELLKVTETFSSAIKMEFRVDKCAVMHVKRGEIVESVGIQLSDSINLRAFSASETYKYLGISEALGINGTDMKQSLKERFFGRLKKVFNSLLSGGNKVRAFNGWVMPVLMYSFGILKWTQTELDALDKKVRSLLTANRMHHPRSSVMRLYIPRKCGGRGFLNAKTLHNREICSLREYFLEADVGMHRDVVTVDKGLTPLSLAKENWRKPVVLDTNDRMEVWQSKELHGRFFRALHGPDVDQLASVAWLRYGDLFGETEGFVCAIMDEVMMTKNYRRFIVKDGTVDICRACHRPGESIRHIISGCSRLANEEYLHRHNLVARIIHQQLALKYSLVESEVPYYRYVPDPVLENGHITLYWDRSIITDRTIVANKPDIVVVDRIERRAVIVDITIPHDGNLVKAEKDKQIKYLDLAREVVDMWDVDSAIIVPIVVTANGLIAKSLDQHLRRLSLGSWIKGLIQKAVLLDTARIVRRFLSLEP

SEQ ID NO: 10886 - protein, 1045 aa, Griposia aprilina
MLDDTVLDRLRNEMQSSHVIAPPSQTVVVLPQSNTSQADEESDDRATNVSTQCNDELRSALEDAIREYRFISPELRPRLPRLPMHNKNRVLVAALDAQLSNYFDDCVDLTDTHSILYCAAVAACRVAHIKFANDSRPTRPKPAVPAWQCRIERRIGGARALIGKLICFREGNTRPRVMRFVRRAFAGTNISPQDYMSCVTERIDFLKQKVYAWANRIRRYKRRVERYTQNRTFQRDERWVYRGWERPDQGVADTCLPDDDAMCSFWRNIWSVPVSHTEGDWGREVERACDPIPEMGAISICPQDVTRAVRPLPNWKSPGPDGLQNFWIKWFGRSHARLAAQYQVAIESGSLPQFLTTGVTHLLHKSGSTAEPKNYRPITCLPTVYKVLTSILRAKINKHIDTNSIMSPSQNGCRNGSRGTKELLLIDMAISQQVRRSRKDLSTCWIDYKKAYDSVPHTWLVRVLELYKVDATLRTFLKSCMGQWRTILHYPGCRNIQRDNEPIRIERGIFQGDSLSPLWFCLALNPLSTLLEDSGLGYRLRRGGQVISHLLYMDDLKLFAPNNLQLMELLKVTETFSSAIRMEFGVDKCAVMHVKRGEIVESVGTQLSYSINLRALSASDTYKYLGMSEALGINGTDMKQSLKERFFGRLKKVFNSLLSGGNKVRAFNGWVMPVLMYSFGILKWTQTELDALDRKVRTLLTANRMHHPRSSVMRLYIPRKCGGRGFLNAKTLHNREICSLREYFLEADVGMHTDVVKVDKGLTPLSLAKENWRKPVVLDTNDRMEVWQSKELHGRFFRALHEPDVDQLASVAWLRFGDLFGETEGFVCAIMDEVILTNNYRRHIMKDGTVDVCRACHRPGESIRHIIFGCSRLANEEYLHRHNLVARIIHQQLALKYSLVESEVPYYRYVPDPVLVNGHITLYWDRSIITDRTIVANKPDIVVVDRLERRAMIVDITVPHDGNLVKAEKDKQIKYLDLAREVVDMWDVDSAIIVPIVVTANGLIAKSLDQHLRRLSLGSWIKGLIQKAVLLDTARIVRRFLSLEP

SEQ ID NO: 10887 - protein, 868 aa, Griposia aprilina
MRFVRRAFAGTNISPQDYMSCVTERIDFLKQKVYAWANRIRRYKRRMERYTQNRTFQRDERWVYRDWERPDQGVADTCLPDDDAMCSFWRNIWSVPVSHTEGDWAREVERACDPIPEMGAISICPQDVTRAVRPLPNWKSPGPDGLHNFWIKWFGRSHARLAAQYQVALESGSLPQFLTTGVTHLLHKSGSTAEPKNYRPITCLPTVYKVLTSILRAKINNHIDTNSIMSPSQNGCRNGSRGTKELLLIDMAISQQVRRSRKDLSTCWIDYKRAYDSVPHTWLVRVLELYKVDATLRTFLKSCMGQWRTVLHYPGCRNIQRNNEPIRIERGIFQGDSLSPLWFCLALNPLSTLLEDSGLGYRLRRGGQVISHLLYMDDLKLFAPNNLQLMELLKVTETFSSAIRMEFGVDKCAVMHVKRGAIVESVGTQLSDSINLRALSAFETYKYLGMSEALGINGTDMKQLLKERFFGRLKKVFNSLLSGGNKVRAFNGWVMPVLMYSFGILKWTQTELDALDRKVRTLLTANRMHHPRSSVMRLYIPRKCGGRGFLNTKTLHNREICSLREYFLEADVAMHRDVVTVDKGLTPLSLAKENWRKPVVLDTNDRMEVWQSKELHGRFFRALHGPDVDQLASVAWLRFGDLFGETEGFVCAIMDEVILTNNYRRHIMKDGTVDVCRACHHPGESIRHIISGCSRLANEEYLHRHNLVARIIHQQLALKYSLVESEVPYYRYVPDPVLENGHITLYWDRSIITDRTIVANKPDIVMVDRLERRAMIVDITVPHDGNLVKAEKDKQIKYLDLAREVVDMWDVDSAIIVPIVVTANGLIAKSLDQHLRRLSLGSWIKGLIQKAVLLDTARIVRRFLSLQP

SEQ ID NO: 10888 - protein, 1201 aa, Omphaloscelis lunosa
MLTRLAARRARLPPPDSPLSSASSPSVRSPTVNAVMTPAAAVASSSSDEYFSPPTTPPPARRRGRRRPPDGLGPRGPPASDRVPAPGGSVQRMRWTRSINENVMRSYYGATEGGNNLTAYRVRMLSLFQVLEPAVNVSAQRLSDQVRVIQRNHMLDDTVLDRLRSEMQSSHVIAPPLRSVIIPSQMSSVITSQADERIDDRATNVSTQCNEDLRSALEGAIQEYRFMSPELRPRLPRLPMHNKNKALVAVLDSQLSNYFDDCEDLTDTHSILYCAAVAVCRVAHLKFSNDSRATRPKPAAPAWQCRIERRISGARTLIGKLICFREGNTRPRVMRFVRRAFLGTDISPQDYMTRVTERIDFLKQKVYAWANRIRRYKRRVERYTQNRTFQSDERWVYRAWERPDQGVADTHLPDDDAMCSFWRSIWSVPVSHTEGDWTREVERACDPIPEMGAITICPQDVARAVRPLPNWKSPGPDGLHNFWIKWFVRSHARLAAQYQTALESGSLPQFLTTGVTHLLHKSGSTAEPKNYRPITCLPTVYKVLTSILRAKINKHIDTNSIMSVSQNGCRNGSRGTKELLLIDMAISQQVRRFRKDLSTCWIDYKKAYDSVPHTWLMRVLELYKVHTTLRTFLMSCMGQWRTVLRYPGCRNIQRNSEPIRIERGIFQGDSLSPLWFCLALNPLSTLLEDSGLGYRLRRGGQVISHLLYMDDLKLFAPNNLQLMELLKVTETFSSAIRMEFGVDKCAVMHVKRGEIMESVGTQLSDSINLRALSASETYKYLGMSEALGINVTDMKQSLKERFFGRLKKVLNSLLSGGNKVRAFNGWVMPVLMYSFGILKWTQTELDALDRRVRTLLTAYRMHHPRSSVMRLYIPRKCGGRGFLNAKTLHNREICSLREYFLGVDVGMHRDVVVVDKGLTPLSLAKENWRKPVVLDTKDRMEIWQSKELHGRYFRALHGPDVDLPASVTWLRFGDLFGETEGFVCAIMDEVMMTNNYRRFIVKDGTVDICRACHRPGESIRHIISGCSRLANEEYLHRHNLVARIIHQQLALKYSLVESEVPYYRYVPDPVLENGNITLYWDRSIITDRTIAANKPDIVVVDRGERRTMIIDITVPHDENLVKAEKDKQIKYLDLAREVVDMWDVDSAIIVPIVVTANGLIAKSLDQHLRRLSLGSWIKGLIQRAVLLDTARIVRRFLSLEP

SEQ ID NO: 10889 - protein, 1198 aa, Omphaloscelis lunosa
MLTRSAARRARLPPPDSPLSSASSPPVLSPTVNAVMTPAAAVASSSSDEYFSPPTTPPPARRRGRRRPPDGLGPRGPPASDRVPAPGGSVQRMRWTRSINENVMRSYYGATEGGNNLTAYRVRMLSLFQVLEPAVNVSAQRLSDQVRVIQRNHMLDDTVLDRLRSEMQSSHVIAPPVRSVIVPSQIITSQADERIDDRATNVSTQCNEELRSALEGAIHEYRFMSPELRPRLPRLPMHNKNKALVAALDSQLSNYFDDCEDLTDTHSILYCAAVAVCRVAHVKFSNDSRATRPKPAVPAWQCRIERRIDGARTLIGKLICFREGNTRPRVMRFVRRAFLGTDISPQDYMTRVTERIDFLKQKVYAWANRIRRYKRRVERYTQNRTFQSDERWVYRAWERPNQGVTDTHLPDEDAMCSFWRNIWSVPVSHTEGDWTREVERACDSIPEMGAITICPQDVARAVRPLPNWKSPGPDGLHNFWIKWFVRSHARLAAQYQTALESGSLPQFLTTGVTHLLHKSGSTAEPKNYRPITCLPTVYKVLTSVLRAKINKHIDTNSIMSASQNGCRNGSRGTKELLLIDMAISQQVRRSRKDLSTCWIDYKKAYDSVPHTWLMRVLELYKVDITLRTFLMSCMGQWRTVLRYPGCRNIQRNSEPIRIERGIFQGDSLSPLWFCLALNPLSTLLEDSGLGYRLRRGGQVISHPLYMDDLKLFAPNNLQLMELLKVTETFSSAIRMEFGVDKCAVMHVKRGKIMESVGTQLSDSINLRALSASETYKYLGMSEALGINVTDMKQSLKERFFGRLKKVLNSLLSGGNKVRAFNGWVMPVLMYSFGILKWSQTELDALDRRVRTLLTAYRMHHPRSSVMRLYIPRKCGGRGFLNAKTLHNREICSLREYFLEADVGMHRDVVVVDKGLTPLSLAKENWRKPVVLDTKNRMEIWQSKELHGRYFRALHGPDVDLPASVAWLRCGDLFGETEGFVCAIMDEVMMTNNYRRFIVKDGTVDICRACHRPGESIRHIISGCSRLANEEYLHRHNLVARIIHQQLALKYSLVESEVPYYRYVPDPVLENGNITLYWDRSIITDRTIVANKPDIVVVDRGERSAMIIDITVPHDENLVKAEKDKQIKYLDLAREVVDMWDVDSAIIVPIVVTANGLIAKSLDQHLRRLSLGSWIKGLVQKAVLLDTARIVRRFLSLEP

SEQ ID NO: 10890 - protein, 1105 aa, Sesamia nonagrioides
MRWTQSINENVMRSYYGATEGGNNLTAYRVRMLSLFQVLEPAVNVSAQRLSDQVRVIQRNHMLDDTVLDRLRNEMQSSRVIAHQSQTAEIPPQSTNYADEGSNDRATNVSTQCNEELINALEAAIREYRSTSAELRPRLPRLPMHNRNRALMAALDAQLSNYFDTCDDLTDTHSILYCAAVAACRVAHVKFPSDSRATRPKPVVPAWQHRIERRIGGARALIGKLICFREGNTRPRLMRFVRRAFAGTNISPQNYMARVTERIDFLKQKVYAWANRIRRYKRRVERYTQNRTFQNNERWVYRDWERPEQGVTDTCLPDDDVMCSFWRSIWSVPVSHTEGDWARDVERACDLIPEMGAITICPQDVACAVRPLPNWKSPGPDGLHNFWIKWFPRSHARLASQFQTALVSGSLPQFLTTGITHLLHKSGSTAEPKNYRPITCLPTVYKVLTSILKTKINKHIDSNSIMSASQNGCKSGSRGTKELLLIDMAISQQVRRSRKDLSTCWIDYRKAYDSVPHTWLMWVLELYKVDATLRTFLMSCMRTWRTVLRYPGCRNIQRNSEPIRIERGIFQGDSLSPLWFCLAMNPLSTLLEDSGLGYRLRRGGQVISHLLYMDDLKLFAPNNSQLRELLKITETFSNSIRMEFGVDKCAVMHVKRGEIMESVGTQLTGSINFRALSASETYKYLGMSEALGINVTDMKQSLKERFFGRLKKVLNSLLSGGNKVRAFNGWVMPVLMYSFGILKWTQTELDALDQRVRTLLTANRLHHPRSSVMRLYIPRKCGGRGFLNAKTLHNREVCSLREYFLETDVGMHRDVVAADKGLTPLSLAKENWRKPVVLDTNDRLEVWKSKELHGRFFRALHGPDVDFQASVAWLRFGDLFGETEGFVFAIMDEVMMTNNYRRFIVKDGTVDICRACHRPGESIRHIISGCSRLANGEYLHRHNLVARIIHQQLALKYKLVESEVPYYRYMPDPVLENGHITLYWDRSIITDRTIVANKPDIVLVDRSERRAMIVDITIPHDENLVKAEKDKQIKYLDLAHEVVDMWEVDSAIIVPIVVTANGLIAKSLDQHLRRLSLGSWIKGLIQKAVLLDTARIVRKFLSLEP

SEQ ID NO: 10891 - protein, 1200 aa, Sesamia nonagrioides
MLTRSAARRARPPSPDSSLSSASPPPVSSPTVNAVMTPAAVVASSSSDEYFSPPTTPPPARRRGGRRPPDRLGPRGPSASDRVPAPGGSVQRMRWTQSINENVMRSYYGATEGGNNLTAYRVRMLSLFQVLEPAVNVSAQRLSDQVRVIQRNHMLDDVVLDRLRLESRNSHVTPASSLVAVQLNSVSPRPNHIDEEDDDRAISVSPQCNEKLRSALEDAFREYRSIPPELRPRLPRLPMHKKNKALVCALDSQLSNYLKDSKDLNDTHSILYCGAVAICRVAHVKFPDNDRATRPKSAVPAWQCRIERRIGETRALIGKLVSFREGNTRPRVMRFVRRAFSGTDTSTRDYLFRVTERIDFFKQKIYAWANRIRRYRRRVERYSQNRNFQSDERRVYRAWERSDQGVTDTCLPDDDATCSFWRNIWSVPVSHTEGSWTRVVERACDPVPEMGAITICPQDVARAVRPLPNWKSPGPDGLHNFWIKWFSGSHARLASQFQTALESGSLPQFLTTGVTHLLHKSGSTAEPRNYRPITCLPTVYKVLTSILKSKINTHIDSNSIMSASQNGCRSGSRGTKQLLLIDMAISQQVRRSRKDLSTCWIDYKKAYDSVPHTWLMRVLELYKVDATLRTFLMTCMRTWRTVLRYPGCRNIQRNSEPIRIERGIFQGDSLSPLWFCLALNPLSTLLEDSGLGYRLRRGGQVISHLLYMDDLKLFAHTDSQLKELLKITETFSSSIRMEFGVDKCAVMHVKRGEIMESVGTQLTSSINLRALSASETYKYLGMSEALGINVTDMKQSLKERFFGRLKKVLNSLLSGGNKVRAFNGWVMPVLMYSFGILKWTQTELDALDRRVRTLLTANRLHHPRSSVMRLYIPRKCGGRGFLNAKTLHNREICSLREYFLTTDVGMHRDVVAVDKGLTSLSLAKENWRKPVVLDTNDRMEVWKSKELHGRFFKALHGPDVDLQASVAWLRFGDLFGETEGFVCAITDEVMMTNNYRRFIVKDGTVDICRACHRPGESIRHIISGCSRLANGEYLHRHNLVARIIHQQLALKYNLVESEVPYYRYTPDPVLENDHITLYWDRSIITDRTIIANKPDIVLVDRSERRAMIVDITIPHDENLVKAEKDKQIKYLDLAHEVVDMWEVDSAIIVPIVVTANGLIAKSLDQHLRRLSLGSWIKGLIQKAVLLDTARIVRKFLSLEP

SEQ ID NO: 10892 - protein, 1077 aa, Sesamia nonagrioides
MLSLFQVLEPAVNVSAQRLSDQVRVIQRNHMLDDVVLDRLRLESRNSHVTPASSLVAAQLNSVSPRPNRVDEEDDDRAISVSPQCIEKLRSALEDAFCEYRSTPPELRPRLPRLPMHKKNKALVCALDSQLSYYLKDSKDLTDTHSILYCGAVAICRVAHVKFPDSDRATRPKSAVPAWQCRIERRIGETRALIGKLTSFREGNTRPRVMRFVRRAFSGTDTSTRDYLFRVTERIDFFKQKIYAWANCIRRYKRRVERYSQNRNFQSDERRVYRAWERSDQGVTDTCLPDDDAMCSFWRNIWSVPVSHTEGSWTRVVERACDPVSEMGAITICPQDVARAVRPLPNWKSPGPDGLHNFWIKWFTGSHARLASQFQTALESGSLPQFLTTGVTHLLHKSGSTAEPKNYRPITCLPTVYKVLTSILKSKINTHIDSNSIMSASQNGCRSGSRGTKELLLIDMAISQQVRRSRKDLSTCWIDYKKAYDSVPHTWLMRVLELYKVDATLRTFLMTCMRTWRTVLRYPGCRNIQRNSEPIRIERGIFQGDSLSPLWFCLALNPLSTLLEDSGLGYRLRRGGQVISHLLYMDDLKLFAHTDSQLKELLKITETFSSSIRMEFGVDKCAVMHVKRGEIMESVGTQLTSSINLRALSASETYKYLGMSEALGINVTDMKQSLKERFFGRLKKVLNSLLSGGNKVRAFNGWVMPVLMYSFGILKWTQTELDALDQRVRTLLTANRLHHPRSSVMRLYIPRKCGGRGFLNAKTLHNREVCSLREYFLETDVGMHRDVVAADKGLTPLSLAKENWRKPVVLDTNDRLEVWKSKELHGRFFRALHGPDVDFRASVAWLRFGDLFGETEGFVFAIMDEVMMTNNYRRFIVKDGTVDICRACHRPGESIRHIISGCSRLANGEYLHRHNLVARIIHQQLALKYNLVESEVPYYRYMPDPVLENGHITLYWDRSIITDRTIVANKPDIVLVDRSERRAMIVDITIPHDENLVKAEKDKQIKYLDLAHEVVDMWEVDSAIIVPIVVTANGLIAKSLDQHLRRLSLGSWIKGLIQKAVLLDTARIVRKFLSLEP

SEQ ID NO: 10893 - protein, 1197 aa, Sesamia nonagrioides
MLTRSAARRARPPSPDSLLSSASPPPASSATVSAVTTPAAAVASSSSDEYFSPPTTPPPARRRGGRRPPDRLGPRGPSASDRVPAPGGSVQRMRWTQSINENVMRSYYGATEGGNNLTAYRVRMLSLFQVLEPAVNVSAQRLSDQVRVIQRNHMLDDTVLDRLRNEMQSSRIIAHQSQTAEIPPQPTNYADEGSNDRATNVSTQCNEELINALEAAIREYRFTPAELRPRLPRLPMHNRNRALMAALDAQLSDYFDTCEDLTDTHSILYCAAVAACRVAHVKFPSDSRATRPKPVVPAWQHRIERRIGGARALIGKLICFREGNTRPRVMRFVRRAFAGTNISPQNYMARVTERIDFLKQKVYAWANRIRRYKRRVERYTQNRTFQSNERWVYRDWERPEQGVTDTCLPNDDAMCSFWRSIWSVPVSHTEGDWARDVERACDPIPEMGAITICSQDVACAVRPLPNWKSPGPDGLHNFWIKWFPRSHARLASQFQTALVSGSLPQFLTTGITHLLHKSGSTAEPKNYRPITCLPTVYKVLTSILKTKINKHIDSNSIMSASQNGCKSGSRGTKELLLIDMAISQQVRRSRKDLSTCWIDYRKAYDSVPHTWLMRVLELYKVDATLRTFLMSCMKTWRTVLRYPGCRNIQRNSEPIRIERGIFQGDSLSPLWFCLALNPLSTLLEDSGLGYRLRRGGQVISHLLYMDDLKLFAPNNSQLRELLKITETFSSSIRMEFGVDKCAVMHVKRGEIMESVGTQLTDSINLRALSASETYKYLGMSEALGINVTDMKQSLKERFFGRLKKVLNSLLSGGNKVRAFNGWVMPVLMYSFGILKWTQTELDALDQRVRTLLTANRLHHPRSSVMRLYIPRKCGGRGFLNAKTLHNREVCSLRDYFLVNDVGMHRDVVAADKGLTPLSLAKENWRKPVVLDTNDRMEVWKSKELHGRFFRALHGPDVDLQASVAWLRFGDLFGETEGFVFAIMDEVMMTNNYRRFIVKDGTVDICRACHRPGESIRHIISGCSRLANGEYLHRHNLVARIIHQQLALKYNLVESEVPYYRYTPDPVLENGYITLYWDRSIITDRTIVANKPDIVMVDRSERRAMIVDITIPHDENLVKAEKDKQIKYLDLAHEVVDMWEVDSAIIVPIVVTANGLIAKSLDQHLRRLSLGSWIKGLIQKAVLLDTARIVRKFLSLEP

SEQ ID NO: 10894 - protein, 1047 aa, Sesamia nonagrioides
MLDDVVLDRLRLESRNSHVTPASSLVAVQLNSVSPRPNHVDEEDDDRAISVSPQCNEKLRSALEDAFREYRSIPPELRPRLPRLPMHKKNKALVCALDSQLSNYLKDSKDLNDTHSILYCGAVAICRVAHVKFPDNDRATRPKSAVPAWQCRIERRIGETRALIGMLISFREGNTRPRVMRFVRRAFSGTDTSTRDYLFRVTECIDFFKQKIYAWANRIRRYRRRVERYSQNRNFQSDERRVYRAWERSDQGVTDTCLPDDDATCSFWRNIWSVPVSHTEGSWTRVVERACDPVPEMGAITICPQDVARAVCPLPNWKSPGPDGLHNFWIKWFSGSHARLASQFQTALESGSLPQFLTTGVTHLLHKSGSTAEPKNYRPITCLPTVYKVLTSILKSKINTHIDSNSIMSASQNGCRSGSRGTKELLLIDMAISQQVRSCRKDLSTCWIDYKKAYDSVPHTWLMRVLELYKVDATLRTFLMTCMRTWRTVLRYPGCRNIQRNSEPIRIERGIFQGDSLSPLWFCLALNPLSTLLEDSGLGYRLRRGGQVISHLLYMDDLKLFARTDSQLKELLKITETFSSSIRMEFGVDKCAVMHVKRGEIMESVGTQLTSSINLRALSASETYKYLGMSEALGINVTDMKQSLKERFFGRLKKVLNSLLSGGNKVRAFNGWVMPVLMYSFGILKWTQTELDALDRRVRTLLTANRLHHPRSSVMRLYIPRKCGGRGFLNAKTLHNREICSLREYFLTTDVGMHRDVVAVDKGLTPLSVPKENWRKPVVLDTNDRMEVWKSKELHGRFFKALHGPDVDLQASVAWLRFGDLFGETEGFVCAITDEVMMTNNYRRFIVKDGTVDICRACHRPGESIRHIISGCSRLANGEYLHRHNLVARIIHQQLALKYNLVESEVPYYRYTPDPVLENDHITLYWDRSIITDRTIIANKPDIVLVDRSERRAMIVDITIPHDENLVKAEKDKQIKYLDLAHEVVDMWEVDSAIIVPIVVTANGLIAKSLDQHLRRLSLGSWIKGLIQKAVLLDTARIVRKFLSLEP

SEQ ID NO: 10895 - protein, 1105 aa, Sesamia nonagrioides
MRWTQSINENVMRSYYGATEGGTNLTAYRVRMLSLFQVLEPAVNVSAQQLSDQVRVIQRNHMLDDTVLDRLRNEMQSSRVIAHQSQSAEIPPQPTNYADEGSNDRATNVSTQCNEELRNALEAAIREYRSISAELRPRLPRLPMHNRNRALMAALDAQLSNYIDTCEDLTDTHSILYCAAVAACRVAHVKFPSDSRATRPKPVVLAWQHRIERRIGGARALIGKLICFREGNTRPRVMRFVRRAFSGTNTSPQNYMARVTERIDFLKQKVYAWANRIRRYKRRVERYTQNRTFQSNERRVYRYWERPEQGVTDTCLPDDDAMCSFWRRIWSVPVSHTEGDWARDVERACDPIPEMGAITICPQDVAHAVRPIPNWKSPGPDGLHNFWIKWFSRSHARLASQFQTALVSGSLPQFLTTGITHLLHKSGSTAEPKNYRPITCLPTVYKVLTSILKTKINKHIDSNSILSASQNGCRSGSRGTKELLLIDMAISQQVRRSRKDLSTCWIDYKKAYDSVPHTWLMRVLELYKVDATLRTFLMTCMRTWRTVLRYPGCRNIQRNSEPIRIERGIFQGDSLSPLWFCLALNPLSTLLEDSGLGYRLRRGGQVISHLLYMDDLKLFAPNNSQLNELLKITEIFSSSIRMEFGVDKCAVMHVKRGEIMEPVGTQLTSSINLRALSASETYKYLGMSEALGINVTDMKQSLKERFFGRLKKVLNSLLSGGNKVRAFNGWVMPVLMYSFGILKWTQIELDALDQRVRTLLTANRLHHPRSSVMRLYIPRKCGGRGFLNAKALHNREICSLRDYFLETNVGMHRDVVAADKGLTPLSLAKENWRKPVVLDTNDRMEVWKSKELHGRFFRALHRPDVDFQASVAWLRFGDLFGETEGFVFAIMDEVMMTNNYRRFIVKDGTVDICRSCHRPGESIRHIISGCSRVANGEYLHRHNLVARIIHQQLALKYKLVELEVPYYRYMPDPVLENGHITLYWDRSIITDRTILANKPDIVLVDRSERRAMIVDITIPHDENLVKAEKDKQTKYLDLAHEVVDMWEVDSAIIVPIVVTANGLIAKSLDQHLRRFSLGSWIKGLIQKAVLLDTARIVRKFLSLEP

SEQ ID NO: 10896 - protein, 1108 aa, Sesamia nonagrioides
MRWTQSINENVMRSYYGATEGGNNLTAYRVRMLSLFQVLEPGVNVSAQRLSDQVRVIQRNHMLDDVVLDRLRLESRNSHVTPASSLVAVQLNSVSPRPNRVDEEDDDRAISVSPQCIEKLRSALEDAFCEYRSTPPELRPRLPRLPMHKKNKALVCALDSQLSYYLKDSKDLTDTHSILYCGAVAICRVAHVKFPDSDRATRPKSAVPAWQCRIERRIGETRALIGKLTSFREGNTRPRVMRFVRRAFSGTDTSTRDYLFRVTERIDFFKQKIYAWANRIRRYKRRVERYSQNRNFQSDERRVYRAWERSDQGVTDTCLPDDDAMCSFWRNIWSVPVSHTEGSWTRVVERACDPVPEMGAITICPQDVARAVRPLPNWKSPGPDGLHNFWIKWFSGSHARLASQFQTALESGSLPQFLTTGVTHLLHKSGSTAEPKNYRPITCLPTVYKVLTSILKSKINTHIDSNSIMSASQNGCRSGSRGTKELLLIDMAISQQVRRSRKDLSTCWIDYKKAYDSVPHTWLMRVLELYKVDATLRTFLMTCMRTWRTVLRYPGCRNIQRNSEPIRIERGIFQGDSLSPLSFCLALNPLSTLLEDSGLGYRLRRGGQVISHLLYMDDLKLFAHTDSQLKELLKITETFSSSIRMEFGVDKCAVMHVKRGEIMESVGTQLTSSINLRALSASETYKYLGMSEALGINVTDMKQSLKERFFGRLKKVLNSLLSGGNKVRAFNGWVMPVLMYSFGILKWTQTELDALDQRVRTLLTANRLHHPRSSVMRLYIPRKCGGRGFLNAKTLHNREVCSLREYFLETDVGMHRDVVAADKGLTPLSLAKENWRKPVVLDTNDRLEVWKSKELHGRFFRALHGPDVDFRASVAWLRFGDLFGETEGFVFAIMDEVMMTNNYRRFIVKDGTVDICRACHRPGESIRHIISGCSRLANGEYLHRHNLVARIIHQQLALKYNLVESEVPYYRYMPDPVLENGHITLYWDRSIITDRTIVANKPDIVLVDRSERRAMIVDITIPHDENLVKAEKDKQIKYLDLAHEVVDMWEVDSAIIVPIVVTANGLIAKSLDQHLRRLSLGSWIKGLIQKAVLLDTARIVRKFLSLEP

SEQ ID NO: 10897 - protein, 1044 aa, Sesamia nonagrioides
MLDDTVLDRLRNEMQSNRIIAHQSQTAEIPPQPTNYADEGSNDRVTNVSTQCNEELINALEAAIREYRFTPAELRSRLPRLPMHNRNRALMAALDAQLSDYFDTCEDLTDTHSILYCAAVAACRVAHVKFPSDSRATRPKPVVPAWQHRIERRISGARALIGKLICFREGNTRPRVMRFVRRAFSGTNTSPQNYMARVTERIDFLKQKVYAWANRIRRYKRRVERYTQNRTFQSNERWVYRAWERSDQGVTDTCLPDDDATCSFWRNIWSVPVSHTEGSWTRVVERACDPVPEMGAITICPQDVARAVRPLPNWKSPGPDGLHNFWIKWFSRSHARLASQFQTALESGSLPQFLTTGVTHLLHKSGSTAEPKNYRPITCLPTVYKVLTSILKSKINTHIDSNSIMSASQNGCRSGSRGTKELLLIDMAISQQVRRSRKDLSTCWIDYKKAYDSVPHTWLMRVLELYKVDATLRTFLMTCMRTWRTVLRYPGCRNIQRNSEPIRIERGIFQGDSLSPLWFCLALNPLSTLLEDSGLGYRLRRGGQVISHLLYMDDLKLFAHTDSQLKELLKITETFSSSIRMEFGVDKCAVMHVKRGEIMESVGTQLTSSINLRALSASETYKYLGMSEALGINVTDMKQSLKERFFGRLKKVLNSLLSGGNKVRAFNGWVMPVLMYSFGILKWTQTELDALDQRVRTLLTANRLHHPRSSVMRLYIPRKCGGRGFLNAKTLHNREVCSLREYFLETDVGMHRDVVAADKGLTPLSLAKENWRKPVVLDTNDRLEVWKSKELHGRFFRALYGPDVDFQASVAWLRFGDLFGETEGFVFAIMDEVMMTNNYRRFIVKDGTVDICRACHRPGESIRHIISGCSRLANGEYLHRHNLVARIIHQQLALKYKLVESEVPYYRYMPDPVLENGHITLYWDRSIITDRTILANKPDIVLVDRTERRAMIVDITIPHDENLVKAEKDKQIKYLDLAHEVVDMWEVDSAIIVPIVVTANGLIAKSLDQHLRRLSLGSWIKGLIQKAVLLDTARIVRKFLSLEP

SEQ ID NO: 10898 - protein, 1139 aa, Sesamia nonagrioides
MLTRSAARRPPDRLGPRGPSASDRVPAPGGSVQRMRWTQSINENVMRSYYGATEGGNNLTAYRVRMLSLFQVLEPAVNVSAQRLSDQVRVIQRNHMLDDTVLDRLRNEMQSSRIIAHQSQTAEIPPQPTNYADEGSNDRATNVSTQCNEELINALEAAIREYRFTPAEQRPRLPRLPMHNRNRALMAALDAQLSDYFDTCEDLTDTHSILYCAAVAACRVAHVKFPSDSRATRPKPVVPAWQRRIERRIGGARALIGKLICFREGNTRPRVMRFVRRAFAGTNISPQNYMARVTERIDFLKQKVYAWANRIRRYKRRVERYTQNRTFQSNERWVYRDWERPEQGVTDTCLPDDDAMCSFWRSIWSVPVSHTEGDWARDVERACDPIPEMGAITICPQDVACAVRPLPNWKSPGPDGLHNFWIKWFPRSHARLASQFQTALVSGSLPQFLTTGITHLLHKSGSTAEPKNYRPITCLPTVYKVLTSILKTKINKHIDSNSIMSASQNGCKSGSRGTKELLLIDMAISQQVRRSRKDLSTCWIDYRKAYDSVPHTWLMRVLELYKVDATLRTFLMSCMKTWRTVLRYPGCRNIQRNSEPIRIERGIFQGDSLSPLWFCLALNPLSTLLEDSGLGYRLRRGGQVISHLLYMDDLKLFAPNNSQLRELLKITETFSSSIRMEFGVDKCAVMHVKRGEIMESVGTQLTDSINLRALSASETYKYLGMSEALGINVTDMKQSLKERFFGRLKKVLNSLLSGGNKVRAFNGWVMPVLMYSFGILKWTQTELDALDQRVRTLLTANRLHHPRSSVMRLYIPRKCRGRSFLNAKTLHNREVCSLRDYFLVTDVGMHRDVVAADKGLTPLSLAKENWRKPVVLDTNDRMEVWKSKELHGRFFRALHGPDVDFQASVAWLRFGDLFGETEGFVFAIMDEVMMTNNYRRFIVKDGTVDICRACHRPGESIRHIISGCSRLANGEYLHRHNLVARIIHQQLALKYNLVESEVPYYRYTPDPVLENGYITLYWDRSIITDRTIVANKPDIVMVDRSERRAMIVDITIPHDENLVKAEKDKQIKYLDLAHEVVDMWEVDSAIIVPIVVTANGLIAKSLDQHLRRLSLGSWIKGLIQKAVLLDTARIVRKFLSLEP

SEQ ID NO: 10899 - protein, 1199 aa, Sesamia nonagrioides
MIVLTRSAARRARPPSPDSLLSSASPPPASSATVSAVTTPAAADASSSSDEYFSPPTTPPPARRRGGRRPPDRLGPRGPSASDRVPAPGGSVQRMRWTQSINENVMRSYYGATEGGNNLTAYRVRMLSLFQVLEPAVNVSAQRLSDQVRVIQRNHMLDDTVLDRLRNEMQSSRIIAHQSQTAEIPPQPTNYADEGSNDRATNVSTQCNEELINALEAAIREYRFTPAELRPRLPRLPMHNRNRALMAALDAQLSDYFDTCEDLTDTHSILYCAAVAACRVAHVKFPSDSRATRPKPVVPAWQHRIERRIGGARALIGKLICFREGNTRPRVMRFVRRAFAGTNISPQNYMARVTERIDFLKQKVYAWANRIRRYKRRVERYTQNRTFQSNERWVYRDWERPEQGVTDTCLPDDDAMCSFWRSIWSVPVSHTEGDWARDVERACDPIPEMGAITICPQDVACAVRPLPNWKSPGPDGLHNFWIKWFPRSHARLASQFQTALVSGSLPQFLTTGITHLLHKSGSTAEPKNYRPITCLPTVYKVLTSILKTKINKHIDSNSIMSASQNGCKSGSRGTKELLLIDMAISQQVRRSRKDLSTCWIDYRKAYDSVPHTWLMRVLELYKVDATLRTFLMSCMRTWRTVLRYPGCRNIQRNSEPIRIERGIFQGDSLSPLWFCLALNPLSTLLEDSGLGYRLRRGGQVISHLLYMDDLKLFAPNNSQLRELLKITETFSSSIRMEFGVDKCAVMHVKRGEIMESVGTQLTDSINLRALSASETYKYLGMSEALGINVTDMKQSLKERFFGRLKKVLNSLLSGGNKVRAFNGWVMPVLMYSFGILKWTQTELDALDQRVRTLLTANRLHHPRSSVMRLYIPRKCGGRGFLDAKTLHNREVCSLRDYFLVNDVGMHRDVVAADKGLTPLSLAKENWRKPVVLDTNDRMEVWKSKELHGRFFKALHGPDVDLQASVAWLRFGDLFGETEGFVFAIMDEVMMTNNYRRFIVKDGTVDICRACHRPGESIRHIISGCSRLANGEYLHRHNLVARIIHQQLALKYNLVESEVPYYRYTPDPVLENGYITLYWDRSIITDRTIVANKPDIVMVDRSERRAMIVDITIPHDENLVKAEKDKQIKYLDLAHEVVDMWEVDSAIIVPIVVTANGLIAKSLDQHLRRLSLGSWIKGLIQKAVLLDTARIVRKFLSLEP

SEQ ID NO: 10900 - protein, 1108 aa, Sesamia nonagrioides
MRWTQSINENVMRSYYGATEGGNNLTAYRVRMLSLFQVLEPAVNVSAQRLSDQVRVIQRNHMLDDVILDRLRLESRNSHVTPASSLVAVQLNSVSPRPNHVDEEDDDRAISVSPQCNEKLRSALEDAFCEYRSIPPELRPRLPRLPMHKKNKALVCALDSQLSNYLKDSKDLNDTHSILYCGVVAICRVAHVKFPDSDRATRPKSAVPAWQCRIERRIGETRALIGKLISFREGNTRPRVMRFVRRAFSGTDTSTRDYLFRVTERIDFFKQKIYAWANRIRRYKRRVERYSQNRNFQSDERRVYRAWERSDQGVTDTCLPDDDATCSFWRNIWSVPVSHTEGSWSRVVERACDPVPEMGAITICPQDVAHAVRPLPNWKSPGPDGLHNFWIKWFTRSHACLASQFQTALESGSLPQFLTTGVTHLLHKSGSTAEPKNYRPITCLPTVYKVLTSILKSKINTHIDSNSIMSASQNGCRSGSRGTKELLLIDMAISQQVRRSRKDLSTCWIDYKKAYDSVPHTWLMRVLELYKVDATLRTFLMTCMRTWRTVLRYPGCRNIQRNSEPIRIERGIFQGDSLSPLWFCLALNPLSTLLEDSGLGYRLRRGGQVISHLLYMDDLKLFAHTDSQLKELLKITETFSSSIRMEFGVDKCAVMHVKRGEIMESVGTQLTSSINLRALSASETYKYLGMSEALGINVTDMKQSLKERFFGRLKKVLNSLLSGGNKVRAFNGWVMPVLMYSFGILKWTQTELDALDRRVRTLLTANRLHHPRSSVMRLYIPRKCGGRGFLNAKTLHNREICSLREYFLTTDVGMHRDVVAVDKGLTPLSLAKENWRKPVVLDTNDRMEVWKSKELHGRFFTALHGPDVDLQASVAWLRFGDLFGETEGFVCAIMDEVMMTNNYRRFIVKDGTVDICRACHRPGESIRHIISGCSRLANGEYLHRHNLVARIIHQQLALKYNLVESEVPYYRYTPDPVLENDLITLYWDRSIITDRTIVANKPDIVLVDRSERRAMIVDITIPHDENLVKAEKDKQIKYLDLAHEVIDMWEVDSAIIVPIVVTANGLIAKSLDQHLRRLSLGSWIKGLIQKAVLLDTARIVRKFLSLEP

SEQ ID NO: 10901 - protein, 1200 aa, Sesamia nonagrioides
MLTRSAARRARSPPPDSSPSSASPPPVSSPTVNAVMTPAAAVALSSSDEYFSPPTTPPPVRRRGGRRPPDCLGPRGPPASDRAPATGGNVQRMKWTQSINENVMRAYFGATEGGSNLTAYRGRMLSLFQVLEPAVNVSAQRLSDQVRVIQRNHMLDDVVLDRLRLESRNSHVTPASSLVAVQLNSVPSRPNLVDEEDDDEAISVTPQCNEKVRSALEDAFREYRSTPPELRPRLPRLPMHKKNKALVCALDSQLSNYLKDSKDLADTHSILYCGAVAICRVAHVKFPDSDRATRPKPAVPAWQCRIERRIGETRALIGKLISFREGNTRPRVMRFVRRAFSGTDVSTRDYLLRVTERIDFLKQKIYAWANRIRRYRRRVERYSQNRNFQSDERWVYRAWERSDQGVTDTCLPDDDATRSFWRNIWSVPVSHTEGGWTRDVERACDPVPEMGAITICPQDVARAVRPLPNWKSPGPDGLHNFWIKWFSGSHACLASQFQTALESGSLPQFLTTGITHLLHKSGSTAEPKNYRPITCLPTVYKVLTSILKAKINTHIDSNSIMSASQNGCRNGSRGTKELLLIDMAISQQVRRSRKDLSTCWIDYKKAYDSVPHTWLMRVLELYKVDATLRTFLMTCMSQWRTVLRYPGCRNIQRNSEPIRIERGIFQGDSLSPLWFCLALNPLSTLLEDSGLGYRLRRGGQVISHLLYMDDLKLFAHTNSQLKELLKITETFSSAIRMEFGVDKCAVMHVQRGEIVESVGTQLTGSINLRSLSASETYKYLGMSEALGINVTDMKQSLKERFFGRLKKVLNSLLSGGNKVRAFNGWVMPVLMYSFGILKWTQTELDALDQRVRTLLTANRLHHPRSSVMRLYIPRKCGGRGFLNAKTLHNREVCSLREYFLKSDVGMHRDVVAVDKGLTPLSLAKENWRKPVVLETNDRMEVWQSKELHGRFFRALRGPDVDFQASVAWLRYGDLFGETEGFVCAIMDEVMMTNNYRKFIVKDGTVDICRACHRPGESIRHIISGCSRLANGEYLHRHNLVARIIHQQLALKYNLVESEVPYYRYMPDPVLENGHITLYWDRSIITDRTIVANKPDIVMVDRSERRAMIVDITIPHDENLVKAEKDKQIKYLDLAHEVVDMWEVDSAIIVPIVVTANGLIAKSLDQHLRRLSLGGWIKGLIQKAVLLDTARIVRKFLSLEP

SEQ ID NO: 10902 - protein, 1197 aa, Sesamia nonagrioides
MLTRSAARRARPPSPDSLLSSASPPPASSATVSAVTTPAAAVASSSSDEYFSPPTTPPPACRRGGRRPPDRLGPRGPSASDRVPAPGGSVQRMRWTQSINENVMRSYYGATEGGNNLTAYRVRMLSLFQVLEPAVNVSAQRLSDQVRVIQRNHMLDDTVLDRLRNEMQSSRIIAHQSQTAEIPPQPTNYADEGSNDRATNVSTQCNEELINALEAAIREYRFTPAELRPRLPRLPMHNRNRALMAALDAQLSDYFDTCEDLTDTHSILYCAAVAACRVAHVKFPSDSRATRPKPVVPAWQHRIERRIGGARALIGKLICFREGNTRPRVMRFVRRAFAGTNISPQNYMARVTERIDFLKQKVYAWANRIRRYKRRVERYTQNRTFQSNERWVYRDWERPEQGVTDTCLPDDDAMCSFWRSIWSVPVSHTEGDWARDVERACDPIPEMGAITICPQDVACAVRPLPNWKSPGPDGLHNFWIKWFPRSHARLASQFQTALVSGSLPQFLTTGITHLLHKSGSTAEPKNYRPITCLPTVYKVLTSILKTKINKHIDSNSIMSASQNGCKNGSRGTKELLLIDMAISQQVRRSRKDLSTCWIDYRKAYDSVPHTWLMRVLELYKVDATLRTFLMSCMKTWRTVLRYPGCRNIQRNSEPIRIERGIFQGDSLSPLWFCLALNPLSTLLEDSGLGYRLRRGGQVISHLLYMDDLKLFAPNNSQLRELLKITETFSSSIRMEFGVDKCAVMHVKRGEIMESVGTQLTDSINLRALSASETYKYLGMSEALGINVTDMKQSLKERFFGRLKKVLNSLLSGGNKVRAFNGWVMPVLMYSFGILKWTQTELDALDQRVRTLLTANRLHHPRSSVMRLYIPRKCGGRGFLNAKTLHNREVCSLRDYFLVNDVGMHRDVVAADKGLTPLSLAKENWRKPVVLDTNDRMEVWKSKELHGRFFRALHGPDVDLQASVAWLRFGDLFGETEGFVFAIMDEVMMTNNYRRFIVKDGTVDICRACHRPGESIRHIISGCSRLANGEYLHRHNLVARIIHQQLALKYNLVESEVPYYRYTPDPVLENGYITLYWDRSIITDRTIVANKPDIVMVDRSERRAMIVDITIPHDENLVKAEKDKQIKYLDLAHEVVDMWEVDSAIIVPIVVTANGLIAKSLDQHLRRLSLGSWIKGLIQKAVLLDTARIVRKFLSLEP

SEQ ID NO: 10903 - protein, 1080 aa, Drepana arcuata
MLLLFQELEPTVNVSAQRLSDQVRVIQRNHRLDDNVLDRLRSEMQGNHVTSAPAQSAAQSLVSSITLPQPSYTDMEGGDRPLNAGTQYNELVRSTLKDAVQQYKSVSPGLRPRLPRLPMHKKNLALVATLDSLLPEYLDYCEDLTETHQILYCAAIAACRLAHVNFPNHERTGQPNPAVPIWQRRIQRRIDDARVLIGKLSCFREGNTRPRVMRYVRKAFSGSDINPRDYVACVTERIDYLKQKVYAWANRIRRYKQRVDRYTQNRMFQNDQKWVYRGWERTEQGVSDEQLPDNDAVSTFWSNIWSVPVTHTEGDWIEEIKRVCESIQEMGEVTISPKDVADAVQSLSNWKSPGPDGLHNFWLKWLRTSHARLASQFQSSLESGSLPSFLTTGITHLLHKSGSTMDPKNHRPITCLPTMYKLLTSILRAKISMHINNNVIMSASQNGCKNGSRGTKELLLIDMTISQQVRRSRKNLSTCWIDYKKAYDSVPHTWLMRVLELYKVNSTLRIFLKSVMGQWKTVLHYPRGRQIPGNDEPIRIERGIFQGDSLSPLWFCLALNPLSTLLESSGLGYRLRRGGQVISHLLYMDDLKLFAPSELQLTELLNVTQNFSNSIRMEFGIDKCAVMHVKRGNIVESVGIQLSDSINIRSLTPTENYKYLGMSEALGIHEADMKKSLLDRFYGRLTKVLKSLLTGGNKVRAYNGWVMPVLMYSFGILKWTQRELEITDRKVRTLLTSYRMHHPRSSVMRLYIPRKCGGRGFLNAKTLHNREVYKLREYFRSTEVGMHRDVVAVDKGLTALSLAKENWRKPVVLTTNDRREIWQSKELHDRFYRALHGPDVDLEASLAWLRFGDLFGETEGFVCAIMDEVMMTNNYRKYILRDGTVDICRACHRPGESLRHIISGCSHLANGEYLHRHNQVAKIIHQQLALKYNLVDSEVPYYKYSPDPVLENGHVTLYWDRSIIIDRCITANKPDIVLIDRLERRTMIVDITVPHDGNLVKAEKDKQIKYLDLAHEIVSMWDVDSAIIVPIVITANGLMAKSLDQHLKRLSLDGWIKCLIQKAVLLETARIVRRFLSLGP

SEQ ID NO: 10904 - protein, 1198 aa, Apamea monoglypha
MLTRSAARRARPPPPDSSLSSASPPPVPSLTVSAVTTPAAVVASSSSDEYFSPPTTPPPVRRRGGRRPPDGLGPRGPPASDRVPAPGGSVQRMRWTQSINENVMRSYYGATEGGNNLTAYRVRMLSLFQVLEPAVNITAQRLSDQVRVIQRNHMLDDTVLDRLRSEMQSSHVIAHQSQTAAVLPQSNTSLADEGSNDMATNVSIQCNEELRNALEGAIREYRFMSPELRPRLPRLPMHNKNRALVAVLDAQLSSHFDFCEDLTDTHSILYCAAVAACRVAHVKFASDSEATRPKPAIPAWQCRIERRIGGARALIGKLICFREGNTRPRVMRFVRRAFLGTDISSQDYLSRVTERIDFLKQKVYAWANRIRRYKRRVERYTQNRTFQSDERWVYRGWERPDQSVADTCLPDDDAMCSFWRSIWSAPVSHTEGDWTGKIERACELIPEMGAITICPQDVARAVRPLPNWKSPGPDGLHNFWIKWFQRSHAPLAAQFQSALESGLLPQFITTGITHLLHKSGSTADPKNYRPITCLPTIYKVLTSILRAKINKHIDSNSIMSVSQNGCRNGSRGTKELLLIDMAISQQVRRSRKDLSTCWIDYKKAYDSVPHTWLMRVLELYKVDTTLRTFLMTCMGQWRTVLRYPGCRNIQRNSEPIRIERGIFQGDSLSPLWFCLALNPLSTLLDDSGLGYRLRRGGQVISHLLYMDDLKLFAPNNLQLMKLLKITETFSSAIRMEFGVDKCAVMHVKRGEIVESVGTQLSDFTNLRALSAAETYKYLGMSEALGINVTDMKQSLKERFFGRLKKVFNSLLSGGNKVRAFNSWVMPVLMYSFGILKWTQTELEALDRRVRTLLTANRMHHPRSSVMRLYIPRKCGGRGFLNAKTLHNREICSLREYFLETDVGMHRDVVAVDKGLTPLSLAKENWRKPVVLDTNDRMEVWQSKELHGRFYRALHGPDVDLLASVAWLRFGDLFGETEGFVCAIMDEVMMTNNYRRFIVKDGTVDICRACHRPGESIRHIISGCSRLANGEYLHRHNLVARIIHQQLALKYNLVESEVPYYRYVPDPVLENGNITLYWDRSIITDRTIVANKPDIVVVDRSERRAMIVDITVPHDENLVKAEKDKQIKYLDLAREVVDMWHVDSAIIVPIVVTANGLIAKSLDQHLRRLSLGSWIKGLIQKAVLLDTARIVRRFLSLEP

SEQ ID NO: 10905 - protein, 1198 aa, Apamea monoglypha
MLTRSAARRAHLPSPDSSLSSASPPPVPSPTVSAVTTPAAVVASSSSDEYFSPPTTPPPARRRGGRRPPDGLGPRGPLASDRVPAPGGSVQRMRWTRSINENVMRSYYGATEGGNNLTAYRVRMLSLFQVLEPAVNVSAQRLSDQVRVIQRNHMLDDTVLDRLRSEMQSSHVIAPQSQTAAVLPQSNTSHADEGSNDRATNVSIQCNEELRNALEGAIREYRFMSPELRPRLPRLPMHNKNRALVAVLDAQLSSHFDACEDLTDTHSILYCAAVAACRVAHVKFDSDSRATRPKPAIPAWQCRIERRIGGARALIGKLICFREGNTRPRVMRFVRRAFLGTDISSQDYLSRVTERIDFLKQKVYAWANRIRRYKRRVERYTQNRTFQSDERWVYRGWERPDQDVADTCLPDDDAMCSFWRSIWSAPVSHTEGDWAREVERACDPIPEMEAITICPQDVARAVRPLPNWKSPGPDGLHNFWIKWFTRSHARLASQFQTALESGSLPQFLTTGVTHLLHKSGSTAEPKNYRPITCLPTVYKVLTSILRAKINKHIDTNSIMSASQNGCKNGSRGTKELLLIDMAISQQVRRSRKDLSTCWIDYKKAYDSVPHTWLMRVLDLYKVDATLRTFLMSCMGQWRTVLRYPGCRNIQRNSEPIRIERGIFQGDSLSPLWFCLALNPLSTLLEDSGLGYRLRRGGQVISHLLYMDDLKLFAPNNLQLMELLKVTETFSSDIRMEFGVDKCAVMHVKRGEIVESVGTQLSDSTNLRALSVSETYKYLGMSEALGINVTDMKQSLKERFFGRLKKVLNSLLSGGNKVRAFNSWVMPVLMYSFGILKWTQTELDALDRRVRTLLTANRMHHPRSSVMRLYIPRKCGGRGFLNAKTLHNREICSLREYFLETDVGMHRDVVAVDKGLTPLSLAKENWRKPVVLDTNDRMEVWQSKELHGRFYRALHGPDVDLLASVAWLRFGDLFGETEGFVCAIMDEVMMTNNYRRFIVKDGTVDICRACHRPGESIRHIISGCSRLANGEYLHRHNLVARIIHQQLALKYSLVESEVPYYRYVPDPVLENGHITLYWDRSIITDRTIVANKPDIVVVDRSERRAMIVDITVPHDENLVKAEKDKQIKYLDLAREVVDMWDVDSAIIVPIVVTANGLIAKSLDQHLRRLSLGSWIKGLIQKAVLLDTARIVRRFLSLEP

SEQ ID NO: 10906 - protein, 1032 aa, Apamea monoglypha
MQSSHVIAPQSQTAAVLPQSNTSHADEGSNDRATNVSIQCNEELRNALEGAIREYRFMSPELRPRLPRLPMHNKNRALVAVLDAQLSSHFDACEDLTDTHSILYCAAVAACRVAHVKFDSDSRATRPKPAIPAWQCRIERRIGGARALIGKLICFREGNTRPRVMRFVRRAFLGTDISSQDYLSRVTERIDFLKQKVYAWANRIRRYKRRVERYTQNRTFQSDERWVYRGWERPDQDVADTCLPDDDAMCSFWRSIWSAPVSHTEGDWAREVERACDPIPEMEAITICPQDVARAVRPLPNWKSPGPDGLHNFWIKWFTRSHARLASQFQTALESGSLPQFLTTGVTHLLHKSGSTAEPKNYRPITCLPTVYKVLTSILRAKINKHIDTNSIMSASQNGCKNGSRGTKELLLIDMAISQQVRRSRKDLSTCWIDYKKAYDSVPHTWLMRVLDLYKVDATLRTFLMSCMGQWRTVLRYPGCRNIQRNSEPIRIERGIFQGDSLSPLWFCLALNPLSTLLEDSGLGYRLRRGGQVISHLLYMDDLKLFAPNNLQLMELLKVTETFSSAIRMEFGVDKCAVMHVKRGEIVESVGTQLSDSTNLRALSVSETYKYLGMSEALGINVTDMKQSLKERFFGRLQKVLNSLLSGGNKVRAFNSWVMPVLMYSFGILKWTQTELDALDRRVRTLLTANRMHHPRSSVMRLYIPRKCGGRGFLNAKTLHNREICSLREYFLETDVGMHRDVVAVDKGLTPLSLAKENWRKPVVLDTNDRMEVWQSKELHGRFYRALHGPDVDLLASVAWLRFGDLFGETEGFVCAIMDEVMMTNNYRRFIVKDGTVDICRACHRPGESIRHIISGCSRLANGEYLHRHNLVARIIHQQLALKYSLVESEVPYYRYVPDPVLENGNITLYWDRSIITDRTIVANKPDIVVVDRSERRAMIVDITVPHDENLVKAEKDKQIKYLDLAREVVDMWDVDSAIIVPIVVTANGLIAKSLDQHLRRLSLGSWIKGLIQKAVLLDTARIVRRFLSLEP

SEQ ID NO: 10907 - protein, 1198 aa, Apamea monoglypha
MLTRSAARRARLPSPDSSLSSASPPPVPSPTVSAVTTPAAVVASSSSDEYFSPPTTPPPARRRGGRRPPDGLGPRGPLASDRVPAPGGSVQRMRWTRSINENVMRSYYGATEGGNNLTAYRVRMLSLFQVLEPAVNVSAQRLSDQVRVIQRNHMLDDTVLDRLRSEMQSSHVIAPQSQTAAVLPQSNTSHADEGSNDRATNVSIQCNEELRNALEGAIREYRFMSPELRPRLPRLPMHNKNRALVAVLDAQLSSHFDACEDLTDTHSILYCAAVAACRVAHVKFDSDSRATRPKPAIPAWQCRIERRIGGARALIGKLICFREGNTRPRVMRFVRRAFLGTDISSQDYLSRVTERIDFLKQKVYAWANRIRRYKRRVERYTQNRTFQSDERWVYRGWERPDQSVADTCLPDDDAMCSFWRSIWSAPVSHTEGDWTGKIERACELIPEMGAITICPQDVARAVRPLPNWKSPGPDGLHNFWIKWFQRSHAPLAAQFQSALESGLLPQFITTGITHLLHKSGSTADPKNYRPITCLPTIYKVLTSILRAKINKHIDSNSIMSVSQNGCRNGSRGTKELLLIDMAISQQVRRSRKDLSTCWIDYKKAYVSVPHTWLMRVLELYKVDTTLRTFLMTCMGQWRTVLRYPGCRNIQRNSEPIRIERGIFQGDSLSPLWFCLALNPLSTLLDDSGLGYRLRRGGQVISHLLYMDDLKLFAPNNLQLMKLLKITETFSSAIRMEFGVDKCAVMHVKRGEIVESVGTQLSDFTNLRALSAAETYKYLGMSEALGINVTDMKQSLKERFFGRLKKVFNSLLSGGNKVRAFNSWVMPVLMYSFGILKWTQTELEALDRRVRTLLTANRMHHPRSSVMRLYIPRKCGGRGFLNAKTLHNREICSLREYFLETDVGMHRDVVAVDKGLTPLSLAKENWRKPVVLDTNDRMEVWQSKELHGRFYRALHGPDVDLLASVAWLRFGDLFGETEGFVCAIMDEVMMTNNYRRYIVKDGTVDICRACHRPGESIRHIISGCSRLANGEYLHRHNLVARIIHQQLALKYSLVESEVPYYRYVPDPVLENGNITLYWDRSIITDRTIVANKPDIVVVDRSERRAMIVDITVPHDENLVKAEKDKQIKYLDLAREVVDMWDVDSAIIVPIVVSANGLIAKSLDQHLRRLSLGSWIKGLIQKAVLLDTARIVRRFLSLEP

SEQ ID NO: 10908 - protein, 1196 aa, Furcula furcula
MLTRHKARLRPPDSSPRSASQPPAPSTGSAPAAVASSESDEYFSPPSSPPPVCRQRGRPPRNLGLLGQPAPNRVPVPGGVVRRMKWTPSINENVMRAYYKATEGGTNLTAYRDRMLSLFQALEPAVNVSAQRLSDQVRAIQRGHMLDDAVLDRLRSEVQGGRVVPCIPSSQAVAPAVNAAPAPRLAAISGDDRDDMSTNISTNVSTQLRSTLEDVVREYRTMPQGLRPRLPRLPMHKRNRALVCALDSLLSSYFDSSEDLADAHSLLYCAAMTACRVARVKFPNSDAATRPRPAVPAWQCRIERRIGEARVLIGKLTCFREGNTRPRVMRFVRCAFSGTGIDPREYPSRVTERIDFLKQKVCAWANRIRRYRARVDRYSQNNMFQRDQRWVYRSWERPSQIGGEVLRPDDDAMIRFWRNIWSVPVTHSEGDWIGDVRQVCEPIPEMGAITIRPQDVADAVRPLPNWKAPGPDGLHNFWLKWLRSSHACLASLFQSAVESGSLPEFLTTGITHLLHKTNSTADPKNYRPITCLPTVYKTLTSILTAKIYRHVESNSIMSASQNGCRSGARGTKELLLIDMAICQQARRNRKDLSTCWIDYKKAYDSVPHTWLMRVLELYKVNTTLRTFLASCMRQWRTVLLYPGSRQTLGDGEPIRIERGIFQGDSLSPLWFCLALNPLSTLLKSSGLGYRLRRGGQVISHLLYMDDLKLFAPTEVQLMGLLKVTETFSSSIRMEFGVDKCAVMHVKRGRLVESRSVQLSDSTDLRTLSATETYKYLGMSQALGINETDMKQSLRERFLGRLRKVLKSLLSGGNRVRAYNGWVMPVLMYSFGILKWTQTELDTLDRTVRTLLTAYRMHHPRSSVMRLYIPRKCGGRGFLNAKTLHNREIYNLREYFLHCGGEMHTDVVAVDSGLTPLSLAKGNWRKPVVLTTGDREAVWQSKELHGRFYRALHGPDVDFSASVAWLRFGDLFGETEGSVCAIMDEVVMTNNYRKYILRDGTIDICRACHRPGESLRHIISGCSRLANGEYLHRHNQVARIIHQQLALKYRLVTSEVPYYRYVPEPVLEDGHISLYWDRSIITDRTIVANRPDIVLIDRTERRAMIVDITVPHDENLVKAEKDKECKYLDLAHEVVDLWDIDKAIIVPIVVSAHGLMAKSLDKHLKRLKLDGWIKGHMQKAVLLETARIVRKFLSLEP

SEQ ID NO: 10909 - protein, 1196 aa, Furcula furcula
MLTRNKARMRPPGSPPLSASQSSRLNAEADGTPAAVASSESDEYFSPPTSPPPVCRRRGRPPRDMGRLGQPAPNRVLAPGGVVRRMKWTSSINESVMRAYYEATEGGTNLTAYRNRMLSLFQALEPAVNVSAQRLSDQVRAIQRGHMLDGPVLDRLRSEVQGSRVVPCIPSSQAVAPVVNTALVLRLAANSDDDRDDMTTDVSTNVSTQLRSTLEDVVREYRTMPQSLRPRLPRLPMHRRNRALVCALDSLLSSYFDSSEDLADAHALLYCAAITACRVARVKFPDAATRPKPAVPAWQYRIERRIGEARVLIGKLTCFREGNTRPRVMRFVRRAFSGTGIDPREYLSHVTERIDFLKQKVCAWANRVRRYRARVDRYSQNNMFQRDQRWVYRSWERPSQTVGEVQRPDDDAMIRFWRNIWSVPVAHSEGDWIGDVEEVCEPLPEMGPITIGPQDVADAVRPLPNWKAPGPDGLHNFWLKWLPSSHVCLASLFQSALESGSLPEFMTTGITHLLHKTDSTTNPKNYRPITCLPTVYKTLTSILRAKIYRHVEDNSIMSSSQNGCKSGARGTKELLLIDMAICQQARRNRKDLSTCWIDYKKAFDSVPHTWLMRVLELYKVNTTLRTFLASCMRQWRTVLLYPGSRQTLGNGDPIRIERGIFQGDSLSPLWFCLALNPLSTLLKSSGLGCRLRRGGQVISHLLYMDDLKLFAPTELQLTGLLKVTETFSNSIRMEFGVDKCAVMHVKRGRMVESRSVQLSDSTDLRTLSATETYKYLGMSQALNINETDMKQSLRERFLGRLRKVLKSLLSGGNKVRAYNGWVMPVLMYSFGILKWTQTELDALDRTVRTLLTTYRMHHPRSSVMRLYIPRKCGGRGFLNAKTLHNREIYNLREYFLHCGGEMHTDVVAVDNGLTPLSLAKGNWRKPVVLTTGDREAVWQSKELHGRFYRALHGPDVDFSASVAWLRFGDLFGETEGFVCAIMDEVVMTNNYRKYILRDGTIDICRACHRPGESLRHIISGCSRLANGEYLHRHNQVARIIHQQLALKYRLVTSEVPYYRYVPEPVLEDGHITLYWDRSIITDRTIVANKPDIVLIDRTERRAMIVDVTVPHDENLVKAEKDKQCKYLDLAHEVVDIWDIDNAIIVPIVVSAHGLMAKSLDKHLKRLTLDGWIKGQMQKAVLLETARIVRKFLSLEP

SEQ ID NO: 10910 - protein, 1196 aa, Furcula furcula
MLTRNRAHPRPPDSSPRSASQPLGPSADGSLAAVASSGSDEYFSPPTSPPPVRRRRGRPPRVLGSLEQPAPNRVLAPGGVVRRMRWTSSINENVMRAYYEATERGTNLTAYRLRMLSLFQALEPAVNVSAQRLSDQVRAIQRGHMLDDAVLDRLRSEVQGSRVAPCIPSSQAVAPAVNILPAPRPATNSDDDRDDMTTDVSTNLNTQLRSTLEDVVREYRTMPLNLRPRLPRLPMHKRNRALVCALDSLLSSYFDSSEDLADAHSLLYCAAMTACRVARVKFPSTDAATRPRPAVPAWQFRIECRIGEARVLIGKLNCFREGNTRPRVMRFVRRAFSGTGIDPREYLSRVTERIDFLKQKVCAWANRIRRYKARVDRYSQNNMFQRDQRWVYRSWERSSQIEGDGRRPDDSAMTTFWRNIWSVPVTHSEGDWMRDVEQICEPLPEMGAITIRPQDVADAVRPMPNWKAPGPDGLHNFWLKWIRSSHICLASLFQSALESGSLPEFMTMGITHLLHKTSSTTDPKNYRPITCLPTVYKTLTSILRAKIYRHVEDNSIMSASQNGCRSGARGTKELLLIDMAICQQARRNRKDLSTCWIDYKKAYDSVPHTWLMRVLELYKVNPTLRTFLASCMRQWRTVLLYPGSRQILGNGDPIRIERGIFQGDSLSPLWFCLALNPLSTLLRGSGLGCRLRRGGQVISHLLYMDDLKLFAPTELQLMGLLKVTETFSNSISMEFGVDKCAVMHVKRGRMVESRSVQLLDTTDLRTLSATETYKYLGMSQALGINEADMKQSLRERFLGRLRKVLKSLLSGGNRVRAYNGWVMPVLMYSFGILKWTQTELDTLDRTVRTLLTTYRMHHPRSSVMRLYIPRKCGGRGFLNAKTLHNREICNLREYFLHCGGVMHTDVVAVDNGLTPLSLAKGNWRKPVVLTTGNREAVWQSKELHGRFYRALHGPDVDFSASVAWLRFGDLFGETEGFVCAIMDEVVMTNNYRKYILRDGTIDICRACHRPGESLRHIISGCSRLANGEYLHRHNQVARIIHQQLALKYRLVMSEVPYYRYVPEPVLEDGHITLYWDRSIITDRTIVANKPDIVLIDRNERRAMIVDVTVPHDENLVKAEKDKECKYLDLAHEVVDMWDIDRAIIVPIVVSAHGLMAKSLDKHLKRLTLGGWIKGQMQKAVLLETARIVRRFLSLEP

SEQ ID NO: 10911 - protein, 1200 aa, Furcula furcula
MLTRSRNKARLRPPDSSPRSASQSPQVNQEANGTPAPVASSESDEYFSPPTSPPPVRRRRGRPPRELGLLEQPAPNRVLAPGGVVRRMRWTSSINENVMRAYYEATEGGTSLTAYRNRMLSLFQALEPAVNVSAQRLSDQVRAIQRSHMLDGAVLDRLRSEVQGSRVAPCTSSSQAVAPVVNTAPAPRLVAISDDDRDDITTNVSTNISTQLRSTLEDVVREYRTMPCGLRPRLPRLPMHKRNRALVCALDSLLSSYFDSSEDLADAHSLLYCAAMTACRVARVKLQNTDAATRPRPAVPAWQCRIERRIGEARVLIGKLTCFREGNTRPRVMRFVRRAFSGTGIDPREYLSRVAERIDFLKQKVCAWASRIRRYRARADRYFQNNMFQRDQRWVYRSWERPSQTEGDVRRPDDDAMATFWRNIWSVPVTHSEGDWIRDVEQVCEPLSEMGAITIWPQDVADAVRLLPNWKAPGPDGLHNFWLKSIRSSHICLASLFQSALESGSLPEFMTTGITHLLHKTNSTTDPKNYRPITCLPTVYKTLTSILRTKIYRHVEDNSIMSASQNGCRSGARGTKELLLIDMAICQQARRNRKDLSTCWIDYKKAYDSVPHTWLMRVLELYKVNATLRTFLASCMRQWRTVLRYPGSRQTLGDGEPIRIERGIFQGDSLSPLWFCLALNPLSTLLKSSGLGYRLRRGGQVISHLLYMDDLKLFAPTELQLMGLLRVTETFSNSIRMEFGVDKCAVMHVKRGRIVESRSVQLSDSTDLKTLSATETYKYLGMSQALGINETDMKQSLRDRFLGRLRKVLKSLLSGGNRVRAYNGWVMPVLMYSFGILKWTQTELDTLDRTVRTLLTTYRMHHPRSSVMRLYIPRKCGGRGFLNAKTLHNREIYNLREYFLHCGGEMHTDVVAVDNGLTPLSLAKGNWRKPVVLTTGDREAVWQSKELHGRFYRALHGPDVDFSASVAWLRFGDLFGETEGFVCAIMDEVVMTNNYRKYILRDGTIDICRACHRPGESLRHIISGCSRLANGEYLHRHNQVARIIHQQLALRYRLVTSEVPYYRYVPEPVLEDGHITLYWDRSIITDRTIVANRPDIVLIDRTERRAMIVDVTVPHDENLVKAEKDKECKYLDLAHEVVDMWDIDKAIIVPIVVSAHGLMAKSLDKHLKRLTLDGWIKGQIQKAVLLETARIVRRFLSLEP

SEQ ID NO: 10912 - protein, 1196 aa, Furcula furcula
MLTRNRAHPRPPDSSPRSASQPLGPSADGSLAAVASSGSDEYFSPPTSPPPVRRRRGRPPRVLGSLEQPAPNRVLAPGGVVRRMRWTSSINENVMRAYYEATERGTNLTAYRLRMLSLFQALEPAVNVSAQRLSDQVRAIQRGHMLDDAVLDRLRSEVQGSRVAPCIPSSQAVAPAVNIVPAPRPATNSDDDRDDMTTDVSTNLNTQLRSTLEDVVREYRTMPLNLRPRLPSLPMHKRNRALVCALDSLLSSYFDSSEDLADAHSLLYCAAMTACRVARVKFPSTDAATRPRPAVPAWQFRIECRIGEARVLIGKLNCFREGNTRPRVMRFVRRAFSGTGIDPREYLSRVTERIDFLKQKVCAWANRIRRYKARVDRYSQNNMFQRDQRWVYRSWERSSQIEGDGRRPDDSAMTTFWRNIWSVPVTHSEGDWMRDVEQICEPLPEMGAITIRPQDVADAVRPMPNWKAPGPDGLHNFWLKWIRSSHICLASLFQSALESGSLPEFMTMGITHLLHKTSSTTDPKNYRPITCLPTVYKTLTSILRAKIYRHVEDNSIMSASQNGCRSGARGTKELLLIDMAICQQARRNRKDLSTCWIDYKKAYDSVPHTWLMRVLELYKVNPTLRTFLASCMRQWRTVLLYPGSRQILGNGDPIRIERGIFQGDSLSPLWFCLALNPLSTLLRGSGLGCRLRRGGQVISHLLYMDDLKLFAPTELQLMGLLKVTETFSNSISMEFGVDKCAVMHVKRGRMVESRSVQLLDTTDLRTLSATETYKYLGMSQALGINETDMKQSLRERFLGRLRKVLKSLLSGGNRVRAYNGWVMPVLMYSFGILKWTQTELDTLDRTVRTLLTTYRMHHPRSSVMRLYIPRKCGGRGFLNAKTLHNREICNLREYFLHCGGVMHTDVVAVDNGLTPLSLAKGNWRKPVVLTTGNREAVWQSKELHGRFYRALHGPDVDFSVSVAWLRFGDLFGETEGFVCAIMDEVVMTNNYRKYILRDGTIDICRACHRPGESLRHIISGCSRLANGEYLHRHNQVARIIHQQLALKYRLVMSEVPYYRYVPEPVLEDGHITLYWDRSITTDRTIVANKPDIVLIDRNERRAMIVDVTVPHDENLVKAEKDKECKYLDLAHEVVDMWDIDRAIIVPIVVSAHGLMAKSLDKHLKRLTLGGWIKGQMQKAVLLETARIVRRFLSLEP

SEQ ID NO: 10913 - protein, 1196 aa, Furcula furcula
MLTRHKARLRPPDSSPRSASQPPAPSTGSAPAAVASSESDEYFSPPSSPPPVCRQRGRPPRNLGLLGQPAPNRVPVPGGVVRRMKWTPSINENVMRAYYKATEGGTNLTAYRDRMLSLFQTLEPAVNVSAQRLSDQVRAIQRGHMLDDAVLDRLRSEVQGGRVVPCIPSSLAVAPAVNAAPAPRLAAISGDDRDDMSTNISTNVSTQLRSTLEDVVREYRTMPQGLRPRLPRLPMHKRNRALVCALDSLLSSYFDSSEDLADAHSLLYCAAMTACRVARVKFPNSDAATRPRPAVPAWQCRIERRIGEARVLIGKLTCFREGNTRPRVIRFVRCAFSGTGIDPREYPSRVTERIDFLKQKVCAWANRIRRYRARVDRYSQNNMFQRDQRWVYRSWERPSQIGGEVLRPDDDAMIRFWRNIWSVPVTHSEGDWIGDVRQVCEPIPEMGAITIRPQDVADAVRPLPNWKAPGPDGLHNFWLKWLRSSHACLASLFQSAVESGSLPEFLTTGITHLLHKTNCTADPKNYRPITCLPTVYKTLTSILRAKIYRHVESNSIMSASQNGCRSGARGTKELLLIDMAICQQARRNRKDLSTCWIDYKKAYDSVPHTWLMRVLELYKVNTTLRTFLASCMRQWRTVLLYPGSRQTLGDGEPIRIERGIFQGDSLSPLWFCLALNPLSTLLKSSGLGYRLRRGGQVISHLLYMDDLKLFAPTEDQLMGLLKVTETFSSSIRMEFGVDKCAVMHVKRGRLVESRSVQLSDSTDLRTLSATETYKYLGMSQALGINETDMKQSLRERFLGRLRKVLKSLLSGGNRVRAYNGWVMPVLMYSFGILKWTQTELDTLDRTVRTLLTAYRMHHPRSSVMRLYIPRKCGGRGFLNAKTLHNREIYNLREYFLHCGGEMHTDVVAVDSGLTPLSLAKGNWRKPVVLTTGDREAVWQSKELHGRFYRALHGPDVDFSASVAWLRFGDLFGETEGSVCAIMDEVVMTNNYRKYILRDGTIDICRACHRPGESLRHIISGCSRLANGEYLHRHNQVARIIHQQLALKYRLVTSEVPYYRYVPEPVLEDGHITLYWDRSIITDRTIVANRPDIVLIDRTERRAMIVDVTVPHDENLVKAEKDKECKYLDLAHEVVDLWDIDKAIIVPIVVSAHGLMAKSLDKHLKRLTLDGWIKGQMQKAVLLETARIVRKFLSLEP

SEQ ID NO: 10914 - protein, 868 aa, Arctia plantaginis
MRFVKQAFLGTTIGPQQYMSCVTERIDFLKQKIYAWANRLRRYKKRIDRYNQNRMFQRNEKWVYRKWEEPDPCVSHGHLPDENVTHTFWRNVWSVPVTHIEGDWLRDVRRSCESITPMEPVIIDKDDVSCVVRSLPNWKSPGLDGLHNFWLKWFRSSHACLASQFQAALDSGSLPQFLTTGITHLLYKSGSVMDPKNFRPITCLPTMYKLLTSILRLKITLHINNNSIMSVSQNGCRSGSRGTKDLLIIDRAISQQVRRNRKSLATCWIDYKKAYDSVPHTWLLRVLELYKIDTTLCTFLKSCMGQWRTALRYPGCRQTTVIDAPIKIERGIFQGDSLSPLWFCLALNPLSTLLEGSGLGYRLQKDDQVISHLLYMDDLKLLAPTKLQLSALLKVTENFSNSIKMEFGVDKCAVMYVKKGEIVESEGIELSDSTKLRSLSATETYKYLGISQSLGIPESDMKQTLQERFFGRLKKVLKSLLSGGNKVRACNGWVMPILMYSFGILKWTQTELDALDRRVRTLLTAFRMHHPRSSVMRLYIPRKLGGRGLLNIKTLHNREICNLREYFLHTDVGMHRNVVAVDIGFTPLALAKENWRKPVVFSTNDRREVWKGKELHGRFYRALNGSNIDFKASTTWLRYGDLFGETEGFVCAIMDEVIMTNNYRKYILKDGTVDICRACHRPGESIRHIISGCSRLANGEYLHRHNQVARIVHQQLALKYHLVNLEVPYYRYVPDPVLENGRATLYWDRSIITDRTIVANKPDIVVIDRLERRAMIVDIAVPHDENLVKVEKEKQIKYLDLSHEIVDMWNVDSVIIVPIVVSAHGLIAKSLDQHLKRLTLDGWIKGLIQKAVLLDTARIVRRFLSLQS

SEQ ID NO: 10915 - protein, 1198 aa, Mamestra configurata
MLTRAAAQRARLPPLASSLSSASPPPEPSPTVSAVIPAVAVASSSSDEYFSPPTSPLPARRRRGRRPPDGLGPRGPTASDRVPAPGGSVQRMRWTQTINENVMRSYYGATEGGTNLTAYRGRMLSLFQVLEPAVNVSAQRLSDQVRVIQRNRMLDDAVLDRLRLESRNSRVSAASPPAAVQIQSSVSPRPNNVGEDDDDGAISVSTQCNERLRSALEDAFREYRSTPPELRPRLPRLPMHNKNRALVCALDSQLANCFDSSEDLADTHSILYCAAAAACRVAHVKFPNSDRATRPAVPAWQCRIERRIGEARALIGKLICFREGNTRRRVMRFVRRAFSGTDTSPRDYLTRVTERIDFLKQKIYAWANRIRRYKRRVERYTQNRTFQSNERWVYRAWERPDQGVTDTRLPDDDVMCSFWRNIWSVPVSHTEGDWTREVERACDPIPEMGAITISPQDVARAVRPLPNWKSPGPDGLHNFWIKWFKRSHARLASQFQSALESGSLPQFLTTGITHLLHKSGSTAEPKNYRPITCLPTVYKVLTSILRAKINQHIETNSIMSASQNGCRNRSRGTKELLLIDVAISQQVRRSRRDLSTCWIDYKKAYDSVPHTWLMRVLELYKVDAVLRTFLMSCMGQWRTVLRYPGCRQIQANSDPIRIERGIFQGDSLSPLWFCLALNPLSTLLEGSGQGYRLRRGGQVISHLLYMDDLKLFAPNNLQLMKLLKVTETFSSAISMEFGVDKCAVMHVKRGEIMESVGTQLSDSIHLRSLSSTETYKYLGMSEALGINANDVKQSLKERFFGRLNKVLNSLLSGGNKVRAFNGWVMPVLMYSFGILKWTQTELDALDRRVRSLLTANRMHHPRSSVMRLYIPRKCGGRGFLNAKTLHNREICSLREFFLEADVGMHRDVVAVDKGLTALSLANENWRKPVVLDTNDRREVWQSKELHGRFYRVLHGPDVDFLASVAWLRFGDLFGETEGFVCAIMDEVMMTNNYRKYIVKDGTVDICRACHRPGESIRHIISGCSSLANGDYLHRHNLVARIIHQQLALKYNLVESEVPYYRYVPDPVLENGNCTLYWDRSIITDRTIIANKPDIVVIDRLERRAMIVDIAVPHDVNLVKTEKDKQTKYLDLAREVVDMWDVNTAVIVPIVVTANGIIAKSLDQHLKRLSLGSWIKGLIQKAVLLDTARIVRGFLSQGP

SEQ ID NO: 10916 - protein, 1205 aa, Amphipyra berbera
MLTRSRAKALTETTRPRSSAPSLSSASQPPDSSIVSDVTPAAAVASSSSDEYFSPPTSPPPARRRGRGRPPDSLRPRGPLASDRVPAAGGSVQRMRWTPTMNENCMRAYFGATEGGTNLTAYRGRMLSLFQVLEPTVNVSAQRLSDQVRVIQRDHRLTDAALDRLRSEVQSNAIISLQSQTAAQPRTPTMVPPLPTHGNEESDDRVTNVSTQCNEQLRSALELAIQEYRFTPPNIRPRIPRLPMHRKNRALMCALDSLLSSYFDNSENLEDTHSILYCAAVAACRVAHAKFDNNDRATRPKPTVPAWQCRIERRINEARALIGKLICFREGNTRPRVMRFVRRAFSGTDINPRDYMSRVTERIDFLKQKVYAWANRIRRYKRRVERYTQNRMFHSDERRVYRTWERPDHDVSDTHLPDNDVMNTFWRNIWSMPVAHTEGDWMQEVQRACEPIEEMGDITIVPQDVTGAVRPMANWKSPGPDGLHNFWLKWLRSSHARLASQFQSSLESGSLPQFLTTGVTHLLHKSGSTAEPKNYRPITCLPTVYKLLTSILRSKISKHIANNSIMSVSQNGCKNGSRGTKELLLIDMAISQQVRRSRKDLSTCWIDYKKAYDSVPHTWLMRVLELYKVNTTLCAFLTSCMGQWRTVLHYPGCRQIQGRGEPIRIERGIFQGDSLSPLWFCLALNPLSTLLEGSGLGYRLRRGGQVISHLLYMDDLKLFAPNNLQLMKLLKVTETFSNSIRMEFGVDKCAVMHVKRGGIMESVGTQLSDSIHLRSLSSTETYKYLGMSEALGINETDMKQSLRERFYGRLKKVLKSLLSGGNKVRAFNGWVMPVLMYSFGILKWTQTELDALDRRVRTLLTAYRMHHPRSSVMRLYIPRKCGGRGFLNAKTLHNREVCSLREYFLQADVGMHRDVVAVDKGFTPLSLAKENWRKPVVLDTNGRREVWQSKELHGRFYRALYGPDVDFLASVAWLRFGDLFGETEGFVCAIMDEVMMTNNYRKYIVKDGTVDICRACHCPGESIRHIISGCSRLANGEYLHRHNLVARIIHQQLALKYNLVDAEVPYYKYVPDPVLENGHITLYWDRSIITDRTIVANKPDIVVIDRSERLAMIVDITVPHDENLVKAEKDKEIKYQDLAHEVVDMWEVDSAVIVPIVVTANGLIAKSLDQHLTRLALGSWVKGLIQKAVLLDTARIVRKFLSLRP

SEQ ID NO: 10917 - protein, 1205 aa, Amphipyra berbera
MLTRSRAKALTETTRPRSSAPSLSSASQPPDSSIVSDVTPAAAVASSSSDEYFSPPTSPPPARRRGRGRPPDSLRPRGPLASDRVPAAGGSVQRMRWTPTMNENCMRAYFGATEGGTNLTAYRGRMLSLFQVLEPTVNVSAQRLSDQVRVIQRDHRLTDAALDRLRSEVQSNAIISLQSQTAAQPRTPTVVPPLPTHGNEESDDRVTNVSTQCNEQLRGALELAIQEYRFTPPNIRPRIPRLPMHRKNRALMCALDSLLSSYFDNSENLEDTHSILYCAAVAACRVAHAKFDNSDKATRPKRAVPAWQCRIERRINEARTLIGKLICFREGNTRPRVMRFVRRAFSGTDINPRDYMSRVTERIDFLKQKVYAWANRIRRYKRRVERYTQNRMFHSDERWVYRTWERPDHDVNDTHPPNNDVMNTFWRNIWSMPVTHTEGDWMQEVQRACEPIEEMGDITIVPQDVTSAVRPMANWKSPGPDGLHNFWIKWLRSSHARLASQFQSSLESGSLPEFLTTGVTHLLHKSGSTAEPKNYRPITCLPTVYKLLTSILRAKINSHIINNSIMSVSQNGCKNGSRGTKELLLIDMAISQQVRRSRKDLSTCWIDYKKAYDSVPHTWLMRVLELYKVNTTLCAFLTSCMGQWRTVLHYPGCRQIQGRGEPIRIERGIFQGDSLSPLWFCLALNPLSTLLEGSGLGYRLRRGGQVISHLLYMDDLKLFAPNNLQLMKLLKVTETFSNSIRMEFGVDKCAVMHVKRGGIMESVGTQLSDSIHLRSLSSTETYKYLGMSETLGINETDMKQSLRERFYGRLKKVLKSLLSGGNKVRAFNGWVMPVLMYSFGILKWTQTELDALDRRVRTLLTAYRMHHPRSSVMRLYIPRKCGGRGFLNAKTLHNREVCSLREYFLQADVGMHRDVVAVDKGFTPLSLAKENWRKPVVLDTNGRREVWQSKELHGRFYRALHGPDVDFLASVAWLRFGDLFGETEGFVCAIMDEVILTNNYRKYIVKDGTVDICRACHCPGESIRHIISGCSRLANGEYLHRHNLVARIIHQQLALKYNLVDAEVPYYKYVPDPVLENGHITLYWDRSIITDRTIVANKPDIVVIDRSERLAMIVDITVPHDENLVKAEKDKEIKYQDLAHEVVDMWEVDSAVIVPIVVTANGLIAKSLDQHLTRLALGSWIKGLMQKAVLLDTARIVRKFLSLRP

SEQ ID NO: 10918 - protein, 1203 aa, Amphipyra berbera
MLTRARARKQTAHPRSPDSSLSSASQPPESSPPVSAVTPAAAVASSSSDEYYSPPSSPPPVRRRGGARPPACLGPRGQPATNRVPAAGGNVSRMRWTQSINENVMRAYYGATEGGINLTAYRERMLFLFQVLEPAINVSAQRLSDQVRVVQRNRRLDDTVLERLRSEARNSQTVTFPVQAAVQMQPIAVPPRPIHVDGEGDGEAINVSNQCSEELRSALDYAILEFRTTPPEIRPRLPRLPMHGKNRALMCALDSLLSNYFDGSEDLADTHSILYCAAIAACRVAHVKFTENERATRPKPAVPAWQSRIERRIGGARVLIGKLICFREGNNRPRVMRFVRRAFSGTDISPRDYMSRVTERIDFLKQKVYAWANRIRRYKRRVERYTQNRIFQSDQRRVYRAWERPDPGGGDVRLPDDDALSSFWRSIWSVPIAHTEDGWMRDIEQVCEPIAEMEPITITPQDVADAARPLPNWKSPGPDGLHNFWLKWLRSSHARLASQFQSSLESGSLPQFLTTGVTHLLYKSGSTAEPKNYRPITCLPTVYKLLTSILRVKITTHIDNNCIMSASQNGCRKGSRGTKELLLIDMAISQQVRRSQKDLSTCWIDYKKAYDSVPHSWLMRVLELYKINTTLRTFLMSCMRHWRTVLRYPGCRRIRGSGEQIRIERGIFQGDSLSPLWFCLALNPLSTLLEGTGLGYQLRRGGQVISHLLYMDDLKLFAPTDLQLMELLKVTENFSNSIRMEFGVDKCAVMHVKRGRIAESEGIQLPNSVQLRSLSPTETYKYLGMSEALGISETDMRQSLRERFFGRLNKLLKSLLSGGNKVRAFNGWVMPVLIYSFGTLKWTQADLDALDRRVRALLTAHRMHHPRSSVMRLYIPRKCGGRGFLNAKTLHNREVYSLREYFLQAEGVMHRDVVAVDKGFTPLALARENWRKPAVLSTNDREVVWQSKELHGRYYRALHGPDVDFSASVSWLRSGNLFGETEGFVCAIMDEVMMTNNYRKYIVKDGTVDICRACHRPGESIRHIVSGCSRLANGEYLHRHNLVARIIHQQLALKYNLVESEVPYYRYVPDPVLENGHATLYWDRSIITDRTIVANKPDIVVIDRSERRTMIVDITVPHDENLVKAEKDKQIKYLDLAHEVVGMWDVDSAVIVPIVVTANGIIAKSLDIHLMRLSLGGWIKGLIQRAVLLDTARIVRRFLSLEP

SEQ ID NO: 10919 - protein, 1105 aa, Amphipyra berbera
MRWTLTMNENCMRAYFGATEGGTNLTAYRGRMLSLFQVLEPTVNVSAQRLSDQVRVIQRDHRLTDAALDRLRSEVQSNRIISLQSQTAAQPQAPTVVPPLPIHADEESDDRVTNVSTQCNDQLRSALELAIREYRFTPPNIRPRIPRLPMHRKNRALMCALDSLLSSYFDNSENLEDTHSILYCAAVAACRVAHAKFDNNDRATRLKPAVPAWQCRIERRINEARALIGKLICFREGNTRPRVMRFVRRAFSGTDINPRDYLSRVTERIDFLKQKVYAWANRIRRYKRRVERYTQNRMFHSDERWVYRTWERPDHDVSDTHLPDNDVMNTFWRNIWSMPVTHIEGDWMQEVQRACEPIEEMGDITIVPQDVTSAVRPMANWKSPGPDGLHNFWLKWLRSSHARLASQFQSSLESGSFPEFLTTGVTHLLHKSGSTAEPKNYRPITCLPTVYKLLTSILRAKINSHIINNSIMSVSQNGCKNGSRGTKELLLIDMAISQQVRRSRKDLSTCWIDYKKAYDSVPHTWLMRVLELYKVNTTLCTFLASCMGQWRTVLHYPGCRQIQGRGEPIRIERGIFQGDSLSPLWFCLALNPLSTLLEGSGLGYRLRRGGQVISHLLYMDDLKLFAPNNLQLVKLLKVTETFSNSIRMEFGVDKCAVMHVKRGGIMESVGTQLSDSIHLRSLSSTETYKYLGMSEALGINETDMKQSLRERFYGRLKKVLKSLLSGGNKVRAFNGWVMPVLMYSFGILKWTQTELDALDRRVRTLLTAYRMHHPRSSVMRLYIPRKCGGRGFLNAKTLHNREVCSLREYFLHADVGMHRDVVAVDKGFTPLSLAKENWRKPVVLDTNGRREVWQSKELHGRFYRALHGPDVDFLASVAWLRFGDLFGETEGFVCAIMDEVILTNNYRKYIVKDGTVDICRACHCPGESIRHIISGCSRLANGGYLHRHNLVARIIHQQLALKYNLVDAEVSDPVLENGHITLYWDRSIITDRTIVANKPDIVVIDRSERLAMIVDITVPHDENLVKAEKDKEIKYQDLAHEVVDMWEVDSAVIVPIVVTANGLIAKSLDQHLTRLALGSWIKGLIQKAVLLDTARIVRRFLSLRP

SEQ ID NO: 10920 - protein, 1209 aa, Amphipyra berbera
MQTRSRAKATVTQNTRPTPSVSSLSSASQPPDSSIVSDVTPAAAVASSSSDEFYSPPSSPPPSPPPRRRGRGRPPASLGPRGPPVSDRVPAPGGSVQRMRWTPTMNENCMRAYFGATEGGTNLTAYRGRMLSLFRALEPAVNVSAQRLSDQVRVIQRDHRLTDAALDRLRSEVQSNRIISLQSQNAAQPQVPCMVPPRPNHADEESDDRVTNVSTQCNEQLRSALEHAIREYRFTPPNLRPRIPRLPMNKKNRALMCALDSLLSSYFDNSEGLEDTHSILYCAAVAACRVAHAKFDNNDRDTRPKPAVPAWQCRVECRINEARALIGKLICFREGNTRPRVMRFVRRAFLGTDINPRDYMSRVTERIDFLKQKVYAWANRIRRYKRRVERYTQNRMFHSDERRVYRTWERPDHDVSDTHLPDSDVMNTFWRNIWSMPVTHTEGDWMQEVQRACEPIEEMEDVTIVPQDVTSAVRPMSNWKSPGPDGLHNFWLKWLRSSHARLASQFQSSLESGSLPQFLTTGVTHLLHKSGSTAESKNYRPITCLPTVYKLLTSILRSKISTHITNNFIMSTSQNGCKNGSRGTKELLLIDMTISQQVRRSRKDLSTCWIDYKKAYDSVPHTWLMRVLELYKVNTTLCAFLTSCMGQWRTVLHYPGCRQIQGRGEPIRIKRGIFQGDSLSPLWFCLALNPLSTLLEGSGLGYRLRRGGQVISHLLYMDDLKLFAPNNLQLVKLLKVTETFSNSIRMEFGVDKCAVMHVKRGGIMESVGTQLSDSIHLRSLSSTETYKYLGMSEALGINVADMKQSLRERFYGRLKKVLKSLLSGGNKVRAFNGWVMPVLMYSFGILKWTQTELDALDRRVRTLLTAYRMHHPRSSVMRLYIPRKCGGRGFLNAKTLHNREVCNLREYFLQADVGMHRDVVAVDKGFTPLSLAKENWRKPVVLDTTGRRDVWQSKELHGRFYRALHGPDVDFLASVAWLRFGDLFGETEGFVCAIMDEVIMTNNYRKYIVKDGTVDICRACHCPGESIRHIISGCSRLANGEYLHRHNLVARIIHQQLALKYNLVDAEVPYYKYVPDPVLENGHITLYWDRSIITDRTIIANKPDIVVIDRSERLTMIVDITVPHDENLVKAEKDKEIKYQDLAHEVVDMWEVDSAVIVPIVVTANGLIAKSLDQHLMRLSLGSWVKGLIQKAVLLDTARIVRKFLSLRP

SEQ ID NO: 10921 - protein, 1111 aa, Amphipyra berbera
MRWTLTMNENCMRAYFGATEGGTNLTAYRGRMLSLFQVLEPTVNVSAQRLSDQVRVIQRDHRLTDAALDRLRSEVQSNRIISLQSQTAAQPQAPTVVPPLPIHADEESDDRVTNVSTQCNDQLRSALELAIREYRFTPPNIRPRIPRLPMHRKNRALMCALDSLLSSYFDNSENLEDTHSILYCAAVAACRVAHAKFDNNDRATRPKPAVPAWQCRIERRINEARALIGKLICFREGNTRPRVMRFVRRAFSGTDINPRDYLSRVTERIDFLKQKVYAWANRIRRYKQRVERYTQNRMFHSDERWVYRTWERPDHDVSDTHLPDNDVMNTFWRNIWSMPVTHIEGDWMQEVQRACEPIEEMGDITIVPQDVTSAVRPMANWKSPGPDGLHNFWLKWLRSSHARLASQFQSSLESGSFPEFLTTGVTHLLHKSGSTAEPKNYRPITCLPTVYKLLTSILRAKINSHIINNYIMSVSQNGCKNGSRGTKELLLIDMAISQQVRRSRKDLSTCWIDYKKAYDSVPHTWLMRVLELYKVNTTLCAFLASCMGQWRTVLHYPGCRQIQGRGEPIRIERGIFQGDSLSPLWFCLALNPLSTLLEGSGLGYRLRRGGQVISHLLYMDDLKLFAPNNLQLVKLLKVTETFSNSIRMEFGVDKCAVMHVKRGGIMESVGTQLSDSIHLRSLSSTETYKYLGMPEALGINETDMKQSLRERFYGRLKKVLKSLLSGGNKVRAFNGWVMPVLMYSFGILKWTQTELDALDRRVRTLLTAYRMHHPRSSVMRLYIPRKCGGRGFLNAKTLHNREVCSLREYFLHADVGMHRDVVAVDKGFTPLSLAKENWRKPVVLDTNGRREVWQSKELHGRFYRALHGPDVDFLASVAWLRFGDLFGETEGFVCAIMDEVILTNNYRKYIVKDGTVDICRACHCPGESIRHIISGCSRLANGEYLHRHNLVARIIHQQLALKYNLVDAEVPYYKYVPDPVLENGHITLYWDRSIITDRTIVANKPDIVVIDRSERLAMIVDITVPHDENLVKAEKDKEIKYQDLAHEVVDMWEVDSAVIVPIVVTANGLIAKSLDQHLTRLALGSWIKGLIQKAVLLDTARIVRRFLSLRP

SEQ ID NO: 10922 - protein, 1207 aa, Amphipyra berbera
MLTRSRAKAIAQNTRPRPSASSLSSASQPPDSSIVSDVTPAAAVASSSSDEYFSPPSTPPPPPPRRRGRGRPPASLGPRGPPASDRVPAPGGSVQRMRWTPTMNENCMRAYFGATEGGTNLTAYRGRMLSLFQVLEPAVNVSAQRLSDQVRVIQRDHRLTDDALDRLRSEVQSNCIISLQSQTAAQPQVPPMVPPQPIRADEESDDRVTIVSAQCNEQLRSALELAIREYRFTPPNLRPRIPRLPMNRQNRALMCALDSLLSNYFDNSEGLEDTHSILYCAAVAACRVAHVKFDNNDRATRPKPAVPAWQCRIERRINEARALIGKLICFREGNTRPRVMRFVRRAFSGTDINPREYMSRVTERIDFLKQKVYAWANRIRRYKRRVERYTQNRMFHSDERWVYRTWERPEHDVSDTHLPDNDVMNTFWRNIWSMPVTHTEGDWMQEVQRACEPIEEMGDIIIVPQDVTSAVRPMANWKSPGPDGLHNFWLKWLRSSHARLASQFQSSLESGSLPPFLTTGITHLLHKSGSTAEPKNYRPITCLPTIYKLLTSILRAKINTHIINNSIMSASQNGCKNGSRGTKELLLIDMAISQQVRRSRKDLSTCWIDYKKAYDSVPHTWLMRVLELYKVNTTLCAFLTSCMGQWRTVLHYPGCRQIQGRGEPIRIERGIFQGDSLSPLWFCLALNPLSTLLEGSGLGYRLRRGGQVISHLLYMDDLKLFAPNNLQLMKLLKVTETFSNSIRMEFGVDKCAVMHVKRGGIMESVGTQLSDSIHLRSLSSTETYKYLGMSEALGINETDMKQSLRERFYGRLKKVLKSLLSGGNKVRAFNGWVMPVLMYSFGILKWTQTELDALDRRVRTLLTAYRMHHPRSSVMRLYIPRKCGGRGFLNAKTLHNREVCSLREYFLQADVGMHRDVVAVDKGFTPLSLAKENWRKPVVLDTNGRREVWQSKELHGRFYRALHGPDVDFLASVAWLRFGDLFGETEGFVCAIMDEVMMTNNYRKYIVKDGTVDICRACHCPGESIRHIISGCSRLANGEYLHRHNLVARIIHQQLALKYNLVDAEVPYYKYVPDPVLENGHITLYWDRSIITDRTIVANKPDIVVIDRTERLTMIVDITVPHDENLVKAEKDKEIKYQDLAHEVVDMWEVDSAVIVPIVVTANGLIAKSLDHHLTRLSLGSWVKGLIQKAVLLDTARIVRKFLSLRP

SEQ ID NO: 10923 - protein, 1080 aa, Amphipyra berbera
MLSLFQALEPAVNVSAQRLSDQVRVIQRDHRLTDAALDRLRSEVQSNRIISLQSQNAAQPQVPCMVPPRPNHADEESDDRVTNVSTQCNEQLRSALEHAIREYRFTPPNLRPRIPRLPMNKKNGALMCALDSLLSSYFDNSEGLEDTHSILYCAAVAACRVAHAKFDNNDRDTRPKPAVPAWQCRVERRINEARALIGKLICFREGNTRPRVMRFVRRAFSGTDINPRDYMSRVTERIDFLKQKVYAWANRIRRYKRRVERYTQNRMFHSDERRVYRTWERPDHDVSDTRLPDSDVMNTFWRNIWSMPVTHTEGDWMQEVQRACEPIEEMGDITIVPQDVTSAVRPTSNWKSPGPDGLHNFWLKWLRSSHARLASQFQSSLESGPLPQFLTTGVTHLLHKSGSTAEPKNYRPITCLPTVYKLLTSILRSKISTHITNNFIMSTSQNGCKNGSRGTKELLLIDMTISQQVRRSRKDLSTCWIDYKKAYDSVPHTWLMRVLELYKVNTTLCAFLTSCMGQWRTVLHYPGCREIQGRGEPIRIKRGIFQGDSLSPLWFCLALNPLSILLEGSGLGYRLRRGGQVISHLLYMDDLKLFAPNNLQLVKLLKVTETFSNSIRMEFGVDKCAVMHVKRGGIMESVGTQLSDSIHLRSLSSTETYKYLGMSEALGINVADMKQSLRERFYGRLKKVLKSLLSGGNKVRAFNGWVMPVLMYSFGILKWTQTELDALDRRVRTLLTAYRMHHPRSSVMRLYIPRKCGGRGFLNAKTLHNREVCNLREYFLQADVGMHRDVVAVDKGFTPLSLAKENWRKPVVLDTTGRRDVWQSKELHGRFYRALHGPDVDFLASVAWLRFGDLFGETEGFVCAIMDEVIMTNNYRKYIVKDGTVDICRACHCPGESIRHIISGCSRLANGEYLHRHNLVARIIHQQLALKYNLVDAEVPYYKYVPDPVLENGHITLYWDRSIITDRTIIANKPDIVVIDRSERLTMIVDITVPHDENLVKAEKDKEIKYQDLAHEVVDMWEVDSAVIVPIVVTANGLIAKSLDQHLMRLSLGSWVKGLIQKAVLLDTARIVRKFLSLRP

SEQ ID NO: 10924 - protein, 1197 aa, Noctua janthe
MLTRSATRRARLSPPDPSLSSASPPPESSPIVSAVTPAVAVASSSSDEYFSPPTTPPPVRRRGGRRPPDGLGPRGPPASDRVPAPGGSVPRMRWTQSINANVMRAYYGATEGGNNLTAYRVRMLSLFQVLEPAVNVSAQRLSDQVRVIQRNGMLDDTVLDRLRTEIQSSHVIATPPQTVVPPQSTIIPTHDNNVSNDMVTNVSTQCNEEMRCALEGAIREYRFMQPDLRPRVPRLPMHNKNKVLVAVLDSQLSNYFDNCENLTDAHSVLYCAAVAACRVAHVKFSDDRATRPKPAVPSWQYRIERRIGEARALIGKLICFREGNTRPRVMRFVRRAFSGTDISARDYMSRVTERIDFLKQKVYAWANRIRRYKRRVDRYTQNRTFQRDERWVYRAWERPDQGVADTHLPDDDAMCSFWRSIWSVPVSHTEGEWTREVERACDLVPEMGAITISPQDVVRAVRPLPNWKSPGPDGLHNFWIKWFTRSHARLAILFQSALESGSLPEFLTTGITHLLHKSGSTAEPKNYRPIACLPTVYKVLTSILRAKINKHIDDNSVMSASQNGCRNGSRGTKELLLIDMAISQQVRRSRRDLSTCWIDYKKAYDSVPHTWLMRVLELYKVDSTLRIFLMSCMGQWRTVLRYPGCRQIQRNSEPIRIERGIFQGDSLSPLWFCLALNPLSTLLEDSGLGYRLRRGGQVISHLLYMDDLKLFAPNDLQLMELLKVTETFSSAIRMEFGVDKCAVMHVKRGEIVESVGTQLSDSINLRSLSATETYKYLGMSEALGINVADMKQSLKERFFGRLKKVFNSLLSGGNKVRALNGWVMPVLMYSFGILKWTQTELDALDRRVRTLLTTYRMHHPRSSVMRLYIPRRCGGRGFLNAKTLHNREIYSLREYFLETDVGMHRDVVAVDKGLTPLSLAKENWRKPVVLDTNDRMEVWQSKELHGRFFRALHGPDVDLPASVAWLRSGDLFGETEGFVCAIMDEVMMTNNYRRFIVKDGTVDICRACHRPGESIRHIISGCSRLANGEYLHRHNLVARIIHQQLALKYNLVESEVPYYKYVPDPVLENGNITLYWDRSIVTDRTIVANKPDIVVVDRSERRAMIVDITVPHDGNLVKAEKDKQIKYLDLAHEVVYMWDVDSAIIVPIVVSAHGLIAKSLDQYLRRLSLGSWIKGLIQKAVLLDTARIVRRFLSLEP

SEQ ID NO: 10925 - protein, 1197 aa, Noctua janthe
MLTRSAARRARLSPPDPSLSSASPPPESSPVVSAVTPAVAVASSSSDEYFSPLTTPPPVRRRGGRRPPDGLGPRGPPASDRVPAPGGSVPRMRWTQSINANVMRAYYGATEGGNNLTAYRVRMLSLFQVLEPAVNVSAQRLSDQVRVIQRNRMLDDTVLDRLRTEMQSSHVITPSVQAVVLPQSSTISNHANNVNNDMVTNVSTQCNEEMRSALEGAIREYRFVQPDLRPRISRLPMHNKNRALVAVLDSQLSNYFDNCEDLTDAHSILYCAAVTACRVAHVKFSDDRATRPKPAVPAWQYRIERRIDGARALIGKLICFREGNTRPRVMRFVRRAFSGTDISPRDYMSRVIERIDFLKQKVYAWANRIRRYKRRVDRYTQNRTFQRDERWVFRAWERPDQGVADTRLPDDDAMCSFWRSIWSVPVSHTEGEWTRRVERACDLVPEMGAINISPQDVVRAVRPLPNWKSPGPDGLHNFWIKWFTRSHARLAILFQSALESGSLPEFLTTGITHLLHKSGSTAEPKNYRPITCLPTVYKVLTSILRAKINKHIDDNSVMSASQNGCRNGSRGTKELLLIDMAISQQVRRSRKDLSTCWIDYKKAYDSVPHTWLMRVLELYKIDATLRTFLMSCMGQWRTVLRYPGCRQIQRNSEPIRIERGIFQGDSLSPLWFCLALNPLSTLLEDSGLGYRLRRGGQVISHLLYMDDLKLFAPNDLQLMELLKVTETFSSAIRMEFGVDKCAVMHVKRGEIVESVGTQLSDSINLRSLSATETYKYLGMSEALGINVADMKQSLKERFFGRLKKVFNSLLSGGNKVRAFNGWVMPVLMYSFGILKWTQTELDALDRRVRTLLTAYRMHHPRSSVMRLYIPRRCGGRGFLNAKTLHNREICSLREYFLETDVGMHRDVVAVDKGLTPLSLAKENWRKPVVLDTNDRMEVWQSKELHGRFFRALHGPDVDLSASVAWLRSGDLFGETEGFVCAIMDEVMMTNNYRRFIVKDGTVDICRACHRPGESIRHIISGCSRLANGEYLHRHNLVARIIHQQLALKYNLVESEVPYYKYVPDPVLENGSITLYWDRSIITDRTIVANKPDIVVVDRSERRAMIVDITVPHDENLVKAEKDKQIKYLDLAREVVDMWDVDSAIIVPIVVSAHGLIAKSLDQYLRRLSLGSWIKGLIQKAVLLDTARIVRRFLSLEP

SEQ ID NO: 10926 - protein, 868 aa, Noctua janthe
MRFVRRAFSGTDISARDYMSRVTERIDFLKQKVYAWANRIRRYKRRVDRYTQNRTFQRDERWVYRAWERPDQGVADTHLPDDDAMCSFWRSIWSVPVSHTEGEWTREVERACDLVPEMGAITISPQDVVRAVRPLPNWKSPGPDGLHNFWIKWFTRSHARLAILFQSALESGSLPEFLTTGITHLLHKSGSTAEPKNYRPIACLPTVYKVLTSILRAKINKHIDDNSVMSASQNGCRNGSRGTKELLLIDMAISQQVRRSRRDLLTCWIDYKKAYDSVPHTWLMRVLELYKVDSTLRIFLMSCMGQWRTVLRYPGCRQIQRNSEPIRIERGIFQGDSLSPLWFCLALNPLSTLLEDSGLGYRLRRGDQVISHLLYMDDLKLFAPNDLQLMELLKVTETFSSAIRMEFGVDKCAVMHVKRGEIVEYVGTQLSDSINLRSLSATETYKYLGMSEALGINVADMKQSLKERFFGRLKKVFNSLLSGGNKVRAFNGWVMPVLMYSFGILKWTQTELDALDRRVRTLLTTYRMHHPRSSVMRLYIPRRCGGRGFLNAKTLHNREIYSLREYFLETDVGMHRDVVAVDKGLTPLSLAKENWRKPVVLDTNDRMQVWQSKELHGRFFRALHGPDVDLPASVAWLRSGDLFGETEGFVCAIMDEVMMTNNYRRFIVKDGTVDICRACHRPGESIRHIISGCSRLANGEYLHRHNLVARIIHQQLALKYNLVESEVPYYKYVPDPVLENGNITLYWDRSIVTDRTIVANKPDIVVVDRSERRAMIVDITVPHDGNLVKAEKDKQIKYLDLAHEVVDMWDVDSAIIVPIVVSAHGLIAKSLDQYLRRLSLGSWIKGLIQKAVLLDTARIVSRFLSLEP

SEQ ID NO: 10927 - protein, 1197 aa, Noctua janthe
MLTRSATRRARLSPPDPSLSSASPPPESSPIVSAVTPAVAVASSSSDEYFSPPTTPPPVRRRGGRRPPDGLGPRGPPASDRVPAPGGSVPRMRWTQSINANVMRAYYGATEGGNNLTAYRVRMLSLFQVLEPAVNVSAQRLSDQVRVIQRNGMLDDTVLDRLRTEMQSSHVIATPPQTVVPPQSTIIPTHDNNVSNDMVTNVSTQCNEEMRCALEGAIREYRFMQPDLRPRVPRLPMHNKNKVLVAVLDSQLSNYFDNCENLTDAHSVLYCAAVAACRVAHVKFSDDRATRPKPAVPSWQYRIERRIGEARALIGKLICFREGNTRPRVMRFVRRAFSGTDISARDYMSRVTERIDFLKQKVYAWANRIRRYKRRVDRYTQNRTFQRDERWVYRAWERPDQGVADTHLPDDDAMCSFWRSIWSVPVSHTEGEWTREVERACDLVPEMGAITISPQDVVRAVRPLPNWKSPGPDGLHNFWIKWFTRSHARLAILFQSALESGSLPEFLTTGITHLLHKSGSTAEPKNYRPIACLPTVYKVLTSILRAKINKHIDDNSVMSASQIGCRNGSRGTKELLLIDMAISQQVRRSRRDLSTCWIDYKKAYDSVPHTWLMRVLELYKVDSTLRIFLMSCMGQWRTVLRYPGCRQIQRNSEPIRIERGIFQGDSLSPLWFCLALNPLSTLLEDSGLGYRLRRGGQVISHLLYMDDLKLFAPNDLQLMELLKVTETFSSAIRMEFGVDKCAVMHVKRGEIVESVGTQLSDSINLRSLSATETYKYLGMSEALGINVADMKQSLKERFFGRLKKVFNSLLSGGNKVRAFNGWVMPVLMYSFGILKWTQTELDALDRRVRTLLTAYRMHHPRSSVMRLYIPRRCGGRGFLNAKTLHNREIYSLREYFLETDVGMHRDVVAVDKGLTPLSLAKENWRKPVVLDTNDRMEVWQSKELHGRFFRALHGPDVDLPASVAWLRSGDLFGETEGFVCAIMDEVMMTNNYRRFIVKDGTVDICRACHRPGESIRHIISGCSRLANGEYLHRHNLVARIIHQQLALKYNLVESEVPYYKYVPDPVLENGNITLYWDRSIVTDRTIVANKPDIVVVDRSERRAMIVDITVPHDGNLVKAEKDKQIKYLDLAHEVVDMWDVDSAIIVPIVVSAHGLIAKSLDQYLRRLSLGSWIKGLIQKAVLLDTARIVRRFLSLEP

SEQ ID NO: 10928 - protein, 1048 aa, Mythimna ferrago
MLDDTVLYRLRTEMSNHANAPSSQPVAPVMVPPSNHVANPADEESTDMVIQVSTQCTNELRSALECAIREYRNMPSVLRPRLPRLPMHNKNKALVAALDMQLSNYFDNCKDLTDTHSIMYCAAVAACRVAHVKFPNSDVATRPKPAVPAWQCRIERRIGEARALIGKLICFREGNTRPRVMRFVRRAFSGTDISPRDYMPRVTERIDFLKQKVYAWANRIRRYKRRVERYTQNRAFQSNERWVYRAWERPDQGVTDTRLPDDDAMCSFWRNIWSVPVSHTEGSWTGEVERACESITEMGAITISPQDVARAVRPLPNWKSPGPDGLHNFWIKWLQRSHARLASQYQAALESSSLPEFLTTGVTHLLHKSGSTAEPKNYRPITCLPTVYKVLTSILRDKINNHFDKNSIMSASQNGCRKGSRGTKELLLIDMAISQQVRRSRKDLSTCWIDYKKAYDSVPHTWLMRVLELYKVDATLRTFLMSCMRQWRTVLRYPGCRNIQRNSEPVRIERGIFQGDSLSPLWFCLALNPLSTLLENSGLGYRLKRGGQVISHLLYMDDLKLFAPNNLQLMELLKVTETFSSAIRMEFGVDKSAVMHIKRGEIVESVGTQLSDSIHLRSLSPTETYKYLGMSEALGINATVMKQSLKERFFGRLKKVLNSLLSGGNKVRAFNGWVMPVLMYAFGVLKWTQTELDALDRRVRTLLTAYRMHHPRSSVMRLYIPRKCGGRGFLNAKTLHNREVCSLREYFLAADVGMHRDVVAVDKGLTPLSLANENWRKPVVLDTNVRKEVWQSKELHGRFFRALHGPDVDKLASVAWLRVGDLFGETEGFVCAIMDKVIMTNNYRRFIVKDGTVDICRACHRPGESIRHIISGCSRLANGEYLHRQNLVARIIHQQLALKYSLVESEVPYYRYVPDPVLDNGDITLYWDRSIITDRTIVANKPDIVVVDRSERRAMIVDISVPHDENLVKAEKDKQIKYIDLAREVVDMWEVDSAIIVPIVVSANGLIAKSLDQHLRRLSLGDWIKGLIQKAVLLDTARIVRRFLSLEP

SEQ ID NO: 10929 - protein, 1200 aa, Mythimna ferrago
MLTRSRARSQIAHLTSSGSSLSSASQPPGPAPAVSPEIPAAAVASSSSDEYFSPPTTPPPARRRGRGRPPACLGLRGPPASDRVPAAGGSVQRMRWTESINENVMRSYFGATEGGTNLTAYRGRMLSLFQVLEPAVNVSAQRLSDQVRVIQRNRMLDDAVLDRLRLESRNGRVTPISPPAAVQRQPSVSPRPDHVGEDDDDGAISVSTQCNARLRSTLEDAFREYRSIPPELRPRLPRLPMHRKNRALVCALDSQLSNCFDSSKDLTDTHSILYCAAAAACRVAHVKIPNSDRATRPAKPAWQCRIERRIGEARALIGKLICFREGNTRPRVMRFVRRAFSGTDISPRDYLPRITERIDFLRQKVYAWANRIRRYKRRVERYTQNRAFQSNERWVYRAWERPDQSVIDTRLPDDDAMYSFWRSIWSVPVSHTEGDWTREVERECELIPEMGAITISPQDVARAVRPLPNWKSPGPDGLHNFWLKWFKSSHARLASQFQSALESGSLPQFLTTGITHLLHKSGSTAEPKNYRPITCLPTVYKVLTSILRAKINSHIETNSIMSASQNGCRNGSRGTKELLLIDVAISQQVRRSRRDLSTCWIDYKKAYDSVPHTWLMRVLELYKIDVTLRAFLMSCMGQWRTVLHYPGCRRVSENSEPLRIERGIFQGDSLGPLWFCLALNPLSTLLEGSGLGYRLRREGQVISHLLYMDDLKLFASNNLQLMELLKVTETFSSAIRMEFGLDKCAVMHVKRGEIMESVGTQLSDSIHLRSLSSTETYKYLGMSEALGINAADVKQSLRERFFGRLNKVLKSLLSGGNKVRAFNGWVMPVLMYSFGILKWTQTELDALDRRVRTLLTANRMHHPRSSVMRLYIPRKCGGRGFLNAKTLHNREVCSLREYFLETDVGMHRDVVAVDKGLTPLSLANENWRKPIVMDTNERKEVWKGKELHGRFYRALHGPDVDLLASVSWLRFGDLFGETEGFVFAIMDEVMMTNNYRKYIVKDGTVDICRACHRPGESIRHIISGCSHLANGDYLHRHNLVARIIHQQLALKYNLVESEVPYYRYVPDPVLENGSVTLYWDRSIITDRTIVANKPDIVVIDRLERRTMIVDIAVPHDENLVKAEKDKQTKYLDLAREVVDMWEVDRAIIVPIVVTANGLIAKSLDQHLRRLSLGSWIKGLIQKAVLLDTARIVRRFLSQQP

SEQ ID NO: 10930 - protein, 1200 aa, Mythimna ferrago
MLTRAAARRARPPPPASSLSSASPPPEPSLNASAVTPAATVASSSSDEFYSPPTSPPPARRQRGRRPPSSLGPRGPPASDRVPAPGGSVQRMRWTQSINENVMRSYYGATEGGNNLTAYRVRMLSLFQVLEPAVNVSAQRLSDQVRVILRNHMLDDSVLDRLRTEMSDRVITPPSQPVVPVVVPPSSHISFYTDEVSTDMVTNVSTQCNNELRSALECAIREYRNIPPELRPRIPRLPMCNKNRALVAALDSQLSNYFDDCEDLTETHSIMYCAAVAACRVAHVKFPDSDEATRPKSAVPAWQCRIERRIGGARALIGKLICFREGNTRPRVMRFVRRAFSGTNISPRDYMSRVTERIDFLKQKVYAWANRIRRYKRRVERYTQNRTFRSNERWVYRAWERPDQGVTGARLPEDDAMCSFWRSIWSVPVSHTEGDWTREVERACDPIPQMGAIDISPQDVARAVRPLPNWKSPGPDGLHNFWIKWFTRSHARLAYQFQSALESGSLPQFLTTGITHLLHKSGSTAEPKNYRPITCLPTVYKVLTSILRSKINSHIDENSIMSPSQNGCRNGSRGTKELLLIDMTISQQVRRSRKDLSTCWIDYKKAYDSVPHTWLMRVLELYKVDATLCTFLMSCMRQWRTVLRYPGCRNIQRNSEPVRIERGIFQGDSLSPLWFCLALNPLSTLLENSGLGYRLKRGGQVISHLLYMDDLKLFAPNNLQLMELLKVTETFSSAIRMEFGVDKCAVMHIKRGEIVESVGTQLSDSIHLRSLSPTETYKYLGMSEALGINATDMKQSLRERFFGRLKKVLNSLLSGGNKVRAFNGWVMPVLMYAFGVLKWTQTELDALDRKVRTLLTAYRMHHPRSSVMRLYIPRKCGGRGFLNAKTLHNREVCSLREYFLAADVGMHRDVVAVDKGLTPLSLANENWRKPVVLDTNVRKEVWQSKELHGRFFRALHGPDVDQLASVAWLRVGDLFGETEGFVCAIMDEVIMTNNYRRFIVKDGTVDICRACHRPGESIRHIISGCSRLANGEYLHRHNLVARIIHQQLALKYSLVESEVPYYRYVPDPVLDSGDITLYWDRSIITDRTIVANKPDIVVVDRSERRAMIVDISVPHDENLVKAEKDKQIKYIDLAREVVDMWEVDSAIIVPIVVSANGLIAKSLDQHLRRLSLGDWIKGLIQKAVLLDTARIVRRFLSLEP

SEQ ID NO: 10931 - protein, 1200 aa, Mythimna ferrago
MLTRAAARRACPPPPASSLSSASPPPDPSPTVSAVTPAVAAASSSSDEYYSPPTTPPPARRRGGRRPPLCFGPRGPPASDRVPATGGSVPRMRWTQSTNENVMRAYYGATEGGNNLTAYRVRMLSLFQVLEPAVNVSAQRLSDQVRVIQRNHMLDDTVLDRLRTEMSNHANASSSQPVAPVMVPPSNHVANPADEESTDMVIQVSTQCTNELRSALECAIREYRNMPSGLRPRLPRLPMHNKNKALVAALDMQLSNYFDNCKDLTDTHSIMYCAAVAACRVAHVKFPNSDVATRAKPAVPAWQCRIERRIGGARALIGKLICFREGNTRPRVMRFVRRAFSGTDISPRDYMPRVTERIDFLKQKVYAWANRIRRYKRRVERYTQNRAFQSNERWVYRAWERPDQGVTDTRLPDDDAMCSFWRNIWSVPVSHTEDSWTGELERACESITEMGAITISPQDVARAVRPLPNWKSPGPDGLHNFWIKWLQRSHARLASQYQAALESSSLPEFLTTGVTHLLHKSGSTAEPKNYGPITCLPTVYKVLTSILRDKINNHIDNNSIMSASQNGCRKGSRGTKELLLIDMAISQQVRRSRKDLSTCWIDYKKAYDSVPHTWLMRVLELYKVDATLRTFLMSCMRQWRTVLRYPGCRNIQRNSEPVRIERGIFQGDSLSPLWFCLALNPLSTLLENSGLGYRLKRGGQVISHLLYMDDLKLFAPNNLQLMELLKVTETFSSAIRMEFGVDKCAIMHIKRGEIVESVGTQLSDSIHLRSLSPTETYKYLGMSEALGINATVMKQSLKERFFGRLKKVLNSLLSGGNKVRAFNGWVMPVLMYAFGVLKWTQTELDALDRRVRTLLTAYRMHHPRSSVMRLYIPRKCGGRGFLNAKTLHNREVCSLREYFLSADVGMHRDVVAVDKGLAPLSLANENWRKPVVLDTNVRKEVWQSKELHGRFFRALHGPDVDKLASVAWLRVGDLFGKTEGFVCAIMDEVIMTNNYRRFIVKDGTVDICRACHRPGESIRHIISGCSRLANGEYLHRHNLVARIIHQQLALKYSLVESEVPYYRYVPDPVLDNGDITLYWDRSIITERTIVANKPDIVVVDRSERRAMIVDIFVPHDENLVKAEKDKQIKYIDLAREVVDMWEVDSAIIVPIVVSANGLIAKSLDQHLRRLSLGDWIKGLIQKAVLLDTARIVRRFLSLEP

SEQ ID NO: 10932 - protein, 1200 aa, Mythimna ferrago
MLTRAAARRARPPPPASSLSSASPPPEPSPIVSAVTPAVAAASSSSDEYYSPPTTPPPTRRRGGRRPPDCLGPRGPPASDRVPAPGGSVQRMRWTQSINENVMRSYYGATEGGNNLTAYRVLMLSLFQVLEPAVNVSAQRLSDQVRVILRNHMLDDTVLDRLRTEMSDRVITPPSQPVVPAVIPPSNYISFHTDEVSSDTVTNVSNQCNSELRSALECAIREYRNIPPELRPRIPRLPMCNKNRALVAALDSQLSNYFDDCEDLTDTHSIMYCAAVAACRVAHVKFPNSDVATRPKPAVPAWQCRIERRIGGARALIGKLICFREGNTRPRVMRFVRRAFSGTDISPRDYMSRVTERIDFLKQKVYAWANRIRRYKRRVERYTQNRTFRSNERWVYRAWERPDQGVTDARLPDDDAMSSFWRSIWSVPVSHTEGDWTREVERACDPIPQMGAIDISPQDVARAVRPLPNWKSPGPDGLHNFWIKWFTRSHARLAYQFQSALESGSLPQFLTTGITHLLHKSGSTAEPKNYRPITCLPTVYKVLTSILRSKINSHIDENSIMSPSQNGCRNGSRGTKELLLIDMTISQQVRRSRKDLSTCWIDYRKAYDSVPHTWLMRVLELYKIDTTLRTFLMSCMRQWSTALRYPGCRNIQRNSEPVRIERGIFQGDSLSPLWFCLALNPLSTLLENSGLGYRLKRGGQVISHLLYMDDLKLFAPNNLQLMELLKVTEIFSSAIKMEFGVDKCAVMHVKRGEVVESVSTQLTDSINLRSLSPTETYKYLGMSEALGISITGMKQSLRERFFGRLKRVFNSLLSGGNKVRAFNGWVMPVLMYSFGVLKWTQTELDALDRRVRTLLTAYRMHHPRSSVMRLYIPRKCGGRGFLNAKTLHNREVCSLREYFLAADVGMHRDVVAVDKGLTPLSLANENWRKPIVLDTNDRREVWQSKELHGRFFRALHGPDVDQLASVAWLRFGDLFGETEGFVCAIMDEVIMTNNYRRFIVKDGTVDICRACHRPGESIRHIISGCSRLANGENLHRHNLVARIIHQQLALKYSLVESEVPYYRYEPDPVLDNGHITLYWDRPIITDRTIVANKPDIVVVDRSERRAMIVDISVPHDENLVKAEKDKQIKYIDLAREVVDMWEVDSAVIVPIVVSANGLIAKSLDQHLRRLSLGDWIKGLIQKAVLLDTARIVRRFLSLEP

SEQ ID NO: 10933 - protein, 1200 aa, Mythimna ferrago
MLTRAAARRARPPPPASSLSSASPPPDPSPTVSAVTLAVAAASSSSDEYYSPPTTPPPARRRGGRRPPACFGPQGPPASDRVPAAGGSVPRMRWTQSTNENVMRAYYGATEGGNNLTAYRVRMLSLFQVLEPAVNVSAQRLSDQVRVIQRNHMLDDTVLDRLRTEMSNHVIAPSSQPVVPVMVPPSNHVANPADVESTDMVIQVSTQCTNELRSALECAIREYRNMPSVLRPRLPRLPMHNKNKALVAALDMQLSNYFDNCKDLTDAHSIMYCAAVAACRVAHVKFPNSDVATRPKPAVPAWQCRIERRIGGARALIGKLICFREGNTRPRVMRFVRRAFSGTDICPRDYMLRVTERIDFLKQKVYAWANRIRRYKRRVERYTQNRAFQSNERWVYRAWERPDQGVTDTRLPDDDAMCSFWRNIWSVPVSHTEGGWTREVEQACEPITEMGAITISPQDVARAVRPLPNWKSPGPDGLHNFWIKWLQRSHACLASQYQAALESSSLPEFLTTGVTHLLHKSGSTAEPKNYRPITCLPTVYKVLTSILRDKINNHIDNNSIMSASQNGCRKGSRGTKELLLIDMAISQQVRRSRKDLSTCWIDYKKAYDSVPHTWLMRVLELYKIDATLRTFLMSCMRQWRTVLRYPGCRNIQRSSEPVRIERGIFQGDSLSPLWFCLALNPLSTLLENSGLGYQLKRGGQVTSHLLYMDDLKLFAPNKLQLMELLKVTETFSSAIRMEFGVDKCAVMHVKRGEIVESVSTQLSDSISLRSLSATETYKYLGMSEALGINATDMKQSLRERFFGRLKKVFNSLLSGGNKVRAFNGWVMPVLMYSFGVLKWTQTELDALDRRVRSLLTANRMHHPRSSVMRLYIPRKCGGRGFLNAKTLHNREVCSLREYFLAADVGMHRDVVAVDKGLTPLSLANENWRKPVVLDTNDRKEVWQSKELHGRFFRALHGPDVDQLASVAWLRVGDLFGETEGFVCAIMDEVIMTKNYRRFIVKDGTVDICRACHRPGESIRHIISGCSRLANGEYLHRHNLVARIIHQQLALKYSLVESEVPYYRYVPDPVLDNGDITMYWDRSIITDRTIVANKLDIVVVDRSERRAMIVDISVPHDENLVKAEKDKQIKYIDLAREVVDMWDVDSAIIVPIVVSGNGLIAKSLDQHLRRLALGSWIKGLIQRAVLLDTARIVRRFLSLEP

SEQ ID NO: 10934 - protein, 1200 aa, Mythimna ferrago
MLTRAAARRARPPPPASSLSSASPPPEPSPIVSAVTPAVAAASSSSDEYYSPPTTPPPTRRRGGRRPPDCLGPRGPPASDRVPAPGGSVQRMRWTQSINENVMRSYYGATEGGNNLTAYRVLMLSLFQVLEPAVNVSAQRLSDQVRVILRNHMLDDTVLDRLRTEMSDRVITPPSQPVVPAVVPPSNYISFHTDEVSSDTVTNVSNQCNSELRSALECAIREYRNIPPELRPRIPRLPMCNKNRALVAALDSQLSNYFDDCEDLTDTHSIMYCAAVAACRVAHVKFPNSDVATRPKPAVPAWQCRIERRIGGARALIGKLICFREGNTRPRVMRFVRRAFSGTDISPRDYMSRVTERIDFLKQKVYAWANRIRRYKRRVERYTQNRTFRSNERWVYRAWERPDQGVTDARLPDDDAMSSFWRSIWSVPVSHTEGDWTREVERACDPIPQMGAIDISPQDVARAVRPLPNWKSPGPDGLHNFWIKWFTRSHARLAYQFQSALESGSLPQFLTTGITHLLHKSGSTAEPKNYRPITCLPTVYKVLTSILRSKINSHIDENSIMSPSQNGCRNGSRGTKELLLIDMTISQQVRRSRKDLSTCWIDYRKAYDSVPHTWLMRVLELYKIDTTLRTFLMSCMRQWSTVLRYPGCRNIQRNSEPVRIERGIFQGDSLSPLWFCLALNPLSTLLENSGLGYRLKRGGQVISHLLYMDDLKLFAPNNLQLMELLKVTEIFSSAIKMEFGVDKCAVMHVKRGEVVESVSTQLTDSINLRSLSPTETYKYLGMSEALGISITGMKQSLRERFFGRLKRVFNSLLSGGNKVRAFNGWVMPVLMYSFGVLKWTQTELDALDRRVRTLLTAYRMHHPRSSVMRLYIPRKCGGRGFLNAKTLHNREVCSLREYFLAADVGMHRDVVAVDKGLTPLSLANENWRKPIVLDTNDRREVWQSKELHGRFFRALHGPDVDQLASVAWLRFGDLFGETEGFVCAIMDEVIMTNNYRRFIVKDGTVDICRACHRPGESIRHIISGCSRLANGEYLHRHNLVARIIHQQLALKYSLVESEVPYYRYEPDPVLDNGHITLYWDRPIITDRTIVANKPDIVVVDRSERRAMIVDISVPHDENLVKAEKDKQIKYIDLAREVVDMWEVDSAVIVPIVVSANGLIAKSLDQHLRRLSLGDWIKGLIQKAVLLDTARIVRRFLSLEP

SEQ ID NO: 10935 - protein, 1200 aa, Mythimna ferrago
MLTRSRARSQIAQPTSSGSSLSSASQPPGPAPAVSPEIPVAAVASSSSDEYFSPPTTPPPARRRGRGRPPACLGPRGPPASDRVLAAGGSVQRMRWTQSINENVMRSYFGATEGGTNLTAYRGRMLSLFQVLEPAVNVSAQRLSDQVRVIQRNRMLDDAVLDRLRLESRNGRVSPISPPAAVQRQPNVSPRPDHVGEDDDDEAISVSTQCNARLRSALEDAFREYRSIPPELRPRLPRLPMHRKNRALVCALDSQLSNCFDSSEDLSDTHSILYCAAAAACRVAHVKIPNNDRATRPAKPAWQCRIERRIGEARALIGKLICFREGNTRPRVMRFVRRAFSGTDISPRDYLPRITERIDFLKQKVYAWANRIRRYKRRVERYTQNHTFQSNERWIYRAWERPDQSVIDTRLPDDDAMYSFWRSIWSVPVNHTEGDWTREIERECELIPEMGAINISPQDVACAVRPLPNWKSPGPDGLHNFWLKWFQSSHARLAFQFQSALESGSLPQFLTTGITHLLHKSGSTAEPKNYRPITCLPTVYKVLTSILRAKINNHIETNSIMSASQNGCRNGSRGTKELLLIDVAISQQVRRSRRDLSTCWIDYKKAYDSVPHTWLMRVLELYKVDATLRAFLMSCMGQWRTVLHYPGCRRVSENSEPLRIERGIFQGDSLSPLWFCLALNPLSTLLEGSGLGYRLRREGQVISHLLYMDDLKLFASNNLQLMELLKVTETFSSAIRMEFGLDKCAVMHVKRGEIMESVGTQLLDSIHLRSLCSTETYKYLGMSEALGINAADVKQSLRERFFGRLNKVLNSLLSGGNKVRAFNGWVMPVLMYSFGILKWTQTELDALDRRVRTLLTANRMHHPRSSVMRLYIPRKCGGRGFLNAKTLHNREVCSLREYFLETDVGMHRDVVAVDKGLTPLSLASENWRKPIVMDTNERKEVWKGKELHGRFYRALHGPDVDLLASVSWLRFGNLFGETEGFVFAIMDEVMMTNNYRKYIVKDGTVDICRACHRPGESIRHIISGCSHLANGDYLHRHNLVARIIHQQLALKYNLVESEVPYYKYVPDPVLENGSVTLYWDRSIITDRTIVANKPDIVVIDRLERRTMIVDIAVPHDENLVKAEKDKQTKYLDLAREVVDMWEVDRAIIVPIVVTANGLIAKSLDQHLRRLSLGSWIKGLIQKAVLLDTARIVRRFLSQEP

SEQ ID NO: 10936 - protein, 868 aa, Mythimna ferrago
MRFVRRAFSGTDISPRDYMSRVTERIDFLKQKVYAWANRIRRYKRRVERYIQNSTFRSNERWVYRAWERPDQGVTDTRPPDDDAMCSFWRNIWSVPVSHTEGGWTREVERACESVTEMGAITISPQDVARAVRPLPNWKSPGPDGLHNFWIKWLQRSHARLASQYQAALESGSLPEFLTTGVTHLLHKSGSTAEPKNYRPITCLPTVYKVLTSILRAKINHHVDNNAIMSASQNGCRNGSRGTKELLLIDMAISQQVRRSRKDLSTCWIDYKKAYDSVPHTWLMRVLELYKVDATLRTFLMSCMRQWKTVLRYPGCRNIQRNSEPVRIERGIFQGDSLSPLWFCLALNPLSTLLENSGLGYRLKRGGQVISHLLYMDDLKLFAPNNLQLMELLKVTETFSSAIRMEFGVDKCAVMHIKRGEIVESVGIQLSDSIHLRSLSPTETYKYLGMSEVLGINATDMKQSLRERFFGRLKKVLNSLLSGGNKVRAFNGWVMPVLMYAFGVLKWTQTELDALDRRVRTLLTAYRMHHPRSSVMRLYIPRKCGGRGFLNAKSLHNREVCSLREYFLAADGGMHRDVVAVDKGLTPLSLANENWRKPVVLDTNVRREVWQSKELHGRFFRALHGPDVDQLASVAWLRVGDLFGETEGFVCAIMDEVIMTNNYRRFIVKDGTVDICRACHRPGESIRHIISGCSRLANGEYLHRHNLVARIIHQQLALKYSLVQSEVPYYRYVPDPVLDSGDITLYWDRSIITDRTIVANKPDIVVVDRSERRAMIVDISVPHDENLAKAEKDKQIKYIDLAREVVDMWEVDSAIIVPIVVSANGLIAKSLDQHLRRLSLGDWIKGLIQKAVLLDTARIVRRFLSLEP

SEQ ID NO: 10937 - protein, 1193 aa, Eilema sororculum
MLTRAQANRNKSAPITSPDSSLSSAAQPPAVEPAASSSSSSDEFFSPPTSPTPVRRPGRGRPPTCLGPRGPPASNRAPATGGNVRRMRWTSSMNENVMRAYFAATEGGTNLTAYRVRMLPLFQVLEPGVNVSAQRLSDQVRVIQRNQLLDGDALERLRLECLRSNPVISPTPALLQSESTQVLNSVNVVGDDRVITVVTECNEEVKVALECAIREYRSMPINIRPRLPRLPMHKKNLMLMSALDSLLPVYFDSSESLSDTHSILYCAAVAACRLARVKFSAHAPAPRQKPAVPAWQRRIEERIAEARVLIGKLTCFRSGNARPRVMRFVNRAFSGTGISPPEYIARVTERIDLLKQKIYAWANRVRRYKKRVYRFNVNRTFQRDQRWVYRSWDRPNKDVSSGCLPSADETNMFWRSIWSAPVAHVEGDWTRDVERACAGIPDMEFVNIDDSDVASAVRPLSNWKSPGPDGLHNFWIKWLRSSHARLASQFQAAIESGSLPIFMTTGVTHLLHKTGSTSNPSNYRPITCLPSVYKLLTSILRDKITKHISTNTVMSASQNGCRSGARGTKELLLIDMAISQQVRRSRKNLSICWIDYKKAFDSVPHTWLLRVLELYKVDTTLCIFLASCMRQWRTVLSYPGCREVCSNGEPINIERGIFQGDSLSPLWFCLALNPLSTLLGNSGLGYRLRGGGQIISHLLYMDDLKLFATSSSQLVDLLKITKSFSDSIKMEFGVDKCAVMHVKRGGTVESEGIQLSDAIHLKSLLVTDTYKYLGMSQALGINEADMKQSLRERFFGRLKKVLNSLLSGGNKVRAYNGWVMPLLIYSFGILKWTQTELDAIDRRVRTLLTTYRMHHPRSSVMRLYIPRKCGGRGFLNAKNLHNREVYNLREYFLRVNEDMHRDVVAVDVSLTPLKLAKENWCKPVVLSISDRQEVWQSKELHGRFYRALHGPDVDLLASVAWLRFGDLFGETEGFACAIADEVIMTKNYRKYILRDGTVDICRACHQPGESLRHIVSGCSRLANSEYLHRHNQVARIIHQQLALLYQLVDAEVPYYRYVAEPVLENGHITLYWDRSIITDRTVVANKPDIVVIDRSERRAMIVDVTIPHDENLVKAEKDKQIKYLDLVHEIVDMWEVDSAIIVPIVITVNGLVAKSLDQHLKRLALGSWIKGLIQKAVLLDTARIVRKFLSLEP

SEQ ID NO: 10938 - protein, 920 aa, Eilema sororculum
MAGAKFPIKDPAIRPKSAIPAWQCRIERRVAEARVLIGKLICFRSGNTRPRVMRYVTRAFAGTDISPQDYTSRVTERIDFLKQKVYAWANRIRRYKRRVDRYTVNHMFQRDQRWVYRSWERTDESVDDVRRPDAEATNAFWRSIWSVPVSHTEGDWMREVERACETIPEMEEIYIDATDVDCAVRSLSNWKSPGPDGLHNFWLKWLRSSHVVLASQFQSAIESGTLPAFMTTGVTHLLHKTGSTLEPNNYRPITCLPTVYKLLTSILRAKINNHINNNSIMCASQNGCRNGARGTKELLLIDMAISQQARRNRKDLTACWIDYKKAFDSVPHTWLLRVLELYKVNTTLCTFLRSCMGQWRTVLFCPGCRQALGGGVPITIERGIFQGDSLSPLWFCLALNPLSTLLVNSGLGYRLRREGQTVSHLFYMDDLKLFAHTNPQLIALLKVTETFSNSIKMAFGVDKCAVIHVKRGRVVESEGIQLSDSTNLRSLLVTETYKYLGMSQALCINEVDMKQMLQERFFGRLKKVLNSLLSGGNKVRACNSWVMPLLMYSFGILRWTQTELDTIDRKVRTQLTAFRMHHPRSSVMRLYIPRKCGGRGFLNAKTLHNREVCNLRDYFLKSNVDMHRDVVNVDTGLTPLGLAKENWRRPTIVGTDSRREVWQSKELHGRFYGALHRPEVDLLASVSWLRFSDLFGETEGFVCAIADEVIKTNNYRKYIMRDGTIDICRACHQPGESLRHITSGCSRLANGEYLHRHNQVARIIHQRLALKYNLVEFEVPYYRYVPEPVLENTHITLYWDRSIITDRTVVANKPDIVVIDRSERRALIVDVTIPHDENLVKAEKDKQVKYLDLAHEVVDMWNVDSAIIVPIVVSVNGLIAKSLDQHLKRLGLDGWVKGQMQKAVLLDTARIVRKFLSLEP

SEQ ID NO: 10939 - protein, 1196 aa, Eilema sororculum
MLTRAKTKIIIQDAHLTPTDSSCSSASQAPGTTSPRPTPVEASSSDEYFSPPTSPTPVRRPGRGRPPTCLGPRRPPASNRAPAAGGNVHRMRWTNSINENVMRAYFAATEGGTNLSAYRSRMLPLFQALEPSVNTSAQRLSDQVRVIQRNHTLNETVLETLRQECLRNICVTPALAPAPASTTALNEDSHVTRDDTPIPVSIQYNEEIKEALEYALREYRSMPIHVRPRLPRLPIHRRNIALVSALDSLLPKYLENSENLGDTHSILYCTAVAACRMAGAKFPIKDPAIRPKPAIPAWQCRIERRVAEARVLIGKLICFRSGNTRPRVMRYVTRAFAGANISPQDYTSRVTERIDFLKQKVCAWANRIRRYKKRVDRYTVNRMFQRDQRWVYRSWERTDESVDDLRRPDAEATNAFWRSIWSVPVSHTEGDWMREVERACETIPEMEEIYIDATDVDCAVRSLSNWKSPGPDGLHNFWLKWLRSSHVVLASQFQSAIESGTLPAFMTTGVTHLLHKTGSTLEPNNYRPITCLPTVYKLLTSILRAKINNHINNNSIMCTSQNGCRNGARGTKELLLIDMTISQQARRNRKDLVACWIDYKKAFDSVPHTWLLRVLELYKVNTTLCTFLRSCMGQWRTVLLYPGCRQALGSGEPITIERGIFQGDSLSPLWFCLALNPLSTLLVNSGLGYRLRREGQMVSHLFYMDDLKLFAQTNPQLIALLKVTETFSNSIKMAFGVDKCAVIHVKRGRVVESEGIQLSDSTNLRSLLVTETYKYLGMSQALCINEVGMKQMLQERFFGRLKKVLNSLLSGGNKVRACNSWVMPLLMYSFGILKWTQTELDTIDRKVRTQLTAFRMHHPRSSVMRLYIPRKCGGRGFLNAKTLHNREVCNLRDYFLKSNVDMHRDVVNVDTGLTPLGLAKENWRRPTIVGTDSRREVWQSKELHGRFYRALHRPEVDLLASVSWLRFSDLFGETEGFVCAIADEVIKTNNYRKYIMRDGTIDICRACHQPGESLRHITSGCSRLANGEYLHRHNQVARIIHQRLALKYNLVEVEVPYYRYVPEPVLENSHITLYWDRSIITDRTVVANKPDIVVIDRSERRALIVDVTIPHDENLVKAEKDKQVKYLDLAHEVVDMWNVDSAIIVPIVVSVNGLIAKSLDQHLKRLGLDGWVKGQMQKAVLLDTARIVRKFLSLEP

SEQ ID NO: 10940 - protein, 1193 aa, Eilema sororculum
MLTRAQANRNKSAPITSPDSSLSSAAQPPAVEPAASSSSSSDEFFSPPTSPTPVRRPGRGRPPTCLGPRGPPASNRAPATGGNVRRMRWTSSMNENVMRAYFAATEGGTNLTAYRVRMLPLFQVLEPGVNVSAQRLSDQVRVIQRNQLLDGDALERLRLECLRSNPVISPTPALLQSESTQVLNSVNVVGDDRVITVVTECNEEVKVALECAIREYRSMPINIRPRLPRLPMHKKNLMLMSALDSLLPVYFDSSESLSDTHSILYCAAVAACRLARVKFSAHAPAPRQKPAVPAWQRRIEARIAEARVLIGKLTCFRSGNARPRVMRFVNRAFSGTGISPPEYIARVTERIDLLKQKIYAWANRVRRYKKRVDRFSVNRTFQRDQRWVYRSWDRPNKDVSSGCLPSADETNMFWRSIWSAPVAHVEGDWTRDVERACAGIPDMEFVNIDDSDVASAVRPLSNWKSPGPDGLHNFWIKWLRSSHARLASQFQAAIESGSLPIFMTTGVTHLLHKTGSTSNPSNYRPITCLPSVYKLLTSILRDKITKHISTNTVMSASQNGCRSGARGTKELLLIDMAISQQVRRSRKNLSICWIDYKKAFDSVPHTWLLRVLELYKVDTTLCIFLASCMRQWRTVLSYPGCREVCSNGEPINIERGIFQGDSLSPLWFCLALNPLSTLLGNSGLGYRLRGGGQIISHLLYMDDLKLFATSSSQLVDLLKITKSFSDSIKMEFGVDKCAVMHVKRGRTVESEGIQLSDAIHLKSLLVTDTYKYLGMSQALGINEADMKQSLRERFFGRLKKVLNSLLSGGNKVRAYNGWVMPLLIYSFGILKWTQTELDAIDRRVRTLLTTYRMHHPRSSVMRLYIPRKCGGRGFLNAKNLHNREVYNLREYFLRVNEDMHRDVVAVDVSLTPLKLAKENWCKPVVLSISDRQEVWQSKELHGRFYRALHGPDVDLLASVAWLRFGDLFGETEGFACAIADEVIMTKNYRKYILRDGTVDICRACHQPGESLRHIVSGCSRLANSEYLHRHNQVARIIHQQLALLYQLVDAEVPYYRYVAEPVLENGHITLYWDRSIITDRTVVANKPDIVVIDRSERRAMIVDVTIPHDENLVKAEKDKQIKYLDLAHEIVDMWEVDSAIIVPIVITVNGLVAKSLDQHLKRLALGSWIKGLIQKAVLLDTARIVRKFLSLEP

SEQ ID NO: 10941 - protein, 1106 aa, Eilema sororculum
MRWTTSINENVMRAYFAATEGGTNLSAYRTRMLPLFQALEPSINTSAQRLSDQVRVIQRNHMLNETVLETLRLECLRNICVTPAPAPAPASTAERNDDTRVAPDDTPIPVSIQYNEEIKEALECALREYRSMPVHVRPRLPRLPIHRRNIALVSALDSLLPRYLENSENLGDTHSILYCTAVAACRMAGAKFPIKDPAIRPKFTIPAWQCRIERRVAEARVLIGKLICFRSGNTRPRVMRYVTRAFAGTDISPQDYASRVTERIDFLKQKVYAWANRIRRYKKRVDRYTVNRMFQRDQRWVYRSWERTDESVDDVRRPDAEATNAFWRSIWSVPVSHTEGDWMREVERACETIPEMEEIYIDATDVDCAVRSLSNWKSPGPDGLHNFWLKWLRSSHVVLASQFQSAIESGTLPAFMTTGVTHLLHKTGSTLEPNNYRPITCLPTVYKLLTSILRAKINNHINNNSIMCASQNGCRNGARVTKELLLIDMAISQQARRNRKDLTACWIDYKKAFDSVPHTWLLRVLELYKVNTTLCTFLRSCMRQWRTVLFYPGCRQALGGGVPITIERGIFQGDSLSPLWFCLALNPLSALLVNSGLGYRLRREGQMVSHLFYMDDLKLFAHTNPQLIALLKITETFSNSIKMAFGVDKCAVIHVKRGRVVESESIQLSDSTNLRSLLVTETYKYLGMSQALCINEVDMKQMLQERFFGRLKKVLNSLLSGGNKVRACNSWVMPLLMYSFGILKWTQTELDTIDRKVRTQLTAFRMHHPRSSVMRLYIPRKCGVRGFLNAKTLHNREVCNLRDYFLKSNVDMHCDVVNVDTGLTPLGLAKENWRRPTIISTDSRREVWQSKELHGRFYRALHRPEVDLLASISWLRFSDLFGETEGFVCAIADEVIKTNNYRKYIMRDGTIDICRACHQPGESLRHITSGCSRLANGEYLHRHNQVARIIHQRLALKYNLVEVEVPYYRYVPEPVLENSHITLYWDRSIITDRTVVANKPDIVVIDRSERRALIVDVTIPHDENLVKAETDKQVKYLDLAHEVVDMWNVDSAIIVPIVVSVNGLIAKSLDQHLKRLGLDGWVKGQMQKAVLLDTARIVRKFLSLEP

SEQ ID NO: 10942 - protein, 1196 aa, Eilema sororculum
MLTRAKTKIIIQDAHLTPTDSSCSSASQAPGTTSPRPTPVEASSSDEYFSPPTSPTPVRRPGRGRPPTCLGPRRPPASNRAPAAGGNVHRMRWTNSINENVMRAYFAATEGGTNLSAYRSRMLPLFQALEPSVNTSAQRLSDQVRVIQRNHMLNETVLETLRQECLRNICVTPALAPAPASTTALNEDSHVTRDDTPIPVSIQYNEEIKEALEYALREYRSMPIHVRPRLPRLPIHRRNIALVSALDSLLPKYLENSENLGDTHSILYCTAVAACRMAGAKFPIKDPAIRPKPAIPAWQCRIERRVAEARVLIGKLICFRSGNTRPRVMRYVTRAFAGTNISPQDYMSRVTERIDFLKQKVCAWANRIRRYKKRVDRYTVNRMFQRDQRWVYRSWERTDESVDDLRRPDAEATNAFWRSIWSVPVSHTEGDWMREVERACETIPEMEEIYIDVTDVDCAVRSLSNWKSPGPDGLHNFWLKWLRSSHVVLASQFQSAIESGTLPAFMTTGVTHLLHKTGSTLEPNNYRPITCLPTVYKLLTSILRAKINNHINNNSIMCTSQNGCRNGARGTKELLLIDMTISQQARRNRKDLVACWIDYKKAFDSVPHTWLLRVLELYKVNTTLCTFLRSCMGQWRTVLLYPGCRQALGSGEPITIERGIFQGDSLSPLWFCLALNPLSTLLVNSGLGYRLRREGQMVSHLFYMDDLKLFAHTNPQLIALLKVTETFSNSIKMAFGVDKCAVIHVKRGRVVESEGIQLSDSTNLRSLLVTETYKYLGMSQALCINEVGMKQMLQERFFGRLKKVLNSLLSGGNKVRACNSWVMPLLMYSFGILKWTQTELDTIDRKVRTQLTAFRMHHPRSSVMRLYIPRKCGGRGFLNAKTLHNREVCNLRDYFLKSNVDMHRDVVNVDTGLTPLGLAKENWRRPTIVGTDSRREVWQSKELHGRFYRALHRPEVDLLASVSWLRFSDLFGETEGFVCAIADEVIKTNNYRKYIMRDGTIDICRACHQPGESLRHITSGCSRLANGEYLHRHNQVARIIHQRLALKYNLVEVEVPYYRYVPEPVLENSHITLYWDRSIITDRTVVANKPDIVVIDRSERRALIVDVTIPHDENLVKAEKDKQVKYLDLAHEVVDMWNVDSAIIVPIVVSVNGLIAKSLDQHLKRLGLDGWVKGQMQKAVLLDTARIVRKFLSLEP

SEQ ID NO: 10943 - protein, 1107 aa, Eilema depressum
MRWTPSINENVMRAYFAATEGGTNLSAYRTRMLPLFQALEPSVNTSSQRLSDQVRVIQRNRMLNETVLETLRQECLRNICVTPAPAPASTPAPVPVSHMNEETGDDTLIPVSIQYNEQIKEALEYALREYRSMPLNDRPRLPRLPIHRRNMALVGALDSLLPGYLDNSENLGDTHSILYCTAVAACRMAGVKFPNKDPAIRPKSTIPAWQCRIERRVAEARVLISKLICFRSGNTRPRVMRYVTRAFAGTGISPQEYTSRITERIDFLKQKVCAWANRIRRYRKRVDRFTVNRMFRRDQRWVYRSWEQPDESVDDVRRPEAAATNTFWRSIWSVPVSHIEGDWMCEVERACESIPEMEDIYIDAIDVDCAVRPLSNWKSPGPDGLHNFWLKWLRSSHALLASQFQSAVESGTLPAFMTTGVTHLLHKTGSTLEPNNYRPITCLPTVYKLLTSILRVKINNHINNNSIMCASQNGCRNGARGTKELLLIDMAISQQARRRTKDLAACWIDYKKAFDSVPHTWLLRVLELYKVNATLCTFLRSCMRQWRTVLFYPGCCQALGDGEPITIERGIFQGDSLSPLWFCLALNPLSTLLVNSGLGYRLRREGQMVSHLLYMDDLKLFAHTNPQLMALLKITENFSNSIKMGFGVEKCAVIHVKRGRVVESQGIQLSDSTSLRSLLVTETYKYLGMSQALCINEAGMKQMLQERFFGRLKKVLNSLLSGGNKVRACNSWVMPLLMYSFGILKWTQTELDTIDRRVRTQLTAFRMHHPRSSVMRLYIPRKCGGRGFLNAKTLHNREVCNLRDYFLKSNVDMHRDVVSVDTGLTPLGLAKENWRRPIVVGTDSRREVWQSKELHGRFYRALHRPEVDLLASVSWLRFGDLFGETEGFVCAIADEVIKTNNYRKYIMRDGTIDICRACHQPGESLRHITSGCSRLANGEYLHRHNQVARIIHQRLALKYNLVELEVPYYRYVPEPVLENSHITLYWDRSIITDRTVVANKPDIVVIDRSERRALIVDVTIPHDENLVKAEKDKQVKYLDLAHEIVDMWNVDSAIIVPIVVTVNGLIAKSLDQHLKRLGLDGWVKGQMQKAVLLDTARIVRKFLSLEP

SEQ ID NO: 10944 - protein, 1212 aa, Ptilodon capucinus
MTDAPRRNPRRQCRQRSAVRHYAQSTPPDQSPRSASPSPASIIRTSVTAVASSESDEYFSPPTSPPPVRRQRGRPPGHLGLLGQPAPNRVLVPSGVVRRMRWTSSMNENVMRAYYEATEGGTNLTAYRNRMLPLFQSLEPAVNVSAQRLSDQVRVIQRGNMLADTVLDRLRSEVQSRRVVPVASSQPAAQPVASATVTSRLAADSDVDRDNAPIDVSTQYNDLLRSTLEDVVREYRSMPNHLRPRIPRLPMHNGNRALVGALDSLLSIYFDSSDDLVDTHSILYCAAITVCRVARVKVFNTDTATRPKPAVPAWQCRIERRISEARALIGKLSCFREGNTRPRVMRFVKRAFAGTDVSPREYISRVTERIDFLKQKIYAWANRIRRYKARVDRYSQNSMFQRDQRWVYRSWERPNEPVSELQRPDDNAMTTFWRDIWSVPVTHYEGNWIGDVERMCEPIKEMEAISIGPLDVANAVRSLPNWKAPGPDGLHNFWLKWLRSSHVRLASQFQSALQSGSLPEFITTGVTHLLHKTGSTTDPKNYRPITCLPTIYKTLTSILRVKIARHVEDNSIMSASQNGCRSGSRGTKELLLIDMTICQQARRNRKDLSTCWIDYKKAYDSVPHTWLVRVLELYKIDTTLRTFLESCMRQWKTVLLCPGSRQILGNGEPIRIERGIFQGDSLSPLWFCLALNPLSALLEESGFGFRLRRGGQVISHLLYMDDLKLFAPTALQLSGLLKVTETFSNSIRMEFGVDKCAVMHAKQGRMVESEGIQLSDSIQLRSLAATETYKYLGMSQGLGISETDMKQLLRDRFLGRLKKVLKSLLSGGNKVRAYNGWVMPVLMYSFGILKWTQTELDTLDRTVRTTLTAYRMHHPRSSVMRLYIPRKCGGRGFLNVKTLHNREICSLREYFLRADGEMHVDVVAVDNGLTPLSLAKENWRKPVVLTTDDRRVVWQGKELHGRYYRALHGPDVDLAASVAWLRFGDLFGETEGFVCAIMDEVVMTNNYRRYILRDGTIDICRACHRPGESLRHIISGCSRLANGQYLHRHNQVARIVHQQLALKYRLVTSEVPYYRYEPQPVLEEGHITLYWDRSIITDRTIVANKPDIVLIDRQERRAMIIDITVPHDENLVKAEKDKESKYLDLAHEVVDMWDIDAAIIVPIVVSAHGLLAKSLDKHLKRLALGSWIKGQIQKAVLLETARIVRKFLSLEP

SEQ ID NO: 10945 - protein, 1212 aa, Ptilodon capucinus
MTDAPRRNPRRLCRQRTVNEPNAQSTPPDPSPRSASPSPASIIRTSVTAVASSESDEYFSPPTSPPPVRQQRGRPPGHLGLLGQPAPNRVLVPSGVVRRMRWTSSINENVMRAYYEATEGGTNLTAYRNRMLPLFQSLEPAVNVSAQRLSDQVRVIQRGNMLADTVLDRLRSEMQSRRVVPVASSQPAAQPVASATVTSRLAADSDVDRDNAPINVSNQYNELLRSTLEDVVRVYRSMPNHLRPRIPRLPMHKGNRALVGALDSLLSIYFDSSDNLADTHSILYCAAITVCRVARVKVFNTDTATRPKPAVPAWQCRIERRISEARALIGKLSCFREGNTRPRVMRFVKRAFAGTDVSPREYISHVTERIDFLKQKIYAWANRIRRYKVRVDRYSQNSMFQRDQRWVYRSWERPSEPVSELQRPDDNATTTFWRDIWSVPVTHYEGDWIGDVERMCEPIKEMEAISIGPLDVANAVRSLPNWKAPGPDGLHNFWLKWLRSSHVRLASQFQSALQSGSLPEFITTGVTHLLHKTGSTTDPKNYRPITCLPTIYKTLTSILRAKIARHVEDNSIMSASQNGCRSGSRGTKELLLIDMTICQQARRNRKDLSTCWIDYKKAYDSVPHTWLVRVLELYKIDTTLRTFLESCMRQWKTVLLCPGSRQILGNGEPIRIERGIFQGDSLSPLWFCLALNPLSTLLEESGFGFRLRRGGQVISHLLYMDDLKLFAPTALRLTGLLKVTETFSNSIRMEFGVDKCAVMHAKQGRLVESEGIQLSDSIQLRTLAATETYKYLGMSQGLGISETDMKQLLRDRFLGRLKKVLKSLLSGGNKVRAYNGWVMPVLMYSFGILKWTQTELDTLDRTVRTTLTSYRMHHPRSSVMRLYIPRKCGGRGFLNVKTLHNREICSLREYFLRADGEMHVDVVAVDNGLTPLSLAKENWRKPVVLTTDDRRLVWQGKELHGRYYRALHGPDVDLAASVAWLRFGDLFGETEGFVCAIMDEVVMTNNYRKYILRDGTIDICRACHRPGESLRHIISGCSRLANGQYLHRHNQVARIIHQQLALKYRLVTSEVPYYRYEPQPVLEDGHISLYWDRSIITDRTIVANKPDIVLIDRQERRAIIVDITVPHDENLVKAEKDKESKYLDLAHEVVDMWHIDAAIIVPIVVSAHGILAKSLDKHLKRLALGGWIKGQIQKAVLLETARIVRKFLSLEP

SEQ ID NO: 10946 - protein, 1212 aa, Ptilodon capucinus
MTDAPRRNPRRLCRQRTVNEPNAQSTPPDPSPRSASPSPASIIRTSVTAVASSESDEYFSPPTSPPPVRQQRGRPPGHLGLLGQPAPNRVLVPSGVVRRMRWTSSINENVMRAYYEATEGGTNLTAYRNRMLPLFQSLEPAVNVSAQRLSDQVRVIQRGNMLADTVLDRLRSEMQSRRVVPVASSQPAAQPVASATVTSRLATDSDVDRDNAPINVSNQYNELLRSTLEDVVQVYRSMPNHLRPRIPRLPMHKGNRALVGALDSLLSIYFDSSDNLADTHSILYCAAITVCRVARVKVFNTDTATRPKPAVPAWQCRIERRISEARALIGKLSCFREGNTRPRVMRFVKRAFAGTDVSPREYISRVTERIDFLKQKIYAWANRIRRYKVRVDRYSQNSMFQRDQIWVYRSWERPSEPVSELQRPDDNATTTFWRDIWSVPVTHYEGDWIGDVERMCEPIKEMEAISIGPLDVANAVRSLPNWKAPGPDGLHNFWLKWLRSSHVRLASQFQSALQSGSLPEFITTGVTHLLHKTGSTTDPKNYRPITCLPTIYKTLTSILRAKIARHVEDNSIMSASQNGCRSGSRGTKELLLIDMTICQQARRNRKDLSTCWIDYKKAYDSVPHTWLVRVLELYKIDTTLRTFLESCMRQWKTVLLCPGSRQILGNGEPIRIERGIFQGDSLSPLWFCLALNPLSTLLEESGFGFRLRRGGQVISHLLYMDDLKLFAPTALQLTGLLKVTETFSNSIRMEFGVDKCAVMHAKQGRLVESEGIQLSDSIQLRSLAATETYKYLGMSQGLGISETDMKQLLRDRFLGRLKKVLKSLLSGGNKVRAYNGWVMPVLMYSFGILKWTQTELDTLDRTVRTTLTSYRMHHPRSSVMRLYIPRKCGGRGFLNVKTLHNREICSLREYFLRADGEMHVDVVAVDNGLTPLSLAKENWRKPVVLTTDDRRLVWQGKELHGRYYRALHGPDVDLAASVAWLRFGDLFGETEGFVCAIMDEVVMTNNCRKYILRDGTIDICRACHRPGESLRHIISGCSRLANGQYLHRHNQVARIIHQQLALKYRLVTPEVPYYRYEPQPVLEEGHISLYWDRSIITDRTIVANKPDIVLIDRQERRAMIVDITVPHDENLVKAEKDKESKYLDLAHEVVDMWDIDAAIIVPIVVSAHGLLAKSLDKHLKRLALGGWIKGQIQKAVLLETARIVRKFLSLEP

SEQ ID NO: 10947 - protein, 1204 aa, Agrochola circellaris
MLTRSRARRLIDTHPTPSDSSLSSASQLPDPAPDVSPVIPAAAAASSSSDEYFSPPTSPPPARRGRGRPPASLGLRGPPASDRVPAPGGSVRRMRWTQTVNENVMRAYFGATEGGSNLTAYRGRMLSLFQVLEPAVNVSAQRLSDQVRVIQRNHMLDDAVLDRLRLESRNNRVTPASPLVAVQLQNSLSATPRPDHVGEEVDDGVISVSSQCNAQLRNALEDAFREYRSTPPGLRPRLPRLPMHKKNKALVCTLDSLLSNYFDGSKDLADTHSILYCAAVAACRVAHVKFPSSDRAPRPKPAVPAWQCRIERRIGEARVLIGKLICFREGNTRPRVMRFVKRAFSGTDTSSRDYLTRVTERIDFLKQKICAWANRIRRYRRRVERYTQNRTFQSDERWVYRAWERLDQGVIDTRLPDDDAMCSFWRSLWSAPVNHTEGDWTGKIERACERIPEMGAINISPQDVACAVRPLPNWKSPGPDGLHNFWIKWLQRSHARLASQFQSALESGSLPQFLTTGITHLLHKSGSTAEPKNYRPITCLPTVYKVFTSILRTKINKHIDTNSIMSVSQNGCKNGSRGTKELLLIDMAINQQVRRSRRDLSTCWIDYKKAYDSVPHTWLMRVLELYKVDATLRTFLISCMGQWKTVLRYPGCRQIQRNSEPIRIERGIFQGDSLSPLWFCLALNPLSTLLEDSGLGYRLRRGGQVISHLLYMDDLKLFAPNNLLLVELLKVTETFSSAIRMEFGVDKCAVMHVKRGGIVESGGTQLPDSIHLRSLSSIETYKYLGMSEALGINTADMKQSLKERFFDRLNKVLNSLLSGGNKVRAFNGWVMPVLMYSFGILKWTQTELDALDRRVRTLLTVNRMHHPRSSVMRLYIPRKCGGRGFLNAKTLHNREVCSLREYFLEADVGMHRDVVSVDKSLTPLSLASENWRKPIVLDTNDRREVWQSKELHGRFYRALHGPDVDLLASVSWLRFGDLFGETEGFVFAIMDEVMMTNNYRKYIVKDGTVDICRACHRPGESIRHIISGCSRLANGDYLHRHNLVARIIHQQLALKYNLVESEVPYYKYVPDPVLENGNITLYWDRSIITDRTIVANKPDIVVIDRLERRTMIIDIAVPHDENLVKAEKDKQIKYLDLAREVVDMWDVDTAVIVPIVVTANGIIAKSLDQHLRRLSLGSWIKGLIQKAVLLDTARIVRRFLSQEP

SEQ ID NO: 10948 - protein, 1204 aa, Agrochola circellaris
MLTRSRARRLIDTHPTPSDSSLSSASQLPDPAPDVSPVIPAAAAASSSSDEYFSPPTSPPPARRGRGRPPASLGLRGPPASDRVPAPGGSVRRMRWTQTVNENVMRAYFGATEGGSNLTAYRGRMLSLFQVLEPAVNVSAQRLSDQVRVIQRNHMLDDAVLDRLRLESRNNRVTPASPLVAVQLQNSLSATPRPDHVGEEVDDGVISVSSQCNARLRNALEDAFREYRSTPPGLRPRLPRLPMHKKNKALVCTLDSLLSNYFDGSKDLADTHSILYCAAVAACRVAHVKFPSSDRAPRPKPAVPAWQCRIERRIGEARVLIGKLICFREGNTRPRVMRFVKRAFSGTDTSSRDYLTRVTERIDFLKQKICAWANRIRRYRRRVERYTQNRTFQSDERWVYRAWERLDQGVIDTRLPDDDAMCSFWRSLWSAPVNHTEGDWTGKIERACERIPEMGAINISPQDVACAVRPWPNWKSPGPDGLHNFWIKWLQRSHARLASQFQSALESGSLPQFLTTGITHLLHKSGSTAEPKNYRPITCLPTVYKVFTSILRTKINKHIDTNSIMSVSQNGCKNGSRGTKELLLIDMAINQQVRRSRRDLSTCWIDYKKAYDSVPHTWLMRVLELYKVDATLRTFLISCMGQWRTVLRYPGCRQIQRNSEPIRIERGIFQGDSLSPLWFCLALNPLSTLLEDSGLGYRLRRGGQVISHLLYMDDLKLFAPNNLQLVELLKVTETFSSAIRMEFGVDKCAVMHVKRGGIVESGGTQLPDSIHLRSLSSIETYKYLGMSEALGINTADMKQSLKERFFDRLNKVLNSLLSGGNKVRAFNGWVMPVLMYSFGILKWTQTELDALDRRVRTLLTVNRMHHPRSSVMRLYIPRKCGGRGFLNAKTLHNREVCSLREYFLEADVGMHRDVVSVDKGLTPLSLANENWRKPIVLDTNDRREVWQSKELHGRFYRALHGPDVDLLASVSWLRFGDLFGETEGFVFAIMDEVMMTNNYRKYIVKDGTVDICRACHRPGESIRHIISGCSRLANGDYLQRHNLVARIIHQQLALKYNLVESEVPYYKYVPDPVLENGNITLYWDRSIITDRTIVANKPDIVVIDRLERRTMIIDIAVPHDENLVKAEKDKQIKYLDLAREVVDMWDVDTAVIVPIVVTANGVIAKSLDQHLRRLSLGSWIKGLIQKAVLLDTARIVRRFLSQEP

SEQ ID NO: 10949 - protein, 1205 aa, Amphipyra tragopoginis
MLTRSRAKTLQRTHPTPSASSLSSASQPPEPASIVSDVTPAAAVASSSSDEYFSPATTPPPARRRGRGRPPACLGPRGPPASDRVPAPGGSVQRMRWTQSMNENCMRAYFGATEGGTNLTAYRGRMLSLFRTLEPAVNVSAQRLSDQVRVIQRDHRLDDAALDRLHDEMQNSRATPPPSQIRTQPLVPPAVPLQPNHADEEEEDRAISAGTQYSEIMRSALEDALREFRSTPPELRPRLPRLPMHNKNRALVCALDSLLSNVLESSEDLGDTHSILYCAAVAACRVAHVKFPNDNRATRPKSTVPAWQCRIERRIDEARVLIGKLTCFREGNRRPRVMRFVGRAFSGTDISPREYVSRITERIDFLKQKVCAWANRIRRYRRRVDRYTQNRIFQGDQRWVYRTWERPDQGVSDTHLPDNDVMNAFWRNIWSVPVTHTEGDWMQEVQRACEPIQEMGAVTIGPQDVTSAVRPMPNWKSHGPDGLHNFWIKWLRSSHARLASQFQSSLESGSLPSFLTTGVTHLLFKSGSTAEPKNYRPITCLPTGYKLLTSILRAKINNHIDNNAIMSDSQNGCRNGSRGTKELLLIDMAISQQVRRSRKDLSTCWIDYKKAYDSVPHTWLMRVLELYKINATLRAFLMSCMGQWRTVLHYPGCRQIQGNGELIRIERGIFQGDSLSPLWFCLALNPLSTLLEGSGLGYRLRRGGQVISHLLYMDDLKLFAPNNLQLVELLKVTETFSNSIRMEFGVDKCAVMHVQRGRIMESVGTQLSDSIHLRSLSSTETYKYLGMSEALGINEADMKQSLKERFFGRLIKVLKSLLSGGNKVRAFNGWVMPVLMYSFGILRWTQTELDALDRRVRTLLTAYRMHHPRSSVMRLYIPRKCGGRGFLNAKTLHNREVCSLREYFSQADVGMHRDVVAVDKGLTPLSLAKENWRKPVVLDTNGRREVWRSKELHGRFYRALHGPDVDFLASVAWLRFGDLFGETEGFVCAIMDEVIMTNNYRKYIVKDGTVDICRACHCPGESIRHIVSGCSRLANGEYLHRHNLVARIIHQQLALKYNLVDTEVPYYKYVPDPVLENGHVTLYWDRSIITDRTIVANKPDIVVIDRLERRTMIVDIAVPHDENLVKAENDKKIKYLDLAHEVVDMWDVDSAVVVPIVVTANGLIAKSLDQHLMRLSLGGWIKGLIQKAVLLDTARIVRKFLSLEP

SEQ ID NO: 10950 - protein, 917 aa, Amphipyra tragopoginis
MRYTDNERATRPKNAVPAWQCRIERRIAEARALIGKLVCFREGNSRPRVMRFVRRAFSGTDVSPREYMSRVTERIDFLKQKVYAWANRIRRYRRRVDRYTQNRLFQSDERWVYRTWERPDQRVGDTRLPDDDVMNAFWRNIWSVPVTHTEGDWMQEVQRACEPIQEMGDIIISPQDVASAVRPMSNWKSPGPDGLHNFWLKWLRSSHARLASQFQSSLESGSLPQFLTTGVTHLLHKSGSTAEPKNYRPITCLPTVYKVLASILRAKINNHIDNNSIMSASQNGCRNGSRGTKELLLIDMAISQQVRRSRKDLSTCWIDYKKAYDSVPHTWLMRVLELYKVNTTLCAFLTSCMGQWRTVLHYPGCRQIQGMGEPIRIERGIFQGDSLSPLWFCLALNPLSTLLEGSGLGYRLRRGGQVISHLLYMDDLKLFAPNNLRLLELLKVTETFSNSIRMEFGVDKCAVMHVKRGRIMESVGTQLSDSVHLRSLSSTETYKYLGMSEALGINEIDMKQSLRERFYGRLKKVLNSLLSGGNKVRAFNGWVMPVLMYSFGILKWTQTELDALDRRVRSLLTANRMHHPRSSVMRLYIPRKCGGRGFLNAKTLHNREVCSLREYFSQADVGMHRDVVAVDKGLTPLSLAKENWRKPVVLDTNGRSDVWRSKELHGRFYRALHGPDVDFLASVAWLRFGDLFGETEGFVCAIMDEVMMTNNYRKYVVKDGTVDICRACHCPGESIRHIVSGCSRLANGEYLHRHNLVARIIHQQLALKYNLVDAEVPYYKYVPDPVLENGHVTLYWDRSIITDRTIVANKPDIVVIDRSERRAMIVDVTVPHDENLVKAENDKKIKYLDLAHEVVDMWDIDSAVIVPIVVTANGLIAKSLDQHLMRLSLGGWIKGLIQKAVLLDTARIVRKFLSLEP

SEQ ID NO: 10951 - protein, 1203 aa, Amphipyra tragopoginis
MLTRSRAKALITQPPPSASSLSSASQPPEPASIVSDVIPAAAVASSSSDEYFSPPTSPPPRRRGRGRPPASLGPRGPPASDRVPAAGGSVQRMRWTQSMNENCMRAYFGATEGGTNLTAYRGRMLSLFRALEPAVNVSAQRLSDQVRVIQRDHRLDDAALDRLRSEMQSGHVVPLQSQTAVQSQVTSVVAPRSIPADEESDDRATNVSTQSNEQLRSALELAIREYRSTLPDLRPRLPRLPMNNKNKALMCALDSLLSSYFDGSEDLADTHPILYCAAVAACRVAHVKVDNNDRATRPKPAVPAWQCRIERRIGEARALIGKLICFREGNTRPRVMRFVRRAFSETDTCPRDYMSRVAERIDFLKQKVYAWANRIRRYRRRVERYTQNRMFQRDQRWVYRAWERPDQGVRDEHLPDDDAMNSFWRSIWSVPVSHTEGDWMRDVERVCEPILDMGAISISPQDVASAVRPLPNWKSPGPDGLHNFWLKWLRSSHARLAFQFQSSLETGTLPQFLTTGVTHLLHKSGSTAEPKNYRPITCLPTVYKLLTSILRCKISSHIENNSIMSASQDGCGNGSRGTKELLLIDMAISQQVRRSRKDLSTCWIDYKKAYDSVPHTWLLRVLELYKVNTTLCAFLTSCMGQWRTVLHYPGCRQIQGIGEPIRIERGIFQGDSLSPLWFCLALNPLSTLLEGSGLGYRLRRGGQVISHLLYMDDLKLFAPNNLQLLDLLKVTETFSNSIRMEFGVDKCAVMHVKRGRIMESVGTQLSDSIQLRSLSSTETYKYLGMSEALGINETDMKQSLRERFYGRLKKVLKSLLSGGNKVRAFNGWVMPVLMYSFGILKWTQTELDALDRRVRTLLTAYRMHHPRSSVMRLYIPRKCGGRGFLNAKTLHNREVCSLREYFSQADVGMHRDVVAVDKGLTPLSLAKENWRKPAVLDTNGRKDVWRSKELHGRFYRALHGPDVDFLASVAWLRFGDLFGETEGFVCAIMDEVMMTNNYRKYVVKDGTVDICRACHCPGESIRHIVSGCSRLANGEYLHRHNLVARIIHQQLALKYNLVDAEVPYYRYVPDPVLENGHITLYWDRSIITDRTIVANKPDIVVIDRSERRAMIVDITVPHDENLVKAENDKKIKYLDLAREVVDMWEIDSAVIVPIVVTANGLIAKSLDQHLMRLSLGSWIKGLIQKAVLLDTARIVRKFLSLEP

SEQ ID NO: 10952 - protein, 1110 aa, Amphipyra tragopoginis
MKWTQSINENVMRAYYGSTEGGTNLTAYRVRMLTLFQELEPAINVSAQRLSDQVRVIQRNHRLDDAALDRLRLEVQNSRVTPFPSQTAVHEVNINIVPPRSDYVDGDMDDRAVTVSSQYNDQLRSALEDAIREYRANPELRPRLPRLPMHNKNRALVCALDSLLSSYFESSEDLGDTHSILYCAAVAACRVANVKFNNSERATRPKPAVPVWQCRIERRIDGARALIGKLICFREGNTRPRVMRFVRRAFSGTGISPREYMSRVTERIDFLKRKVCAWASRIRRYKRRVERYTQNRMFQCDQRWLYRAWERPEQGVSDGRLPDDDAMSSFWRSIWSVPVTHTEGDWMRDIERACEPIEEMGEILISPHDVASAVRPLPNWKSPGPDGLHNFWIKWLRSSHARLASQFQSSLESGSLPQFLTTGVTHLLHKSGSTAEPKNYRPITCLPTVYKLLTSILRSKINTHVENNSVMSSSQNGCKNGSRGTKELLLIDMAISQQVRRSRKNLSTCWIDYKKAYDSVPHAWLMRVLELYKINTTLRTFLRSCMGQWRTVLRYPGCRLIRGSDVPIRIERGIFQGDSLSPLWFCLALNPLSTLLEGSGLGYPLRRGGQVVSHLLYMDDLKLFAPTKLQLVELLKVTETFSNSIRMEFGVDKCAVMHVRRGGIMESEGLQLSDSIHLRPLSANDTYKYLGMSEGLGISEADMKQSLRERFFGRLKKVLKSPLSGGNKVRAFNGWVMPVLMYSFGILKWTQTELDALDRRVRSLLTANRMHHPRSSVMRLYIPRKCGGRGLLNAKILHNREVCSLREYFLHADAGMHRDVVAVDKGLTPLNLAKENWRKPVVLSTNDRREIWQSKELHGRFYRALHGPDVDFQASVSWLRFGDLFGETEGFVCAIMDEVIMTNNYRKYIVKDGTVDICRACHCPGESLRHIISGCSRLANGEYLHRHNQVARIIHQQLALKYNLVESEVPYYKYVPDPVLENGHITLYWDRSIITDRTIVANKPDIVVIDRSERRTMIVDVTIPHDENLVKAEKDKQIKYLDLAHEVVNMWDVDSATIVPIVVTANGLMAKSLDQHLKRLSLGGWIKGQIQKAVLLDTARIVRRFLSLEP

SEQ ID NO: 10953 - protein, 1204 aa, Noctua pronuba
MLTRSRARRLQAHPPSPDSSLSSASQPPGRASIVSAVSPVAAVASSSSDEFFSPPSTPPPPRRRGRGRPPAGLGPRGQQAPNRVPAAGGNVSRMRWTQSINESVMRAYYGATEGGSNLTAYRGRMLSLFQVLEPGVNVSAQRLSDQVRVIQRNHMLDDTVLDRLRFDSRSNLVTPAPPMIAVQLQNVSSAPPRSDHDGEDGNDEVISVSTQCNAQLRSALEGAFREYRSTPPELRPRLPRLPMHKKNKALVCALDSQLSTCFDSSKDLADTHSILYCGAVAACRVAHVKFPNNDRATRPKLAVPAWQSRIERRIGEGRALIGKLICFREGNTRPRVMRFVRRAFSGTGIGFRDYLARVTERIDFLKQKICAWANRIRRYKRRVERYTQNRTFQSDERWVYRAWERPDQGVTDTRLPDDDAMCLFWRSIWSVPVSHTEGDWTREVEQACDPIPEMGAIIISPQDVACAVRPLPNWKSPGPDGLHNFWIKWFQRSHARLASQFQSALESGSLPQFLTTGITHLLHKSGSTADPKNYRPITCLPTVYKVLTSILRAKINQHIESNSIMSTSQNGCRNGSRGTKELLLIDMAISQQVRRSRKDLSTCWIDYKKAYDSVPHTWLMRVLELYKVDATLRTFLRSCMGCWRTVLRYPGCRQIQRNSEPIRIERGIFQGDSLSPLWFCLALNPLSTLLEGSGLGYRLRRGGQVISHLLYMDDLKLFAPNNLQLMKLLKVTETFSSAIRMEFGVDKCAVMHVKRGEIMESVGTQLSDSIHLRSLSSTETYKYLGMSEALGINTADMKQSLRERFFGRLNKVLGSLLSGGNKVRAFNGWVMPVLMYSFGILKWTQTELDALDRRVRALLTANRMHHPRSSVMRLYIPRKCGGRGFLNAKTLHNREVCSLREYFLEADVGMHRDVVSVDKGLTPLSLANENWRKPKVLVTNDRKEVWQSKELHGRFYRALHGPDVDFLASVSWLRFGDLFGETEGFVCAIMDEVMMTNNYRKYIVKDGTVDICRACHRPGESIRHIISGCSRLANGEYLHRHNLVARIIHQQLALKYNLVESEVPYYKYVPDPVLDNGNITLYWDRSIITDRTIVANKPDIVVIDRLERRAMIVDITVPHDENLVKAEKDKQFKYLDLAREVVDMWDVSTAVIVPIVVSANGLIAKSLDQHLRRLALGSWIKGLIQKAVLLDTARIVRRFLSQEP

SEQ ID NO: 10954 - protein, 1200 aa, Tinea trinotella
MLTRSRARNQSAQLTSSGSSLSSASQPPRSTPTVSPVISVAAVASSSSDECFSPPMTPPSARRRGGGRPPASLEPRGPSASGGVPATSGRVQRMRWTQSINENVMRSYFGATEGGSSLTAYRGRMLTLFQVLEPAVNVSAQRLSDQVRVIQRNRMLDDVVLDRLRLESRSSHVSPVSPPVAVQLQPSALPRPNNIEENDDDVTISVSNQYNEQLRSALEDAFREYRSTPPGLRPRIPRLPMHKKNRALVCALDSQLVNHFKSSKDLADTHSILYCAAVAVCRVAHVKFPNNDRAARLAVPAWQCRIERRIGEARALIGKLISFREGNTRPRVMRFVRRAFSGTDISSRDYQTRVTERIDFLKQKIYAWANRIRRYKRRVERYTQNRTFQSNERWVYRAWERPDQDVSDMCLPDDDAMSLFWRNIWSVPVGHTEGEWTREVERACDLIPEMGAIIISPQDVACAVRPLSNWKSPGLDGLHNFWIKYFQRSHARLAAQFQSALELGSLPQFLTTGITHLLHKSGSTAEPKNYRPITCLPTVYKVLTSILRAKIDKHIDTNCIMSASQNGCRSGSRGTKELLLIDVAISQQVRRSRRDLSTCWIDYKKAYDSVPHTWLMRVLELYKVDAALRTFLVSCMGQWRTVLHYPGCRRILGNGEPIKIERGIFQGDSLSPLWFCLALNPLSTLLDGSGQGYRLRRDGQVISHLLYMDDLKLFAPNNLQLMKLLKVTETFSSAISMEFGVDKCAIMHVKRGEIMESVGTQLSDSIHLRSLCSTETYKYLGMSEALGINAVDVKQSLRDRFFGRLNKVLNSLLSGGNKVRAFNGWVMPVLMYSFGILKWTQTELDALDRRVRTLLTANRMHHPRSSVMRLYIPRKCGGRGFLNAKTLHNREVCSLREYFLKTDVGMHRDVVAVDKGLTSLSLANENWRKPVVLDANDRREVWQSKELHGRFYRALHGPDVDFLASVSWLRFGDLFGETEGFVCAIMDEVMMTNNYRKYIVKDGTVDICRACHRPGESIRHIISGCSRLANGDYLHRHNLVARIIHQQLALKYNLVESEVPYYRYVPDPVLENGNITLYWDRSIITDRTIVANKPDIVVIDRLERRTIIVDVAVPHDENLVKAEKDKQIKYLDLAREVVDMWEVDTAIIVPIVVTANGLIAKSLDEHLKRLSLGSWIKRLIQKAVLLDTARIVRRFLSQEP

SEQ ID NO: 10955 - protein, 1200 aa, Tinea trinotella
MLTRSRARNQSAQLTSSGSSLSSASQPPGSTPTVSQVISVAAVASSSSDECFSPPTTPPSARRRGGGRPPASLEPRGPSASGGVPATSGRVQRMRWTQSINENVMRSYFGATEGGSSLTAYRGRMLTLFQVLEPAVNVSAQRLSDQVRVIQRNRMLDDVVLDRLRLESRSSHVSPVSPPVAVQLQPSALPRPNNIEENDDDVTISVSNQYNEQLRSALEDAFREYRSTPPGLRPRIPRLPMHKKNRALVCALDSQLVNHFKSSKDLADTHSILYCAAVAVCRVAHVKFPNNDRAARLAVPAWQCRIERRIGEARALIGKLISFREGNTRPRVMRFVRRAFSGTDISSRDYQTRVTERIDFLKQKIYAWANRIRRYKRRVERYTQNRTFQSNERWVYRAWERPDQDVSDMCLPDDDAMSLFWRNIWSVPVGHTEGEWTREVERACDFIPEMGAIIISPQDVACAVRPLSNWKSPGLDGLHNFWIKCFQRSHARLAAQFQSALELGSLPQFLTTGITHLLHKSGSTAEPKNYRPITCLPTVYKVLTSILRAKIDKHIDTNCIMSASQNGCRSGSRGTKELLLIDVAISQQVRRSRRDLSTCWIDYKKAYDSVPHTWLMRVLELYKVDAALRTFLVSCMGQWRTVLHYPGCRRILGNGEPIKIERGIFQGDSLSPLWFCLALNPLSTLLDGSGQGYRLRRDGQVISHLLYMDDLKLFAPNNLQLMKLLKVTETFSSAISMEFGVDKCAIMHVKRGEIMESVGTQLSDSIHLRSLCSTETYKYLGMSEALGINAVDVKQSLRDRFFGRLNKVLNSLLSGGNKVRAFNGWVMPVLMYSCGILKWTQTELDALDRRVRTLLTANRMHHPRSSVMRLYIPRKCGGRGFLNAKTLHNREVCSLREYFLKTDVGMHRDVVAVDKGLTSLSLANENWRKPVVLDANDRREVWQSKELHGRFYRALHGPDVDFLASVSWLRFGDLFGETEGFVCAIMDEVMMTNNYRKYIVKDGTVDICRACHRPGESIRHIISGCSRLANGDYLHRHNLVARIIHQQLALKYNLVESEVPYYRYVPDPVLENGNITLYWDRSIITDRTIVANKPDIVVIDRLERRTIIVDVAVPHDENLVKAEKDKQIKYLDLAREVVDMWEVDTAIIVPIVVTANGLIAKSLDEHLKRLSLGSWIKRLIQKAVLLDTARIVRRFLSQEP

SEQ ID NO: 10956 - protein, 1199 aa, Spilosoma lubricipeda
MLTRARSRAQLLTPDSSLRSALPSSDARTEVPTVAEASSSSSSDEFFSPPTSPTPVRRQERYRPPDSLGPRGPLTSNRAPAAGGNVRRMKWTHSINENVMRAYFRATELGTNLTAYRVRLVSLFQELEPAVNVSAQRLSDQVRAIQRCHLLDDAVLERIRSDIRNSLAVPSSSHVVDTIVNTTSQLPRSEYIDERVDSEIISVSTQCNDTIRSTLEDAIREYRYVDSNNRPRLSRLPIHKRNLALVSALDSLLPDYFNNSEDLSDTHSILYCAAIAVCRVAGVNFVECKTATRPKNTVPAWQCRIERRIAGTRTLIGKLISFRSGNTRPKVMRFVKQAFLGTTVSPQQYMSCVTERIDFLKQKVYAWANRIRRYRKRTDRYNQNRTFQRNEKWVYQKWEKLSPCMSDEHLPDKNATNYFWRNIWSTPVTHTEGHWCRDVERSCESITPMEPVRIDKEDVSCAVRSLANWKAPGPDGLHNFWLKWFRSSHAYLASQFQTALDSGSLPQFLTTGITHLLHKSGSTTDPKNFRPITCLPTLYKLLTSILRLKITAHINNNSIISVSQNGCRSGTRGTKELLIIDMTISQQVRRNRKSLATCWIDYKKAYDSVPHTWLLRVLELYKIDTTLCTFLKSCMGQWRTVLRYPGCRQSTMNDVLIKIERGIFQGHSLSPLWFCLALNPLSALLEDSGLGYRLQKDDQVISHLFYMDDLKLLAPTKLQLTTLLKVTENFSNSIKMEFGVDKCAVMYVKKGVIVESEGTELSDSTRLRSLSATETYKYLGFSQSLGIPEPDMKQSLRERFFGRLKKVLKSLLSGGNKVRAFNGWVMPVLMYSFGILRWTQTELDAIDRRVRTLLTAFRMHHPRSSVMRLYIPRKLGGRGLLNAKTLHNREIYNLREYFLHTDVGMHRSVVTVDTGLTPLALAKENWRKPVVLSTNDRREVWKGKELHGRFYRALNGPDIDFKASTSWLRYGDLFGETEGFVCAIMDEVIMTNNYRKYILKDGTVDICRACHRPGESIRHIISGCSRLANGEYLHRHNQVARIVHQQLALKYHLVSSEVPYYRYVPDPVLENGRATLYWDRSIITDRTIVANKPDIVVIDRLERRAMIVDIAVPHDENLVKVEKEKQIKYLDLSHEIVDMWNVDSAIIVPIVVSAHGLIAKSLDQHLKRLTLEGWIKGLMQKAVLLDTARIVRRFLSLEP

SEQ ID NO: 10957 - protein, 1108 aa, Spilosoma lubricipeda
MKWTQSINENVMRAYFRATELGTNLTAYRVRLVSLFQELEPAVNVSAQRLSDQVRAIQRCHLLDDTVLERICSDIRNSLTVPSSPHVVDVVTNSTPQNEDVSELVDSEIISVSTLYSDKIRSTLEDVIREYRYVNFNNRPRLPRLPIHKRNLALVGALDSLLPDYFGNSEDLSDTHSILYCAAIAVCRVAGIKFAENITTTRPENTVPAWQCRIERRIAGARTLIGKLISFRSGNTRPKVMRFVKQAFLGTTISPQQYMSCVTERIDFLKQKVYAWANRIRRYRKRIDRYNQNRMFQRNEKWVYRKWENLSPCMSDGQVPDENATNSFWRSIWSVPVAHTEGDWYRDVERSCESLLPMELINIDKEDVSCAVRSLPNWKAPGPDGLHNFWLKWFRSSHACLASQFQTALDSGSLPQFLTTGITHLLYKSGSAMDPKNFRPITCLPTLYKLLTSILRLKITTHINQNSILSVSQNGCRSGTRGTKELLIIDMTISQQVRRNRKNLATCWIDYKKAYDSVPHTWLLKVLELYKIDTTLCTFLKSCMGQWRTVLRYPGCRRTAVNDVPIKIERGIFQGDSLSPLWFCLALNPLSTLLESSGLGYRLQKDAALISHLFYMDDLKLFAPTKLQLTALLRVTENFSNSIKMEFCVDKCAVMHVKKGVIVESEGIELSDSTKLRFLSATETYKYLGFSQSLGIPEPDMKQSLRERFFGRLKKVLKSLLSGGNKVRAYNGWVMPVLMYSFGILRWTQTELDAIDRRVRTLLTAFRMHHPRSSVMRLYIPRKLGGRGLLNAKTLHNREIYNLREYFLHTDVGVHRSVVAMDTGLTPLALAKENWRKPVVLGTNERREVWKGKELHGRFYRALNGPDIDFKASTSWLRYGDLFGETEGFVCAIMDEVIMTNNYRKYILKDGTVDICRACHRPGESIRHIISGCSRLANGEYLHRHNQVARIVHQQLALKYKLVNSEVPYYRYVPDPVLENGRATLYWDRSIITDRTIVANKPDIVVIDRSERRAMIVDIAVPHEENLVKVEKEKQIKYLDLSHEIVDMWDVDSVIIVPIVVSVHGLIAKSLDQHLKRLTLDGWIKGLMQKAVLLDTARIVRRFLSLEP

SEQ ID NO: 10958 - protein, 1110 aa, Spilosoma lubricipeda
MKWTQSINENVMRAYFRATELGTNLTAYRVRLVSLFQELEPAVNVSAQRLSDQVRAIQRCHLLDDVVLERIRSDVRGTLTVPSSSHSVDLVATTPQLPHNEYVDEQVESEVMTVSTQCNDRIRRALEDAIQEYRHVDYKNRPRLPRLPIHKRNLALVSALNSLLPDYFGNSEDFSDTHSILYCAAIAVCRVAGVKFVEQITTTRPKNEVPAWQCRIERRIAETRTLIGKLITFQSGNTRPRVMRFVKQAFLGTTISPQQYMSSVTERIDFLKQKVYAWANRIRRYRKRVDRFIQNRMFQRNEKWVYRKWEEPSPRVGEGRFPDENVTNTFWRNIWSVPVTHTEGDWYRDVERSCESITSMEPITISKDDIGCAVRSLPNWKSPGPDGLHNFWFKWFRSSHACLASQYQAAVDSGSLPQFLTTGITHLLYKSGSAMDPKNFRPITCLPTMYKLLTSILRLKISTHINNNLIMSVSQNGCRSGSRGTKELLIIDMTISQQVRRNRKSLATCWIDYKKAYDSVPHTWLLRVLELYKIDTTLCTFLKSCMGQWRTVLRYPGCRQTAVNDVLINIERGIFQGDSLSPLWFCLALNPLSALLEDSGLGYRLQKDDQVISHLFYMDDLKLLAPTKLQLTALLKVTENFSNSIKMEFGVDKCAVMYVKKGVIVESEGTELSDSTRLRSLSATETYKYLGFSQSLGIPEPDMKQSLRERFFGRLKKVLKSLLSGGNKVRAFNGWVMPVLMYSFGILRWTQTELDALDRRVRTLLTAFRMHHPRSSVMRLYIPRKFGGRGLLNAKTLHNREIYNLREYFLHTDVGVHRSVVTVDTGLTPLALAKENWRKPVVLSTNDRREVWKGKELHGRFYRALNGPDIDFKASTSWLRYGDLFGESEGFVCAIMDEVIMTNNYRKYILKDGTVDICRACHRPGESIRHIISGCSRLANGEYLHRHNQVARIVHQQLALKYHLVSSEVPYYRYVPDPVLENGRATLYWDRSIITDRTIVANKPDIVVIDRLERRAMIVDIAVPHDENLVKVEKEKQIKYLDLSHEIVDMWNVDSAIIVPIVVSAHGLIAKSLDQHLKRLTLEGWIKGLMQKAVLLDTARIVRRFLSLEP

SEQ ID NO: 10959 - protein, 1199 aa, Spilosoma lubricipeda
MLTRARSRAQLLTPDSSLRSALPSSDARTEVPTVAEASSSSSSDEFFSPPTSPTPVRRQERYRPPDSLGPRGPLTSNRAPAAGGNVRRMKWTHSINENVMRAYFRATELGTNLTAYRVRLVSLFRELEPAVNVSAQRLSDQVRAIQRCHLLDDAVLERIRSDIRNSLAVPSSSHVVDTIVNTTSQLPRSEYIDELVDSEIISVSTQCNDTIRSTLEDAIREYRYVDSNNRPRLSRLPIHKRNLALVSALDSLLPDYFNNSEDLSDTHSILYCAAIAVCRVAGVNFVECKTATRPKNTVPAWQCRIERRIAGTRTLIGKLISFRSGNTRPKVMRFVKQAFLGTTVSPQQYMSCVTERIDFLKQKVYAWANRIRRYRKRTDRYNQNRTFQRNEKWVYQKWEKLSPCMSDEHLPDKNATNYFWRNIWSTPVTHTEGHWCRDVERSCESITPMEPVRIDKEDVSCAVRSLANWKAPGPDGLHNFWLKWFRSSHAYLASQFQTALDSGSLPQFLTTGITHLLHKSGSTMDPKNFRPITCLPTLYKLLTSILRLKITTHVNNNSIISVSQNGCRSGTRGTKELLIIDMTISQQVRRNRKSLATCWIDYKKAYDSVPHTWLLRVLELYKIDTTLCTFLKSCMGQWRTVLRYPGCRQSTMNDVLIKIERGIFQGDSLSPLWFCLALNPLSTLLEGSGIGYRLQRDDRVISHLLYMDDLKLLAPTKLQLTALLKVTENFSNSIKMEFGVDKCAVMYVKKGLIVESEGVELSDSTKLRSLSATETYKYLGFSQSLGIPESDVKQMLRERFFGRLKKVLKSLLSGGNKVRAYNSWVMPVLMYSFGILRWTQTELDAFDRRVRTLLTAFRMHHPRSSVMRLYIPRKFGGRGLLNIKTLHNREIYNLREYFLHTDVEMHRNVVAVDTGLTPLALAKENWRKPVVLSTNDRREVWKGKELHGRFYRALNGPDIDFKASTSWLRYGDLFGETEGFVCAIMDEVIMTNNYRKYILKDGTVDICRACHRPGESIRHIISGCSRLANGEYLHRHNQVARIVHQQLALKYHLVNSEVPYYRYVPDPVLENGRATLYWDRSIITDRTIVANKPDIVVIDRLERRAMIVDIAVPHDENLVKAEKEKQIKYLDLSHEIVDMWNVDSAIIVPIVVSAHGLIARSLDQHLKRLTLDGWIKGLMQKAVLLDTARIVRRFLSLEP

SEQ ID NO: 10960 - protein, 868 aa, Ochropleura plecta
MRFVRRAFAGTDISPPDYMSRITERIDFLKQKVYAWANRIRRYKRRVERYTLNRTFQSDERWVYRAWERPDQGVSDTHLPDDDAMCLFWRSIWLVPVSHTEGEWTREVERACDPIPEMGALTISPQDVACAIRPLPNWKSPGPDGLHNFWIKSIQRSHTCLATLFQTALESGSLPKFLTTGITHLLHKSGSTAEPKNYRPITCLPTLYKVLTSILRAKITKHIDDNSIMSASQNGCRNGSRGTKELLLIDMAISQQVRRSRRHLSTCWIDYKKAYDSVPHTWLMRVLEMYKVDATLRTFLISCMRQWSTVLRYPGCRQIQRNSEPIRIERGIFQGDSLSPLWFCLALNPLSTLLENSGLGYRLRRGGQVISHLLYMDDLKLFAPNDLQLMELLKVTETFSSAIRMEFGVDKCAVMHVKRGEIMESVGTQLSDSTNLRSLSATETYKYLGMSEALGINVADMKQSLKERFFGRLRKVFNSLLSGGNKVRAFNGWVMPVLMYSFGILKWTQTELDALDRKVRTLLTAFRMHHPRSSVMRLYIPRSCGGRGFLNAKTLHNREICSLREYFLETDVGMHRDVVAVDKGLTPLSLAKENWHKPVVLDTNDRKEVWQSKELHGRFFRALHGPDVDQSASVAWLCSGDLFGETEGFVCAIMDEVMMTNNYRRFIVKDGTVDICRACHRPGESIRHIISGCSRLANGEYLHRHNLVARIIHQQLALKYNLVESEVPYYRYEPDPVLEHGNITLYWDRSIITDRTIVANKPDIVVVDRSERRAMIVDITVPHDENLVKAEKDKQIKYIDLAREVVDMWDVDSAIIVPIVVSANGLIAKSLDQHLRRLSLDSWIKGLIQKAVLLDTARIVRRFLSLEP

SEQ ID NO: 10961 - protein, 1197 aa, Ochropleura plecta
MLTRSQARSARHPPPGSSLSSASPPPEPSLVVSAVTPAVAVASSSSDEYFSPPTTPPPVRRRGRHRPPDGLGPRGPPASDRVPAPGGSVQRMRWTQSINENVMRSYYGATEGGNNLTAYRVRMLSLFQVLEPAVNVSAQRLSDQVRVIQRNRMLDDTVLDRLRTEMQSSQVITSSSQAVAPPQPHQLVNRANEVSNDMATNVSTQCSEEMRSTLEGAIREYRYMSPELRPRLPRLPMHNKNRALVAALDSQLSSYFDNCENLTDAHSILYCAAVAVCRVAHVKFPDDRATRPKPAVPFWQCRIERRIGAARALIGKLICFREGNTRPRVMRFVRRAFSGTDITPPDYMSRIAERIDFLKQKVYAWANRIRRYKRRVERYTQNRTFQSDERWVYRAWERPDQGVSDTHLLDDNAMCLFWRSIWSVPVSHTEGEWTREVERACDPIPEMGALTISPQDVACAVRPLPNWKSPGPDGLHNFWIKWIQRSHVRLAALFQTALESGSLPKFLTTGITHLLHKSGSTAEPKNYRPITCLPTLYKVLTSILRAKITKHIDDNSIMSASQNGCRNGSRGTKELLLIDMAISQQVRRSRRHLSTCWIDYKKAYDSVPHTWLMRVLELYKIDATLRTFLISCMRQWSTVLRYPGCRQIQRNSEPIRIERGIFQGDSLSPLWFCLALNPLSTLLENSGLGYRLRRGGQVISHLLYMDDLKLFAPNDLQLMELLKVTETFSSSIRMEFGVDKCAVMHVKRGEIVESMGTQLSDSINLRSLSATETYKYLGMSEALGINVADMKQSLKERFFGRLRKVFNSLLSGGNKVRAFNGWVMPVLMYSFGILKWTQTELDALDRKVRTLLTTFRMHHPRSSVMRLYIPRSCGGRGFLNAKTLHNREICSLREYFLETDVGMHRDVVAVDKGFTPLSLAKENWRKPVVLDTNDRREVWQSKELHGRFFRALHGPDVDQPASVAWLRSGDLFGETEGFVCAIMDEVMMTNNYRRFIVKDGTVDICRACHRPGESIRHIISGCSRLANGEYLHRHNLVARIIHQQLALKYSLVESEVPYYRYEPDPVLEHGNITLYWDRSIITDRTIVANKPDIVVVDRSERRAMIVDITVPHDENLVKAEKDKQIKYIDLAREVVDMWDVDSAIIVPIVVSANGLIAKSLDQHLRRLSLGSWIKGLIQKAVLLDTARIVRRFLSLEP

SEQ ID NO: 10962 - protein, 1107 aa, Hecatera dysodea
MRWTQSINENVMRSYFGATEGGTNLTAYRGRMLSLFQVLEPAVNVSAQRLSDQVRVIQRNRMLDDAVLDRLRLESRSSRVSPASPPAAVQIQPSISPRPDHVSEDVDDGAITVSTQCNERLRSALEDAFREYRSTPPELRPRLPRLPMHNKNRALVCALDSQLENCFNSSKDLADTHSILYCAAAAACRVAHVKFPNSDRATRPAVPAWQCRIERRIGEARALIGKLICFREGNTRRRVMRFVRRAFSGTDISPRDYLTRVTERIDFLKQKVYAWASRIRRYKRRVERYTQNRTFQSNERWVYRAWERPDQVVTDTHLPDDDAMCSFWRSIWSVPVSHTEGDWTREVERTCDPIPEMGAITISPQDVARAVRPLPNWKSPGPDGLHNFWIKWFTRSHVRLASQFQSALESRSLPQFLTTGITHLLHKSGSTAEPKNYRPITCLPTVYKVLTSILRAKINDHIESNSIMSTSQNGCRNGARGTKELLLIDVAISQQVRRSRKDLSTCWIDYKKAYDSVPHTWLMRVLELYKVNTVLRTFLMSCMGQWRTVLHYPGCRQTQANSEPIRIERGIFQGDSLSPLWFCLALNPLSTLLEGSGQGYRLRRGGQVISHLLYMDDLKLFAPNNLQLMKLLKVTETFSSDISMEFGVDKCAVMHVKRGEIMESVGTQLSDSIHLRSLCSTETYKYLGMSEALGINATSVKQSLKERFFGRLNKVLNSLLSGGNKVRAFNGWVMPVLMYSFGILKWTQTELDALDRRVRSLLTANRMHHPRSSVMRLYIPRKCGGRGFLNAKTLHNREVCSLREYFLEADVGMHRDVVAVDKGLTPLSLANENWRKPVVLDTNDRREVWQSKELHGRFYRVLHGPDVDFLASVAWLRFGDLFGETEGFICAITDEVMMTNNYRKYIVTDGTVDICRACHRPGESIRHIISGCSSLANGDYLHRHNLVARIIHQQLALKYNLVESEVPYYRYVPDPVLENGNCTLYWDRSIITDRTIVANKPDIVVIDRLERRAMIVDIAVPHDENLVKAEKDKQSKYLDLAREVVDMWNVNTAVIVPIVVTANGIIAKSLDQHLKRLSLGSWIKGLIQKAVLLDTARIVRRFLSREP

SEQ ID NO: 10963 - protein, 1196 aa, Hecatera dysodea
MLTRAAARRARLPPPASSLSSASPPPEPSPTVSAATPAVAVASSSSDEYFSPPTSPPPARRRRGRRPPDGLGPRGPPVSDRVPAPGGSVQRMRWTQTINENVMRSYYGATEGGTNLTAYRGRMLSLFQVLEPAVNVSAQRLSDQVRVIQRNRMLDDSVLDRLRTEICSHVIVPSPQTVAPPQLTQIPCHADEENNDRVTNVSTQCNDELRSALEGAIREYRYVSPELRPRIPRLPMHNKNRALVAALDSQLSNYFDNCEDLTDAHSIMYCAAVAACRVAHVKMPSDRVTRPKVAVPAWQCRIERRIGGARALIGKLICFREGNTRPRVMRFVRRAFSGTDTSPSDYLSRVTERIDFLKQKVYAWANRIRRYKRRVERYTQNRTFRSNERWVYKAWERPDQDVTDMHPPDDDAMCSFWRNIWSVPVSHTEGDWIREVERACDPLPEMGAIIISPQDVARAVRPLPNWKSPGPDGLHNFWIKWFKGSHACLASRYQAALESGSLPEFFMTGVTHLLHKSGSTAEPKNYRPITCLPTVYKVLTSILRDKINQHINSNNIMSASQNGCRNGSRGTKELLLIDMVISQQVRRSRKDLSTCWIDYKKAYDSVPHSWLMRVLELYKIDTTLRTFLMSCMGQWRTVLRYPGCRNIQRNSEPVRIERGIFQGDSLSPLWFCLALNPLSTLLENSGLGYRLRRGGQVISHLLYMDDLKLFAPTNLQLMELLKVTETFSNAIRMEFGVDKCAVMHVKRGEIMESVGTQLSDSINLRSLSSTETYKYLGMSEALGINVTDMKQSLRERFFGRLKKVLNSLLSGGNKVRAFNGWVMPVLMYSFGVLKWTQTELDALDRRVRTLLTAYRMHHPRSSVMRLYIPRKCGGRGFLNAKTLHNREICSLREYFLAVDVGMHRDVVAVDKGLTPLSLANENWRKPAVLDTNDRRAVWQSKELHGRFFRALHGPDVDQLASVAWLRFGDLFGETEGFVCAIMDEVIMTRNYRRFIVKDGTVDICWACHRPGESIRHIVSGCSSLANGEYLHRHNLVARIIHQQLALKYSLVESEVPYYRYVPDPVLDNGNITLYWDRSIITDRTIVANKPDIVVVDRMVRRAMIVDITVPHDENLVKAEKDKQIKYLDLAREVVDMWDVDSAIIVPIVVSVNGLIAKSLDQHLRRLTLGGWIKGLIQKAVLLDTARIVRRFLSLEP

SEQ ID NO: 10964 - protein, 1196 aa, Hecatera dysodea
MLTRAAARRARLPPPASSLSSASPPPEPSPTVSAATPAVAVASSSSDEYFSPPTSPPPARRRRGRRPPDGLGPRGPPVSDRVPAPGGSVQRMRWTQTINENVMRSYYGATDGGVNLTAYRGRMLSLFQVLEPAVNVSAQRLSDQVRVIQRNRMLDDSVLDRLRTEICSHVIVPSPQTVAPPQLTQIPCHADEENNDRVTNVSTQCNDELRSALESAIREYRYVSPELRPRIPRLPMHNKNRALVAALDSQLSNYFDNCEDLTDAHSIMYCAAVAACRVAHVKMPSDRVTRPKVAVPAWQCRIERRIGGARALIGKLICFREGNTRPRVMRFVRRAFSGTDISPSDYLSRVTERIDFLKQKVYAWANRIRRYKRRVERYTQNRTFRSNERWVYKAWERPDQDVTDMHPPDDDAMCSFWRNIWSVPVSHTEGDWIREVERACDPLPEMGAIIISPHDVARAVRPLPNWKSPGPDGLHNFWIKWFKGSHACLASRYQAALESGSLPEFFMTGVTHLLHKSGSTAEPKNYRPITCLPTVYKVLTSILRDKINQHINSNNIMSASQNGCRNGSRGTKELLLIDMVISQQVRRSRKDLSTCWIDYKKAYDSVPHSWLMRVLELYKIDTTLRTFLMSCIGQWRTVLRYPGCRNIQRNSEPVRIERGIFQGDSLSPLWFCLALNPLSTLLENSGLGYRLRRGGQVISHLLYMDDLKLFAPTNLQLMELLKVTETFSNAIRMEFGVDKCAVMHVKRGEIMESVGTQLSDSINLRSLSSTETYKYLGMSEALGINVTDMKQSLRERFFGRLKKVLNSLLSGGNKVRAFNGWVMPVLMYSFGVLKWTQTELDALDRRVRTLLTAYRMHHPRSSVMRLYIPRKCGGRGFLNAKTLHNREICSLREYFLAVDVDMHRDVVAVDKGLTPLSLANENWRKPAVLDTNDRRAVWQSKELHGRFFRALHGPDVDQLASVAWLRFGDLFGETEGFVCAIMDEVIMTRNYRRFIVKDGTVDICRACHRPGESIRHIVSGCSSLANGEYLHRHNLVARIIHQQLALKYSLVESEVPYYRYVPDPVLDNGNITLYWDRSIITDRTIVANKPDIVVVDRIVRRAMIVDITVPHDENLVKAEKDKQIKYLDLAREVVDMWDVDSAIIVPIVVSVNGLIAKSLDQHLRRLTLGGWIKGLIQKAVLLDTARIVSRFLSLEP

SEQ ID NO: 10965 - protein, 960 aa, Hecatera dysodea
MHNKNRALVCALDSQLENCFNSSKDLADTHSILYCAAAAACRVAHVKFPNSDRAARPAVPAWQCRIERRIGEARALIGKLICFREGNTRRRVMRFVRRAFSGTDISPRDYLTRVTERIDFLKQKVYAWASRIRRYKRRVERYTRNRTFQSNERWVYRAWERPDQVVTDTHLPDDDAMCSFWRSIWSVPVSHTEGDWTREVERTCDPIPEMGAITISPQDVARAVRPLPNWKSPGPDGLHNFWIKWFTRSHARLASQFQSALESRSLPQFLTTGITHLLHKSGSTAEPKNYRPITCLPTVYKVLTSILRAKINDHIESNSIMSTSQNGCRNGARGTKELLLIDVAISQQVRRSRKDLSTCWIDYKKAYDSVPHTWLMRVLELYKVNTVLRTFLMSCMGQWRTVLHYPGCRQTQANSEPIRIERGIFQGDSLSPLWFCLALNPLSTLLEGSGQGYRLRRGGQVISHLLYMDDLKLFAPNNLQLMKLLKVTETFSSDISMEFGVDKCAVMHVKRGEIMESVGTQLSDSIYLRSLCSTETYKYLGMSEALGINATSVKQSLKERFFGRLNKVLNSLLSGGNKVRAFNGWVMPVLMYSFGILKWTQTELDALDRRVRSLLTANRMHHPRSSVMRLYIPRKCGGRGFLNAKTLHNREVCSLREYFLEADVGMHRDVVAVDKGFTPLSLANENWRKPVVLDTNDRREVWQSKELHGRFYRVLHGPDVDFLASVAWLRFGDLFGETEGFICAITDEVMMTNNYRKYIVKDGTVDICRACHRPGESIRHIISGCSSLANGDYLHRHNLVARIIHQQLALKYNLVESEVPYYRYVPDSVLENGNCTLYWDRSIITDRTIVANKPDIGVIDRLERRAMIVDIAVPHDENLVKAEKDKQSKYLDLAREVVDMWNVNTAVIVPIIVTANGIIAKSLDQHLKRLSLGSWIKGLIQKAVLLDTARIVRRFLSREP

SEQ ID NO: 10966 - protein, 1048 aa, Mythimna impura
MLDDTVLDRLRTEMSNHAIAPSSQPVVPVMVPPSYHLSDHADEEITDMVTHVSTQCNNELRSALECAIREYRNMPLELRPRLPRLPMHNKNKALVAALDLQLSNYFDDCEDLTDTHSIMYCAAVAACRVAHVKFPSCDVATRPKPAVPAWQCRIERRIGGARALIGKLICFREGNTRPRVMRFVRRAFSGTDISPRDYMSRVTERIDFLKQKVYAWANRIRRYKRRVERYTQNRTFRSNERWVYRAWERPDQGVTDTRLPDDDAMSSFWRSIWSVPVSHTEGDWTREVERACDPIPQMGAIDISPQDVARAVRPLPNWKSPGPDGLHNFWIKWFTRSHARLAYQFQSALESGSLPQFLTTGITHLLHKSGSTAEPKNYRPITCLPTVYKVLTSILRSKINSHIDKNLIMSPSQNGCRNGSRGTKELLLIDMTISQQVRRFRKDLSTCWIDYKKAYDSVPHTWLMRVLELYKIDTTLRTFLMSCMRQWSTVLRYPGCRHIQRNSEPVRIERGIFQGDSLSPLWFCLALNPLSTLLENSGLGYRLKRGGQVISHLLYMDDLKLFAPNNLQLMELLKVTETFSSAIRMEFGVDKCAVMHVKRGEVVESVGTQLTDSINLRSLSPTETYKYLGMSEALGINITDMKQSLKERFFGRLKKVFNSLLSGGNKVRAFNGWVMPVLMYSFGVLKWTQTELDALDRRVRTLLTAYRMHHPRSSVMRLYIPRKCGGRGFLNAKTLHNREVCSLREYFLATDVGMHRDVVAVDKGLTPLSLANENWRKPVVLDTNDRKEVWQSKELHGRFFRAFHGPDVDQLASVAWLRFGDLFGETEGFVCAIMDEVIMTNNYRRFIVKDGTVDICRACHRPGESIRHIISGCSRLANGEYLHRHNLVARIIHQQLALKYSLVESEVPYYRYEPDPVLDNGHITLYWDRSIITDRTIVANKPDIVVVDRSERRAMIVDISVPHDENLVKAEKDKQIKYIDLAREVVDMWDVDSAIIVPIVVSDNGLIAKSLDQHLRRLALGGWIKALIQKAVLLDTARIVRRFLSLEP

SEQ ID NO: 10967 - protein, 1199 aa, Mythimna impura
MLTRAAARRARPPPPASSLSSASPPPEPCLTASVVTPAVAAASSSSDEYYSPPTTPPPTRRRGERRPPACLGSRGPPASDRVPATGGCVSRMRWTQSINENVMRAYYGATEGGNNLTAYRVRMLSLFQVLEPAVVSAQRLSDQVRVIQRNHMLDDTVLDRLRTEMGSHAIASSSQTVVPPQVSPPNNLSNHADEESTDMVTHVSTQCSNELRSALECAIREYRNMPLELRPRLPRLPMCNKNKALVAALDSQLSNYFDDCEDLTDTHSIMYCAAVAACRVAHVKFPNSDVATRPKLAVPAWQCRIERRIGGARAFIGKLICFREGNTRPRVMRFVRRAFSGTDISPRDYMSCVTERIDFLKQKVYAWANRIRRYKRRVERYTQNRTFRSNERWVYRAWEQPDQGGADTRLPDDDAMSSFWRNIWSVPVSHTEGGWTREVERACEPIPEMGAITISPQDVARAVRPLPNWKSPGPDGLHNFWIKWLQRSHARLASQYQTALESGSLPEFLTTGVTHLLHKSGSTAEPKNYRPITCLPTVYKVLTSILRAKINHHVDNNAIMSASQNGCRNGSRGTKELLLIDMAISQQVRRSRKDLSTCWIDYKKAYDSVPHTWLMRVLELYKSDATLRTFLMSCMRQWRTVLRYPGCRHIQRNSEPVRIERGIFQGDSLSPLWFCLALNPLSTLLENSGLGYRLKRGGQVISHLLYMDDLKLFAPNNLQLMELLKVTETFSSAIRMEFGVDKCAVMHVKRGEIVEFVGTQLSDSINLRSLSPTETYKYFGMSEALGINATDMKQTLRERFFGRLKKVFNSLLSGGNKVRAFNGWVMPVLMYSFGVLKWTQTELNALNRRVRTLLTAYRMHHPRSSVMRLYIPRNCGGRGFLNAKTLHNREVCSLREYFLTADVGMHRDVVAVDKGLTPLSLANESWRKPVVLDTNDRREVWQSKELHGRFFRALHGPDVDQLASVAWLRVGDLFGETEGFVCAIMDEVIMTNNYRRFIVKDGTVDICRACHRPGESIRHIISGCSRLANGEYLHRHNLVARIIHQQLALNYSLVESEVPYYRYVPDPVLDNGDITLYWDRSIITDRAIVANKPDIVVIDRLERRTMIVDIAVPHDENLVKAEKDKQTKYLDLAREVVDMWEVDRAVIVPIVVTANGLIAKSLEQHLRRLSLGSWIKGLIQKAVLLDTVRIVRRFLSQEP

SEQ ID NO: 10968 - protein, 1200 aa, Mythimna impura
MLTRSRAQKLHTHPTSSGSSLSSASQPPGPAPTVSPEITVAAVASSSSDEYFSPPTTPPPARRRGRGRPPASLGPRGPPASDRVPAAGGSVQRMRWTSSINENVMRSYFGATEGGINLTAYRSRMLSLFQVLEPAVNVSVQRLSDQVRVIQRNRMLDDAVLDRLRLESQSSRVSPATTPAAVQRLPTASPRPVQVGDADDDAAISVSTQCNDRLRGALEDAFREYRSTPPGLRPRLPRLPMHKRNRALVCALDSQLSNCFDSSKDLTDTHSILYCAAVAACRVAHVKFPNCDRATRPAVPAWQCRIEHRIGEARALIGKLICFREGNTRPRVMRFVRRAFSGTDISPRDYLPCVTERIDFLKQKIYAWANRIRRYKRRVERYTRNRTFQSNERWVYRDWERSDQGVTDTRLPDDDAMCSFWRSIWSAPVSHTEGDWIREVERACDLLPEMGAITISPQDVARAVRPLPNWKSPGPDGLHNFWVKWFQRSHARLASQFQSALESGSLPQFLTTGITHLLHKSGSTAEPKNYRPITCLPTVYKVLTSILRAKINSHIETNSIMSASQNGCRNGSRGTKELLLIDIAISQQVRRSRKNLSACWIDYMKAYDSVPHTWLMRVLELYKVDATLRTFLMSCMGQWRTVLHYPGCRQIQENNEPIRIERGIFQGDSLSPLWFCLALNPLSTLLEGSGLGYRLKRGGQVISHLLYMDDLKLFAPNNLQLVELLKVTETFSSAIRMEFGVDKCAVIHVKRGEIMESVGIQLSDSIHLRSLCSTETYKYLGMSESLGINTDDVKQSLKERFFGRLNKVLNSLLSGGNKVRAFNGWVMPVLMYSFGILKWTQTELDALDRRVRTLLTANRMHHPRSSVMRLYIPRKCGGRGFLNAKTLHNREVCSLREYFLKTDVGMHRDVVAVDKGLTPLSLANENWRKPIVLDTNDRREVWQSKELHGRFYRALHGPDVDLLASVSWLRFGDLFGETEGFVFAIMDEVMMTNNYRKYIVKDGTVDICRACHRPGESIRHIISGCSHLANGDYLHRHNLVARIIHQQLALKYNLVESEVPYYRYVPDPVLDNGNITLYWDRSIITDRTIVANKPDIVVIDRLERRTMIVDIAVPHDENLVKAEKDKQTKYLDLAREVVDMWEVDKAIIVPIVVTANGLIAKSLEQHLRRLSLGSWIKGLIQKAVLLDTARIVRRFLSQEP

SEQ ID NO: 10969 - protein, 889 aa, Mythimna impura
MFLPQNSVVYGPICKIFFCPYRIIIIIIISGTDISPRDYMSRVTERIDFLKQKVYAWANRIRRYKRRVERYTQNRTFRSNERWVYRAWERPDQGVTDTRLPDDDAMSSFWRSIWSVPVSHTEGDWTREVERACDPIPQMGAIDISPQDVARAVRPLPNWKSPGPDGLHNFWIKWFTRSHARLAYQFQSALESGSLPQFLTTGITHLLHKSGSTAEPKNYRPITCLPTVYKVLTSILRSKINSHIDKNLIMSPSQNGCRNGSRGTKELLLIDMTISQQVRRFRKDLSTCWIDYKKAYDSVPHTWLMRVLELYKIDTTLRTFLMSCMRQWSTVLRYPGCRHIQRNSEPVRIERGIFQGDSLSPLWFCLALNPLSTLLENSGLGYRLKRGGQVISHLLYMDDLKLFAPNNLQLMELLKVTETFSSAIRMEFGVDKCAVMHVKRGEVVESVGTQLTDSINLRSLSPTETYKYLGMSEALGINITDMKQSLKERFFGRLKKVFNSLLSGGNKVRAFNGWVMPVLMYSFGVLKWTQTELDALDRRVRTLLTAYRMHHPRSSVMRLYIPRKCGGRGFLNAKTLHNREVCSLREYFLATDVGMHRDVVAVDKGLTPLSLANENWRKPVVLHTNDRREVWQSKELHGRFFRAFHGPDVDQLASVAWLRFGDLFGETEGFVCAIMNEVIMTNNYRRFIVKDGTVDICRACHRPGESIRHIISGCSRLANGEYLHRHNLVARIIHQQLALKYSLVESEVPYYRYEPDPVLDNGHITLYWDRSIITDRTIVANKPDIVVVDRSERRAMIVDISVPHDENLVKAEKDKQIKYIDLAREVVDMWDVDSAIIVPIVVSANGLIAKSLDQHLRRLALGGWIKALIQKAVLLDTARIVRRFLSLEP

SEQ ID NO: 10970 - protein, 1200 aa, Mythimna impura
MLTRAAARRARLPPPASSLSSASPPPEPSPTVSAVTPAVAVASSSSDEYFSPPTSPPPARRRRGRRPPSGLGPRGPPASDRVPAPGGSVQRMRWTQSINENVMRAYYGATEGGNNLTAYRVRMLSLFQVLEPAVNVSAQRLSDQVRVIQRNHMLDDTVLDRLRTEMSNHAIAPSSQPVVPVMVPPSYHLSDHADEEITDMVTHVSTQCNNELRSALECAIREYRNMPLELRPRLPRLPMHNKNKALVAALDLQLSNYFDDCEDLTDTHSIMYCAAVAACRVAHVKFPSCDVSTRPKPAVPAWQCRIERRIGGARALIGKLICFREGNTRPRVMRFVRRAFSGTDISPRDYMSRVTERIDFLKQKVYAWANRIRRYKRRVERYTQNRTFRSNERWVYRAWERPDQGVTDTRLPDDDAMSSFWRSIWSVPVSHTEGDWTREVERACDPIPQMGAIDISPQDVARAVRPLPNWKSPGPDGLHNFWIKWFTRSHARLAYQFQSALESGSLPQFLTTGITHLLHKSGSTAEPKNYRPITCLPTVYKVLTSILRSKINSHIDKNLIMSPSQNGCRNGSRGTKELLLIDMTISQQVRRFRKDLSTCWIDYKKAYDSVPHTWLMRVLELYKIDTTLRTFLMSCMRQWSTVLRYPGCRHIQRNSEPVRIERGIFQGDSLSPLWFCLALNPLSTLLENSGLGYRLKRGGQVISHLLYMDDLKLFAPNNLQLMELLKVTETFSSAIRMEFGVDKCAVMHVKRGEVVESVGTQLTDSINLRSLSPTETYKYLGMSEALGINITNMKQSLKERFFGRLKKVFNSLLSGGNKVRAFNGWVMPVLMYSFGVLKWTQTELDALDRRVRTLLTAYRMHHPRSSVMRLYIPRKCGGRGFLNAKTLHNREVCSLREYFLATDVGMHRDVVAVDKGLTPLSLANENWRKPVVLDTNDRREVWQSKELHGRFFRAFHGPDVDQLASVAWLRFGDLFGETEGFVCAIMDEVIMTNNYRRFIVKDGTVDICRACHRPGESIRHIISGCSRLANGEYLHRHNLVARIIHQQLALKYSLVESEVPYYRYEPDPVLDNGHITLYWDRSIITDRTIVANKPDIVVVDRSERRAMIVDISVPHDENLVKAEKDKQIKYIDLAREVVDMWDVDSAIIVPIVVSANGLIAKSLDQHLRRLALGGWIKALIQKAVLLDTARIVRRFLSLEP

SEQ ID NO: 10971 - protein, 1200 aa, Mythimna impura
MLTRSRAQKLHTHPTSSGSSLSSASQPPGPAPTVSPEIPVAAVASSSSDEYFSPPTTPPPARRRGRGRPPASLGPRGPPASDRVPAAGGSVQRMRWTSSINENVMRSYFGATEGGINLTAYRSRMLSLFQVLEPAVNVSVQRLSDQVRVIQRNRMLDDAVLDRLRLESQSSRVSPATTPAAVLRLPTASPRPDQVGDADDDAAISVSTQCNDRLRGALEDAFREYRSTPPGLRPRLPRLPMHKRNRALVCALDSQLSNCFDSSKDLTDTHSILYCAAVAACRVAHVKFPNCDRATRPAVPAWQCRIEHRIGEARALIGKLICFREGNTRPRVMRFVRRAFSGTDISPRDYLPCVTERIDFLKQKIYAWANRIRRYKRRVERYTRNRTFQSNERWVYRDWERSDQGVTDTRLPDDDAMCSFWRSIWSAPVSHTEGDWIRGVERACDLLPEMGAITISPQDVARAVRPLPNWKSPGPDGLHNFWVKWFQRSHARLASQFQSALESGSLPQFLTTGITHLLHKSGSTAEPKNYRPITCLPTVYKILTSILRAKINSHIETNSIMSASQNGCRNGSRGTKELLLIDIAISQQVRRSRKNLSACWIDYKKAYDSVPHTWLMRVLELYKVDATLRTFLMSCMGQWRTVLHYPGCRQIQENNEPIRIERGIFQGDSLSPLWFCLALNPLSTLLEGSGLGYRLKRGGQVISHLLYMDDLKLFAPNNLQLVELLKVTETFSSAIRMEFGVDKCAVIHVKRGEIMESVGIQLSDSIHLRSLCSTETYKYLGMSESLGINTDDVKQSLKERFFGRLNKVLNSLLSGGNKVRAFNGWVMPVLMYSFGILKWTQTELDALDRRVRTLLTANRMHHPRSSVMRLYIPRKCGGRGFLNAKTLHNREVCSLREYFLKTDVGMHRDVVAVDKGLTPLSLANENWRKPIVLDTNDRREVWQSKELHGRFYRALHGPDVDLLASVSWLRFGDLFGETEGFVFAIMDEVMMTNNYRKYIVKDGTVDICRACHRPGESIRHIISGCSHLANGDYLHRHNLVARIIHQQLALKYNLVESEVPYYRYVPDPVLDNGNITLYWDRSIITDRTIVANKPDIVMIDRLERRTMIVDIAVPHDENLVKAEKDKQTKYLDLAREVVDMWEVDKAIIVPIVVTANGLIAKSLEQHLRRLSLGSWIKGLIQKAVLLDTARIVRRFLSQEP

SEQ ID NO: 10972 - protein, 975 aa, Mythimna impura
MPLELRPRLPRLPMHNKNKALVAALDLQLSNYFDDCEDLTDTHSIMYCAAVAACRVAHVKFPSCDVSTRPKPAVPAWQCRIERRIGGARALIGKLICFREGNTRPRVMRFVRRAFSGTDISPRDYMSRVTERIDFLKQKVYAWANRIRRYKRRVERYTQNRTFRSNERWVYRAWERPDQGVTDTRLPDDDAMSSFWRSIWSVPVSHTEGDWTREVERACDPIPQMGAIDISPQDVARAVRPLPNWKSPGPDGLHNFWIKWFTRSHARLAYQFQSALESGSLPQFLTTGITHLLHKSGSTAEPKNYRPITCLPTVYKVLTSILRSKINSHIDKNLIMSPSQNGCRNGSRGTKELLLIDMTISQQVRRFRKDLSTCWIDYKKAYDSVHHTWLMRVLELYKIDTTLRTFLMSCMRQWSTVLRYPGCRHIQRNSEPVRIERGIFQGDSLSPLWFCLALNPLSTLLENSGLGYRLKRGGQVISHLLYMNDLKLFAPNNLQLMELLKVTETFSSAIRMEFGVDKCAVMHVKRGEVVESVGTQLTDSINLRSLSPTETYKYLGMSEALGINITDMKQSLKERFFGRLKKVFNSLLSGGNKVRAFNGWVMPVLMYSFGVLKWTQTELDALDRRVRTLLTAYRMHHPRSSVMRLYIPRKCGGRGFLNAKTLHNREVCSLREYFLATDVGMHRDVVAVDKGLTPLSLANENWRKPVVLDTNDRREVWQSKELHGRFFRAFHGPDVDQLASVAWLRFGDLFGETEGFVCAIMDEVIMTNNYRRFIVKDGTVDICRACHRPGESIRHIISGCSRLANGEYLHRHNLVARIIHQQLALKYSLVESEVPYYRYEPEPVLDNGHITLYWDRSIITDRTIVANKPDIVVVDRSERRAMIVDISVPHDENLVKAEKDKQIKYIDLAREVVDMWDVDSAIIVPIVVSANGLIAKSLDQHLRRLALGGWIKALIQKAVLLDTARIVRRFLSLEP

SEQ ID NO: 10973 - protein, 1109 aa, Mythimna impura
MRWTRSINENVMRSYYGATEGGNNLTAYRVRMLSLFQVLEPAVNVSAQRLSDQVRVIQRNHMLDDTVLDRLRTEMGSHAIASSSQAEVHSQVSPSYHVSNHADEEITDMVTPVSTQCNNELRSALECAIREYRNMPLELRPRLPRLPMHNKNKALVAALDLQLSNYFDDCEDLTDTHSIMYCAAVAACRVAHVKFPNCDVATRPKPAVPAWQCRIERRIGGARALIGKLICFREGNTRPRVMRFVRRAFSGTDISPRDYMSRVTERIDLLKQKVYAWANRIRRYKRRVELYTQNRTFRSNERWVYRAWERPDQGVTDARLPDDDVMSSFWRSIWSVPVSHTEGDWTREVERACDPIPQMGAIDISPQDVARAVRPLPNWKSPGPDGLHNFWIKWFTRSHARLAYQFQSALESGSLPQFLTTGITHLLHKSGSTAEPKNYRPITCLPTVYKVLTSILRSKINSHIDKNFIMSPSQNGCKNGSRGTKELLLIDMTISQQVRRSRKDLSTCWIDYKKAYDSVPHTWLMRVLELYKIDTTLRTFLMSCMRQWSTVLRYPGCRHTQRNSEPVRIERGIFQGDNLSPLWFCLALNPLSTLLENSGLGYRLQRGGQVISHLLYMDDLKLFAPNNLQLMELLKVTETFSNAIRMEFGVDKCTVMHVKRGEVVESVGTQLTDSINLRSLSPTETYKYLGMSEALGINITDMKQSLKERFFGRLKKVFNSLLSGGNKVRAFNGWVMPVLMYSFGVLKWTQTELDALDRKVCTLLTAYRMHHPRSSVMRLYIPRKCGGRGFLNAKTLHNREVCSLREYFLAADVGMHRDVVAVDKGLTPLSLANENWRKPVVLDTNDRREVWQSKELHGRFFRALHGPDVDQLASVAWLRSGDLFGETEGFVCAIMDEVIMTNNYRRFIVKDGTVDICRACHRPGESIRHIISGCSRLANGEYLHRHNLVARIIHQQLALKYSLVESEVPYYRYEPDPVLDNGHITLYWDRSIITDRTIVANKPDIVMVDRSERRAMIVDISVPHDENLVKAEKDKQIKYIDLAREVVDMWDVDSAIIVPIAVSGNGLIAKSLDQHLRRLALGDWIKGLIQKAVLLDTARIVRRFLSLEP

SEQ ID NO: 10974 - protein, 1200 aa, Mythimna impura
MLTRAAARRARLPPPASSLSSASPPPEPSPTVSAVTPAVAVASSSSDEYFSPPTSPPPARRRRGRRPPSGLGPRGPPASDRVPAPGGSVQCMRWTQSINENVMRAYYGATEGGNNLTAYRVRMLSLFQVLEPAVNVSAQRLSDQVRVIQRNHMLDDTVLDRLRTEKSNHAIAPSSQSVVPVMVPPSYHLSGHVDEEITDMVTHVSTQCNNELRSALECAIREYRNMPLELRPRLPRLPMHNKNKALVAALDLQLSNYFDDCKDLTDTHSIMYCAAVAACRLAHVKFPNCDVATRPKPAVPAWQCRIERRIGGARALIGKLICFREGNTRPRVMRFVRRAFSGTDISPRDYMSRVTERIDFLKQKVYAWANRIRRYKRRVDRYTQNRTFRSNERWVYRAWERPDQGVTDACLPDDDAMSSFWRSIWSVPVSHTEGDWTREVERACDPIPQMGAIDISPQDVARAVRPLPNWKSPGPDGLHNFWIKWFTRSHARLAYQFQSALESGSLPQFLTTGITHLLHKSGSTAEPKNYRPITCLPTVYKVLTSILRSKINSHIDKNLIMSPSQNGCRNGSRGTKELLLIDMTISQQVRRSRKDLSTCWIDYKKAYDSVPHTWLMRVLELYKIDTTLRTFLMSCMRQWSTVLRYPGCRHTQRNSEPVRIERGIFQGDSLSPLWFCLALNPLSTLLENSGLGYRLKRGSQVISHLLYMDDLKLFAPNNLQLMELLKVTETFSSAIRMEFGVDKCAVMHVKRGEVVESVGTQLTDFINLRSLSPTETYKYLGMSEALGINITDMKQSLKERFFGRLKKVFNSLLSGGNKVRAFNGWVMPVLMYSFGVLKWTQTELDALDRKVRTLLTAYRMHHPRASVMRLYIPRKCGGRGFLNAKTLHNREVCSLREYFLAADVGMHRDVVTVDKGLTPLSLANENWRKPVVLDTNDRREVWQSKELHGRFFRALHGPDVDQLASVAWLRSGDLFGETEGFVCAIMDEVIMTNNYRRFIVKDGTVDICRACHRPGESIRHIISGCSRLANGEYLHRHNLVARIIHQQLALKYSLVESEVPYYRYEPDPVLDNGHITLYWDRSIITDRTIVANKPDIVVVDRSERRAMIVDISVPHDENLVKAEKDKQIKYIDLAREVVDMWDVDSAIIVPIVVSGNGLIAKSLDQHLRRLALGDWIKGLIQKAVLLDTARIVRRFLSLEP

SEQ ID NO: 10975 - protein, 1202 aa, Phlogophora meticulosa
MLTRSRARVLNAPKTSSGSSLSSASQLPGPAPDVSPVTPAAAVVSSSSDEYYSPPTSPPPVRRCGRGRPPASLGLRGTPASARVPASGGSVQRMRWTQSINENVMRSYYGATEGGTNLTAYRGRMLSLFQVFEPAVNVSAQRLSDQVRVIQRNHMLDDTVLDRLRLNSRSIRVMPASPLVAVQLPTLPIVSPRPDYVGEEDDDAAISVSSQCNVRLRSALEDAFREYRSTPPGLRQRLPRLPMHKKNKALMCTLDSLLSNSFDNSKDLADTHSILYCAAAAACRVANVKFPNSKKATRPAVPAWQCRIERRIGEARVLIGKLICFREGNTRPRVMRFVRRAFSGTDISSRDYLTRVTERIDFLKQKICAWANRIRRYKRRVERYTQNRTFRSDERWVYRAWERPDQGVIDTCLPDDEAMYSFWRSIWSVPVSHTEGDWTREVERACEPLPVMGTINISPQDVACAVRPLPNWKSPGPDGLHNFWIKWLKSSHARLATQFQSALESGSLPQFLTTGITHLLHKSGSTAEPKNYRPITCLPTVYKVLTSILRSKINNHIETSLIMSVSQNGCKNGSRGTKELLLIDMAISQQVRRSRKDLSTCWIDYKKAYDSVPHTWLMRVLELYKIDTTLRTFLTSCMRQWRTVLHYPGCRQFRENSEPIRIERGIFQGDSLSPLWFCLALNPLSTLLEGSGLGYRLRRGAQVISHLLYMDDLKLFAPNNLQLMELLKVTETFSSAIRMDFGVDKCAVMHVKRGGIVESAGTQLSDSIYLRSLSSTETYKYLGMSEALGINAADMKQSLKERFFGRLNKVLNSLLSGGNKVRAFNGWVMPVLMYSFGILKWTQTELDALDRRVRTLLTANRMHHPRSSVMRLYISRKCGGRGFLNAKTLHNREVCSLREYFIEADVGMHRDVVAVDKGLTPLSLANENWRKPIVLDTTDRMEIWKNKELHGRFYRVLHGPDVDLLASISWLRFGDLFGETEGFVCAIMDEVIMTNNYRKYIVKDGTVDICRACHRPGESIRHIISGCSRLANGEYLHRHNLVARIIHQQLALKYNLVELEVPYYKYVPDPVLENGNITLYWDRSIITDRTIVANKPDIVVIDRSERRTMIVDITVPHDENLVKAEQEKQMKYLDLAREVVDMWDVNTAVIVPIVVTANGIIAKSLDQHLRRLSLGSWIKGLIQKAVLLETARIVRRFLSQEP

SEQ ID NO: 10976 - protein, 1200 aa, Phlogophora meticulosa
MLTRSAARRARPPPLASSLSSASPPPESSPIVSTVTPAVAIASSSSDEYFSPPTSPPPARRRRGRRPPDSIGPRGPPASDRVPASGGSVQRMRWTQSINENVMRSYYGATEGGTNLTAYRGRMLSLFQMLEPAVNVSAQRLSDQVRVIQRNHMLDDVVLDRLRLNSRIYHVTPALPPVAVQLQSLPSVSPRPDYVGEEDDDAAISVSSQCNVRLRSALEDAFREYRSTPPELRSRLPRLPMHKKNKALMSALDSLLTKSFDNSKDLTDTHSILYCAAAAACRVANVKFPNTERATRPTVPAWQCRIQRRIDEARALIGKLICFREGNTRPRVMRFVRRAFSGTDISSRDYLTRVTERIDFLKQKICAWANRIRRYKRRVERYTQNRTFRSDERWVYRAWERSDQGVTDTCLPDDEAMCSFWRSIWSVPVSHTEGNWTREIERACEPLPEMGAINISPQDVASAVRPLPNWKSPGPDGLHNFWIKWLQSSHARLACQFQSALESGSLPQFLTTGITHLLHKSGSTAEPRNYRPITCLPTVYKVLTSILRSKINNHIDSNLIMSFSQNGCRNGSRGTKELLLIDTAISQQVRRSRKDLSTCWVDYKKAYDSVPHTWLMRVLELYKVDATLRTFLMSCMGQWRTVLRYPGCQQTRENSEPIRIERGIFQGDSLSPLWFCLALNPLSTLLEGSGLGYRLRTGGQVISHLLYMDDLKLFAPNNLQLMELLKVTETFSSAIRMDFGVDKCAVMHVKRGEIVESVGTQLSDSIYLRSLSSTETYKYLGMSEALGINATDMKQSLKERFFGRLNKVLNSLLSGGNKVRAFNGWVMPVLMYSFGILKWTQTELDALDRRVRTLLTANRMHHPRSSVMRLYIPRKCGGRGFLNAKTLHNREICSLREYFLKADVGMHRDVVAVDKTFTPLSLANKNWRKPIVLDTADRMEIWKSKELHGRFYRVLHGPDVDLVASISWLRFGDLFGETEGFVCAIMDEVIMTNNYRKYIVKDGTVDICRACHRPGESIRHIISGCSRLANGDYLHRHNLVARIIHQQLALKYNLVDLEVPYYKYVPDPVLENGSITLYWDRSIITDRTIVANKPDIVVIDRSERRTMIIDITVRHDENLVKAEKEKQMKYLDLAREVVDMWDVNTAVIVPIVVTANGIIAKSLDQHLKRLSLGSWIKGLIQKAVLLDTARIVRRFLSQEP

SEQ ID NO: 10977 - protein, 1007 aa, Phlogophora meticulosa
MYRYSKLPIIWGKKGACNVRLRSALEDAFREYRSTPPGLRQRLPRLPMHKKNKALMCTLDSLLSNSFDSSRDLADTHSILYCAAVAACRVANVKFPNSVRSTRPAIPAWQCRIERRIGEARVLIGKLICFREGNTRPRVMRFVRRAFSGTDISSRNYLTRVTECIDFLKQKICAWANRIRRYKRRVERYTQNRTFRSDERWVYRTWERPDQGVTDTFLPDDEAMCLFWRSIWSVPVSHTEGDWTREVERTCEPLPEMGAINISPQDVAYAVRPLPNWKSPGPDGLHNFWIKWLKSSHARLASQFQSALESGSLPQFLTTGITHLLHKSGSTAEPKNYRPITCLPTVYKVLTSILRSKINNHIDSTSIMSVSQNGCKNGSRGTKELLLIDMAISQQVRRSRKDLSICWIDYKKAYDSVPHTWLMRVLELYKIDATLRTFLKSCMGQWRTVLHYPGCRQFQENSEPIRIERGIFQGDSLSPLWFCLALNPLSTLLEGSGLGNRLRRGGQVISHLLYMDDLKLFAHNNLQLMKLLKVTETFSSAIRMDFGVDKCAVMHVKRGGIVESAGTQLSDSIYLRSLSSTETYKYLGMSEALGINTADMKQSLKERFFGRLNKVLNSLLSGGNKVRAFNSWVMPVLMYSFGILKWTQTELDALDRRVRTLLTANRMHHPRSSVMRLYISRKCGGRGFLNAKTLHNREVCSLREYFLETDVGMHRDVVAMDKALTPLSLANENWRKPIVLDTTDRMEIWKSKELHGRFYRVLHGPDVDLSASVSWLRFGDLFGETEGFVCAIMDEVIMTNNYRKYIVKDGTVDICRACHRSGESIRHIISGCSRLANGDYLHRHNLVAKIIHQQLALKYNLVESEVPYYKYVPDPVLENGNITLYWDRSIITDRTIVANKPDIVVIDRLERRTMIVDITVPHDENLVKAEKEKQIKYLDLAREVVDMWDVNTAVIVPIVVTANGIIAKSLDQHLRRLSLGSWIKGLIQKAVLLDTARIVRRFLSQEP

SEQ ID NO: 10978 - protein, 1202 aa, Phlogophora meticulosa
MLTRSRARVLNAPTTSSGSSLSSASQLPGPAPDVNPVTPAAAVASSSSDEYYSPPTSPPPVRRCGRGRPPASLGLRGPPASARVPASGGSVQRMRWTQSINENVMRSYYGATEGGINLTAYRGRMLSLFQVLEPAVNVSAQRLSDQVRVIQRNHMLDDAVLDRLRLNSRSNRVTPASPPVAVQLQNLPSVSPRPDYVGEEDDDAAISVSSQCNVRLRSALEDAFREYRSTPPGLRQRLPRLPMHKKNKALMCTLDSLLSNSFDSSRDLADTHSILYCAAVAACRVANVKFPNSVRSTRPAIPAWQCRIERRIGEARVLIGKLICFREGNTRPRVMRFVRRAFSGTDISSRDYLTRVTERIDFLKQKICAWANRIRRYKRRVERYTQNRTFRSDERWVYRTWERPDQGVTDTFLPDDEAMCLFWRSIWSVPVSHTEGDWTREVERTCEPLPEMGAINISPQDVACAVRPLPNWKSPGPDGLHNFWIKWLKSSHARLASQFQSALESGSLPQFLTTGITHLLHKSGSTAEPKNYRPITCLPTVYKVLTSILRSKINNHIDSTSIMSVSQNGCKNGSRGTKELLLIDMAISQQVRRSRKDLSTCWIDYKKAYDSVPHTWLMRVLELYKIDATLRTFLKSCMGQWRTVLHYPGCRQFQENSEPIRIERGIFQGDSLSPLWFCLALNPLSTLLEGSGLGYRLRRGGQVISHLLYMDDLKLFAHNNLQLMKLLKVTETFSSAIRMDFGVDKCAVMHVKRGGIVESAGTQLSDSIYLRSLSSTETYKYLGMSEALGINTADMKQSLKERFFGRLNKVLNSLLSGGNKVRAFNSWVMPVLMYSFGILKWTQTELDALDRRVRTLLTANRMHHPRSSVMRLYISRKCGGRGFLNAKTLHNREVCSLREYFLEADVGIHRDVVAMDKALTPLSLANENWRKPIVLDTTDRMEIWKSKELHGRFYRVLHGPDVDLSASVSWLRFGDLFGETEGFVCAIMDEVIMTNNYRKYIVKDGTVDICRACHRPGESIRHIISGCSRLANGDYLHRHNLVAKIIHQQLALKYNLVESEVPYYKYVPDPVLENGNITLYWDRSIITDRTIVANKPDIVVIDRLDRRTMIVDITVPHDENLVKAEKEKQIKYLDLAREVVDMWDVNTAVIVPIVVTANGIIAKSLDQHLRRLSLGSWIKGLIQKAVLLDTARIVRRFLSQEP

SEQ ID NO: 10979 - protein, 1198 aa, Xestia xanthographa
MLTRSAAARRARLPPPDSSLSSASPPPEPSPIVSAVTPAVAVASSSSDEYFSPPTTPPPARRRGGRRPPDGLGPRGPPASDRVPAPGGSVQRMRWTQSINANVMRAYYGATEGGNNLTAYRVRMLSLFQVLEPAVNVSAQRLSDQVRVIQRNRMLDDTVLDRLRTEIQSNHVIATPSQAVVPPQSSIIPNCDNDVSNDMVTNVSTQCNVEMRSALEGAIREYRFMQPDLRPRILRLPMHNKNRALVAVLDSQLSNYFDNCEDLTDVHSILYCAAVATCRVAHVKFPSDRATRPKPAVPAWQYRIERRIGGARALIGKLVCFREGNTRPRVMRFVRQAFSGTDISPRDYMSRVTERIDFLKQKVYAWANRIRRYKRRVDRYTQNRTFQKDERWVYRAWERPDQGVADSHLPDDDAMCSFWRSIWSVPVSHAEGEWTRVIERACDPISEMGAITISPQDVARAVRPLPNWKSPGPDGLHNFWIKWFTRSHARLATLFQSALESGSLPEFLTTGITHLLHKSGSTAEPKNYRPITCLPTVYKVLTSILRTKISKHIDDNSVMSASQNGCRNGSRGTKELLLIDMAISHQVRRSRKDLSTCWIDYKKAYDSVPHTWLMRVLQLYKVDATLRTFLMSCMGQWRTVLHYPGCRQIQRNSEPIRIERGIFQGDSLSPLWFCLALNPLSTLLEDSGLGYRLRKDGQVISHLLYMDDLKLFAPNDLRLMELLKVTETFSNAIRMEFGVDKCAVMHVKRGEIVESVGTQLSDSITLRSLSATETYKYLGMSEALGVNVADMKQSLKERFFGRLKKVLNSLLSGGNKVRAFNGWVMPVLMYSFGILKWTQTELDALDTKVRKLLTAYRMHHPRSSVMRLYIPRKCGGRGFLNAKTLHNREICSLREYFLGTDVGMHRDVVTMDKGLTPLSLAKENWRKPPVLDTNDRREVWQSKELHGRFFRALHGPDVDLSASVAWLRSGDLFGETEGFVCAIMDEVMMTNNYRRFIVKDGTVDICRACHRPGESIRHIISGCSRLANGEYLHRHNLVARIIHQQLALKYNLVESEVPYYRYVPDPVLDNGCITLYWDQSIITDRTIVANKPDIVVVDRSERRAMIVDITVPHDENLVKAEKDKQIKYLDLAREVVDMWEVDSAIIVPIVVSAHGLIAKSLDQYLRRLSLGSWIKGLIQKAVLLDTARIVRRFLSLEP

SEQ ID NO: 10980 - protein, 1026 aa, Xestia xanthographa
MIAVQVQNVSSAPPRSDRDGEEDDDEVISVSTQCNAQLRSALESAFREYRSTPPELRPRLPRLPMHNKNKALMCALDSQLSNCFDSSKDLADTHSILYCGAVAACRVAHVKFPNNDRATRPKLAVSAWQCRIERRIGEARALIGKLICFREGNTRPRVMRFVRRAFSGTDISFRDYLARVTERIDSLKQKICAWASRIRRYKRRVERYTQNRTFQSDERWVYRAWERPDQGVTDTRLPDDNAMCSFWRNIWSVPVSHTEGDWTWEVEQACDPIPEMGAIIISPQDVARAVRPLPNWKSPGPDGLHNFWIKWFPRSHACLASQFQSALESGSLPQFLTTGITHLLHKSGSTAEPKNYRPITCLPTVYKVLTSILRAKINQHIDSNSIMSASQNGCRNGSRGTKELLLIDMAISQQVRRSRKNLSTCWIDYKKAYDSVPHTWLMRVLELYKVDATLRTFLMSCMRQWRTVLRYPGCRQIQGNSEPIRIERGIFQGDSLSPLWFCLALNPLSTLLERSGLGYLLRRDGQVISHLLYMDDLKLFAPNNLQLMKLLKVTETFSSAIRMEFGVDKCAVMHVKRGEIMESVGTQLSDSIHLRSLSSTETYKYLGMSEALGINTADMKQSLRERFFGRLNKVLGSLLSGGNKVRAFNGWVMPVLMYSFGILKWTQTELDALDRRVRTLLTANRMHHPRSSVMRLYIPRKCGGRGFLNAKTLHNREVCSLREYFLEADGEMHRDVVSVDKGLTPLSLANENWRKPKVLNTNDRKEEWHGKELHGRFYRALHGPDVDFLASVSWLRFGDLFGETEGFVCAIMDEVMMTNNYRKYIVKDGTVDICRACHRPGESIRHIISGCSSLANGEYLHRHNLVARIIHQQLALKYNLVESEVPYYRYAPDPVLDNGNITLYWDRPITTDRTVVANRPDIVVIDRLERRTMIVDIAVPHDENLVKAEKDKQFKYLDLAREVVDMWDVNTAVIVPIVVSANGLIAKSLDQHLRRLSLGGWIKGLIQKAVLLDTARIVRRFLSQEP

SEQ ID NO: 10981 - protein, 1198 aa, Xestia xanthographa
MLTRSAAARRARLPPPDSSLSSASPPPEPSPIVSAVTPAVAVASSSSDEYFSPPTTPPPARRRGGRRPPDGLGPRGPPASDRVPAPGGSVQRMRWTQSINENVMRAYYGATEGGNNLTAYRVRMLSLFQVLEPAVNVSAQRLSDQVRVIQRNRMLDDTVLDRLRTEIQSNHVIATPSQAVVPPQSSIIPNCDNDVSNDMVTNVSTQCNVEMRSALEGAIREYRFMQPGLRPRIPRLPMHNKNRALVAVLDSQLSNYFDNCEDLTDVYSILYCAAVAACRVAHVKFPSDRATRPKPAVPAWQYRIERRIGGARALIGKLVCFREGNTRPRVMRFVRQAFSGTDISPRDYMSRVTERIDFLKQKVYAWANRIRRYKRRVDRYTQNRTFQKDERWVYRAWERPDQGVADTHLPDDDAMCSFWRSIWSVPVSHAEGEWTRVIERACDPISEMGAITISPQDVARAVRPLPNWKSPGPDGLHNFWIKWFTRSHARLAILFQSALESGSLPEFLTTGITHLLHKSGSTAEPKNYRPITCLPTVYKVLTSILRTKISKHIDDNSVMSASQNGCRNGSRGTKELLLIDMAISHQVRRSRKDLSTCWIDYKKAYDSVPHTWLMRVLELYKVDATLRTFLMSCMGQWRTVLRYPGCRQIQRNSEPIRIERGIFQGDSLSPLWFCLALNPLSTLLEDSGLGYRLRKDGQVISHLLYMDDLKLFAPNDLRLMELLKVTETFSNAIRMEFGVDKCAVMHVKRGEIVESVGTQLSDSITLRSLSATETYKYLGMSEALGVNVADMKQSLKERFFGRLKKVLNSLLSGGNKVRAFNGWVMPVLMYSFGILKWTQTELDALDTKVRKSLTAYRMHHPRSSVMRLYIPRKCGGRGFLNAKTLHNREICSLREYFLGTDVGMHRDVVTMDKGLTPLSLAKENWRKPPVLDTNDRREVWQSKELHGRFFRALHGPDVDLSASVAWLRSGDLFGETEGFVCAIMDEVMMTNNYRRFIVKDGTVDICRACHRPGESIRHIISGCSRLANGEYLHRHNLVARIIHQQLALKYNLVESEVPYYRYVPDPVLDNGCITLYWDQSIITDRTIVANKPDIVVVDRSERRAMIVDITVPHDENLVKAEKDKQIKYLDLAREVVDMWEVDSAIIVPIVVSAHGLIAKSLDQYLRRLSLGSWIKGLIQKAVLLDTARIVRRFLSLEP

SEQ ID NO: 10982 - protein, 1198 aa, Xestia xanthographa
MLTRSAAARRARLPPPDSSLSSASPPPEPSPIVSAVTPAVAVASSSSDEYFSPPTTPPPARRRGGRRPPDGLGPRGPPASDRVPAPGGSVQRMRWTQSINENVMRAYYGATEGGNNLTAYRVRMLSLFQVLEPAVNVSAQRLSDQVRVIQRNRMLDDTVLDRLRTEIQSNHVIATPSQAVVPPQSSIIPNCDNDVSNDMVTNVSTQCNVEMRSALEGAIREYRFIQPGLRPRIPRLPMHNKNRALVAVLDSQLSNYFDNCEDLTDVHSILYCAAVAACRVAHVKFPSDRATRPKPAVPAWQYRIERRIGGARALIGKLVCFREGNTRPRVMRFVRQAFSGTDISPRDYMSRVTERIDFLKQKVYAWANRIRRYKRRVDRYTQNRTFQKDERWVYRAWERPDQGVADTHLPDDDAMCSFWRSIWSVPVSHAEGEWTRVIERACDPISEMGAITISPQDVARAVRPLPNWKSPGPDGLHNFWIKWFTRSHARLATLFQSALESGSLPEFLTTGITHLLHKSGSTAEPKNYRPITCLPTVYKVLTSILRTKISKHIDDNSVMSASQNGCRNGSRGTKELLLIDMAISHQVRRSRKDLSTCWKDYKKAYDSVPHTWLMRVLELYKVDATLRTFLMSCMGQWRTVLRYPGCRQIQRNSEPIRIERGIFQGDSLSPLWFCLALNPLSTLLEDSGLGYRLRKDGQVISHLLYMDDLKLFAPNDLRLMELLKVTETFSNAIRMEFGVDKCAVMHVKRGEIVESVGTQLSDSITLRSLSATETYKYLGMSEALGVNVADMKQSLKERFFGRLKKVLNSLLSGGNKVRAFNGWVMPVLMYSFGILKWTQTELDALDTKVRKSLTAYRMHHPRSSVMRLYIPRKCGGRGFLNAKTLHNREICSLREYFLGTDVGMHRDVVTMDKGLTPLSLAKENWRKPPVLDTNDRREVWQSKELHGRFFRALHGPDVDLSASVAWLRSGDLFGETEGFVCAIMDEVMMTNNYRRFIVKDGTVDICRACHRPGESIRHIISGCSRLANGEYLHRHNLVARIIHQQLALKYNLVESEVPYYRYVPDPVLDNGCITLYWDQSIITDRTIVANKPDIVVVDRSERRAMIVDITVPHDENLVKAEKDKQIKYLDLAREVVDMWEVDSAIIVPIVVSAHGLIAKSLDQYLRRLSLGSWIKGLIQKAVLLDTARIVRRFLSLEP

SEQ ID NO: 10983 - protein, 1000 aa, Xestia xanthographa
MVTNVSTQCNVEMRSALEGAIREYRFMQPDLRPRIPRLPMHNKKRALVAVLDSQLSNYFDNCEDLTDVHSILYCAAVAACRVAHVKFPSDRATRPKPAVPAWQYRIERRIGGARALIGKLVCFREGNTRPRVMRFVRQAFSGTDISPRDYMSRVTERIDFLKQKVYAWANRIRRYKRRVDRYAQNRTFQKDERWVYRAWERPDQGVADTHLPDDDAMCSFWRSIWSVPVSHAEGEWTRVIERACDPVSEMGAITISPQDVARAVRPLPNWKSPGPDGLHNFWIKWFTRSHARLATLFQSALESGSLPEFLTTGITHLLHKSGSTAEPKNYRPITCLPTVYKVLTSILRTKISKHIDDNSVMSASQNGCRNGSRGTKELLLIDMAISHQVRRSRKDLSTCWIDYKKAYDSVPHTWLMRVLELYKVDATLRTFLMSCMGQWRTVLRYPGCRQVQRNSEPIRIERGIFQGDSLSPLWFCLALNPLSTLLEDSGLGYRLRKDGQVISHLLYMDDLKLFAPNDLQLMELLKVTDTFSSAIRMEFGVDKCAVMHVKRGEIVESVGTQLSDSITLRSLSATETYKYLGMSEALGVNVADMKQSLKERFFGRLKKVFNSLLSGGNKVRAFNGWVMPVLMYSFGILKWTQTELDALDTKVRKLLTAYRMHHPRSSVMRLYIPRKCGGRGFLNAKTLHNREICSLREYFLGTDVGMHRDVVTVDKGLNPLSLAKENWRKPPVLDTNDRREVWQSKELHGRFFRALHGPDVDLPASVAWLRSGDLFGETEGFVCAIMDEVMMTNNYRRFIVKDGTVDICRACHRPGETIRHIISGCSRLANGEYLHRHNLVARIIHQQLALKYNLVESEVPYYRYVPDPVLDNGCITLYWDQSIITDRTIVANKPDIVVVDRSERRAMIVDITVPHDENLVKAEKDKQIKYLDLAREVVDMWEVDSAIIVPIVVSAHGLIAKSLDQYLRRLSLGSWIKGLIQKAVLLDTARIVRRFLSLEP

SEQ ID NO: 10984 - protein, 1200 aa, Cosmia trapezina
MLTRSATRRARLPPPDSSLSSASPPPVPSLTVNAVSTPAVVVASSSSDEYFSPPTTPPPARRRGGRRPPDGLGPRGPPASDRVPAPGGSVQRMRWTRSINENVMRSYYGATEGGNNLTAYRVRMHSLFRVLEPALNVSAQRLSDQVRVIQRNHMLDDTVLDRLRSEMQSSRVIAPLSQTIVAPPPPQCNTIQADEGSDGTAANVSAQCNEELRSALEGAIQEYRFVSPELRPRLPRLPMHNKNRALVAALDSQLSNYFDDCEDLTDTHSILYCAAVAACRVAHVKFANDSRATRPKPAVPAWQCRIERRIGGARALIGKLICFREGNTRPRVMRFVRRAFSGTDVSPQDYMSRVTERIDFLRQKVYAWANRIRRYKRRVDRYTQNRTFQSDERWVYRGWERPDQGVADTRLPDDDAMCSFWRSIWSVPVSHTEGDWAREVERACDPIPEMGAITICPQDVARAVRPLPNWKSPGPDGLHNFWIKWFRGSHARLAAQYQSALQSGSLPQFLTTGITHLLHKSGSTAEPKNYRPITCLPTVYKVLTSILRAKINEHIDTNSIMSASQNGSRNGSRGTKELLLIDMAISQQVRRSRKDLSTCWIDYKKAYDSVPHTWLMRVLELYKVDATLRTFLMSCMEQWRTVLRYPGCRNIQRNSEPIRIERGIFQGDSLSPLWFCLALNPLSTLLEDSGLGYRLRRGGQVISHLLYMDDLKLFAPNNLQLMELLKVTETFSSAIRMEFGVDKCAVMHVKRGEIVESVGTQLSDSINLRTLSASETYKYLGMSEALGINVADMKQSLRERFFGRLKKVFNSLLSGGNKVRAFNGWVMPVLMYSFGILKWTQTELDALDRRVRTLLTAYRMHHPRSSVMRLYIPRKCGGRGFLNAKTLHNREICSLREYFLEADVGMHRDVVAVDKGLTPLSLAKENWRKPVVLDTNDRMEVWQSKELHGRFFRALHGPDVDLLASVAWLRSGDLFGETEGFVCAIMDEVIMTNNYRRFIVKDGTVDICRACHRPGESIRHIISGCSRLANEEYLHRHNLVARIIHQQLALKYSLVESEVPYYRYVPDPVLENGNITMYWDRSIITDRTIVANKPDIVVVDRTERRAMVIDITVPHDGNLVKAEKDKQIKYLDLVREVVDMWDVDSSIIVPIVVSANGLIAKSLDQHLRRLSLGSWIKGLIQKAVLLDTARIVRRFLSLEP

SEQ ID NO: 10985 - protein, 1205 aa, Cosmia trapezina
MLTRSRAQQLRNTQPTSSGSSLSSASQLPEPAPDVSQVIPAAAVASSSSDEYFSPPTTPPPVRRRGRGRPPASLGPRGPSASDRVPAPGGSVQRMRWTQTVNENVMRAYFGATEGGSNLTAYRGRMLSLFQVLEPAVNVSAQRLSDQVRVIQRNHMLDDVVLDRLRLESRNSRVTSVSPMVAVQLQNLPSASPRPDCVGEEDDSGAISVSSQCNIQLRSALEDAFREYRSAPPGLRPRLPRLPMHKKNKALVGALDSQLSNCFDGSKDLADTHSILYCAAVAACRVAHVKFPNSDRVPRPKPAVPAWQCRIERRIGEARALIGKLICFREGNTRPRVMRFVRRVFSGTDISPRDYFACVTERIDFLKQKICAWANRIRRYRRRVERYTQNRTFQSDERWVYRAWERPDQGVADTQLPDDDAMCSFWRSIWSVPVSHTEGDWTREVERACDHIPQMGALTISPQDVARAVRPLPNWKSPGPDGLHNFWIKWFQRSHARLASQFQSALQSGSLPQFLTTGITHLLHKSGSTAEPRNYRPITCLPTVYKVLTSILRAKINKHIDTNSIMSASQNGCGNGSRGTKELLLIDMTINQQVRRSRKDLSTCWIDYKKAYDSVPHTWLMRVLELYKIDATLRTFLMSCMGQWRTVLRYPGCRNIQRNSEPIRIERGIFQGDSLSPLWFCLALNPLSTLLEDSGLGYRLRRGGQVISHLLYMDDLKLFAPNNLQLMELLKVTETFSSAIRMEFGVDKCAVMHVKRGEIVESVRTQLSDSIHLRSLSSLETYKYLGMSEALGINAADMKQSLRERFFGRLNKVLNSLLSGGNKVRAFNGWVMPVLMYSFGILKWTQTELDALDRRVRTLLTANRMHHPRSSVMRLYIPRKCGGRGFLNAKTLHNREVCSLREYFLEADVGMHRDVVSVDKGLTPLSLANENWRKPVVLDTNDRREVWQSKELHGRFYRVLHGPDVDFLASVSWLRFGDLFGETEGFVFAIMDEVMMTNNYRKYIVKDGTVDICRACHRPGESIRHIISGCSRLANGDYLHRHNLVARIIHQQLALKYSLVESEVPYYRYVPDPVLENGNITLYWDRSIITDRTIVANKPDIVVIDRLERRTMIVDIAVPHDENLVKAEKVKQIKYLDLAREVVDMWDVDTAVIVPIVVTANGIIAKSLDQHLRRLSLGGWIKGLIQRAVLLDTARIVRRFLSQQP

SEQ ID NO: 10986 - protein, 1200 aa, Cosmia trapezina
MLTRSATRKARLPPPDSSLSSASPPPVPSLTVSAVSTPAAVVASSSSDEYFSPPTTPPPARRRGGRRPPDGLGPRGPPASDRVPAPGGSVQRMRWTRAINENVMRSYYGATEGGNNLTAYRVRMHSLFQVLEPALNVSAQRLSDQVRVIQRNHMLDDTVLDRLRNEMQSSRVIAPLSQTIVAPPPPQCNTTQADEGSDGTAANVSTQCNEELRSALEGAIQEYRFVSPELRPRLPRLPMHNKNRALVAALDSQLSNYFDDCEDLTDTHSILYCAAVAACRVAHVKFANDSRATRPKPAVPAWQCRIERRIGGARALIGKLICFREGNTRPRVMRFVRRAFSGTDVSPQDYMSRVTERIDFLRQKVYAWANRIRRYKRRVDRYTQNRTFQSDERWVYRGWERPDQGVTDTRLPDDDTMCSFWRSIWSVPVSHTEGDWAREVRRACDPIPEMGAITICPQDVARAVRPLPNWKSPGPDGLHNFWIKWFLGSHACLAAQYQSALQSGSLPQFLTTGITHLLHKSGSTTEPKNYRPITCLPTVYKVLTSILRAKINEHIDTNSIMSASQNGSRNGSRGTKELLLIDMAISQQVRRSRRDLSTCWIDYKKAYDSVPHTWLMRVLELYKVDATLRTFLMSCMGQWRTVLRYPGCRNIQRNSEPIRIERGIFQGDSLSPLWFCLALNPLSTLLEDSGLGYRLRRGGQVISHLLYMDDLKLFAPSSLQLMELLKVTETFSSAIRMEFGVDKCAVMHVKRGEIVESVGTQLPDSINLRTLSAAETYKYLGMSEALGINVADMKQSLKERFFGRLKKVFNSLLSGGNKVRAFNGWVMPVLMYSFGILKWTQTELDALDRRVRTLLTAYRMHHPRSSVMRLYIPRKCGGRGFLNAKTLHNREICSLREYFLETDVGMHRDVVAVDKGLTPLSLAKENWRKPVVLDANDRMEVWQSKELHGRFFRALHGPDVNLLASVAWLRSGDLFGETEGFVCAIMDEVIMTNNYRRFIVKDGTVDICRACHRPGESIRHIISGCSRLANEEYLHRHNLVARIIHQQLALKYSLVESEVPYYRYVPDPVLENGHITLYWDRSIITDRTIVANKPDIVVVDRTERRAMIVDITVPHDGNLVKAEKDKQIKYIDLAREVVDMWDVDSAVIVPIVVSANGLIAKSLDQHLRRLSLGSWIKGLIQKAVLLDTARIVRRFLSLEP

SEQ ID NO: 10987 - protein, 1002 aa, Cosmia trapezina
MYSCALEDAFREYRSAPPGLRPRLPRLPMHKKNKALVGALDSQLSNCFDGSKDLADTHSILYCAAVAACRVAHVKFPNGDRVPRPKPAVPAWQCRIERRIGEARALIGKLICFREGNTRPRVMRFVRRAFSGTNISPRDYFTCVTERIDFLKQKICAWANRIRRYRRRVERYTQNRTFQSDERWVYRAWERPDQGVADTQLPDDDAMCSFWRSIWSVPVSHTEGDWTRGVERACDHIPQMGALTISPQDVARAVRPLPNWKSPGPDGLHNFWIKWFQRSHARLASQFQSALQSGSLPQFLTTGITHLLHKSGSTAEPRNYRPITCLPTVYKVLTSILRAKINKHIDTNSIMSASQNGCGNGSRGTKELLLIDMTINQQVRRSRKDLSTCWIDYKKAYDSVPHTWLMRVLELYKIDATLRTFLMSCMGQWRTVLRYPGCRNIQRNSEPIRIERGIFQGDSLSPLWFCLALNPLSTLLEDSGLGYRLRRGGQVISHLLYMDDLKLFAPNNLQLMELLKVTETFSSAIRMEFGVDKCAVMHVKRGEIVESVRTQLSDSIHLRSLSSLETYKYLGMSEALGINAADMKQSLRERFFGRLNKVLNSLLSGGNKVRAFNGWVMPVLMYSFGILKWTQTELDALDRRVRTLLTANRMHHPRSSVMRLYIPRKCGGRGFLNVKTLHNREICSLREYFLEADVGMHRDVVSVDKGLTPLSLANENWRKPIVLDTNDRREVWQSKELHGRFYRVLHGPDVDFLASVSWLRFGDLFGETEGFVFAIMDEVMMTNNYRKYIVKDGTVDICRACHRPGESIRHIISGCSRLANGDYLHRDNLVARIIHQQLALKYSLVESEVPYYRYVPDPVLENGNITMYWDRSIITDRTIVANKPDIVVIDRLERRTMIVDIAVPHDENLVKAEKDKQIKYLDLAREVVDMWDVDTAIIVPIVVTANGIIALTAGSLDPVPDTGRLLFFIFLNAFFTFVFIKIFKNVNDMYINEIKEMIMNVV

SEQ ID NO: 10988 - protein, 1104 aa, Mamestra brassicae
MRWTQSINENVMRSYFGATEGGTNLTAYRGRMLSLFQVLEPAVNVSAQRLSDQVRVIQRNRMLDDSVLDRLRMEICGHVITPSSQTVAPPQSQMSSPADEESNDRVTNVSTQCNEELRSALECAIREYRYVPPELRPRLPRLPMHNKNRALVAALDSQLSNYFDDCEDLTDTHSIMYCAAVAACRVAHVKMSNDRVTRPKPAVPAWQCRIERRIGGARALIGKLICFREGNTRPRLMRFVRRAFSGTDISPRNYMSRVTERIDFLKQKVYAWANRLRRYRRRVERYTQNRTFRSNERWVYRVWEQPDQGVTDTRLPDDDAMCSFWRNIWSVPVSHTEGDWIREVERACDPLQEMGAITISPQDVARAVRPLPNWKSPGPDGLHNFWIKWLQRSHARLASQYQTVLESGSLPEFLTTGVTHLLHKSGSIAEPKNYRPITCLPTVYKVLTSILRAKINNHINSNNIMSVSQNGCRNGSRGTKELLLIDMAISQQVRRSRKDLSTCWIDYKKAYDSVPHTWLMRVLELYKIDTMLRTFLMSCMGQWRTVLRYPGCRNIQRNSEPVKIERGIFQGDSLSPLWFCLALNPLSTLLENSGLGYRLKRGGQILSHLLYMDDLKLFAPSNLQLMELLKVTETFSSAIRMEFGVDKCAVMHVKRGEIMESVGTQLSDSINLRSLSSTETYKYLGMSEALGINVTDMKQSLKERFFGRLKKVFNSLLSGGNKVRAFNGWVMPVLMHSFGVLKWTQTELDALDRRVRTLLTAYRMHHPRSSVMRLYIPRKCGGRGFLNAKTLHNREICSLKEYFLAVDVGMHRDVVAVDKGLTPLSLANENWRKPAVLDTNDRRAVWQSKELHGRYFRALHGPDVDQLASVAWLRFGDLFGETEGFVCAIMDEVIMTNNYRRFIVKDGTVDICRACHRPGESIRHIVSGCSRLANGEYLHRHNLVARIIHQQLALKYSLVESEVPYYRYAPDPVLDNGNITLYWDRSIITDRTIVANKPDIVVVDRIERRAMIVDITVPHDENLVKAEKDKQIKYIDLAREVVDMWDVDSAIIVPIVVSANGLIATSLDQHLRRLSLGSWIKGLIQKAVLLDTARIVRRFLSLEP

SEQ ID NO: 10989 - protein, 936 aa, Mamestra brassicae
MHNKNRALVAALDSQLSDYFDDCEDLTDTHSIMYCAAVAACRVAHVKMTNDRVTRPKPAEPAWQCRTERRIGGARALIGKLICFREGNTRPRVMRFVRRAFSGTDISPRDYMSRVTERIDFLKQKVYAWANRIRRYRRRVERYTQNRTFRSNERWVYRVWEQPDQGVTDTHLPDDDAMCSFWRNIWSVPVSHTEGDWIREVERACDPLPEMGSITISPQDVARVVRPLPNWKSPGPDARLASQYQTTTGVTHLLHKSGSTAEPKNYRPITCLPTVYKVLTSILRAKINNHINSSNIMSVSQNGCRNGSRGTKELLLIDMAISQQVRRSRKDLSTCWIDYKKAYDSVPHTWLRRVLELYKIDTMLRTFLMSCMGQWRTVLRYPGCRNIQRNSEPVRIERGIFQGDSLSPLWFCLALNPLSTLLENSGLGYRLKRGGQVISHLLYMDDLKLFAPSNLQLMELLKVTETFSSAIRMEFGEDKCAVMHVKRGEIMESVGIQLSDSINLRSLSSTETYKYLGMSEALGINVTDMKQSLKERFFGRLKKVFNSLLSGGNKVRAFNGWVMPVLMYSFGVLKWTQTELDALDRRVRTLLTAYRMHHPRSSVMRLYIPRKFGGRGFLNAKTLHNREICSLREYFLAVDVGIHRDVVAVDKGLTPLSLANENWRKPAVLDTDDRRAVWQSKELHGRYFRALHGPDVDQLASVAWLRFGDLFGETEGFVCAIMDEVIMTNNYRRFIVKDGKVDICRACHRPGESIRHIVSGCSRLANGEYLHRHNLVARIIHQQLALKYSLVESEVPYYRYAPDPVLDNGNITLYWDRSIITDRTIVANKPDIVVVDRIERRAMIVDITVPHDENLVKAEKDKQIKYIDLAREVVDMWDVDSAIIVPIVVSANGLIATSLDQHLMRLSLGSWIKGLIQKAVLLDTARIVRRFLSLEP

SEQ ID NO: 10990 - protein, 1198 aa, Noctua fimbriata
MLTRSAARRARLSPPDPSLSSASPPPESSPVVSAVTPAVAVASSSSDEYFSPPTTPPPVRRRGGRRPPDGLGPRGPPASDRVPAPGGSVQRMRWTQSINANVMRAYYGATEGGNNLTAYRVRMLSLFQVLEPAVNVSAQRLSDQVRVIQRNRMLDDTVLDRLRTEMQSSHVIATPPPQAVVPPQSTIIPNRDNDVSNDIVTNVSTQCNEEMRSALEGAIREYRFMQPDLRPRVPRLPMHNKNRALVAVLDSQLSNYFDNCEDLTDAHSILYCAAVAACRVAHVKFYDDRATRPKPVVPPWQYRIERRIGGARALIGKLICFREGNTRPRVMRFVRRAFSGTDISPRDYMSRITERIDFLKQKVYAWASRIRRYKRRVDRYTQNRTFQRDERWVYRAWERPDQGVADTRIPDDDAMCSFWRSIWSVPVSHTEGEWTREVERACDLVPEMGAITISPQDVVRAVRPLPNWKSPGPDGLHNFWIKWFTRSHARLAILFQSALESGSLPEFLTTGITHLLHKSGSTAEPKNYRPITCLPTVYKVLTSILRAKINKHIDDNSIMSASQNGCRNGSRGTKELLLIDMAISQQVRRSRSDLSTCWIDYKKAYDSVPHTWLMRVLELYKVDATLRTFLMSCMGQWRTVLRYPGCRQIQRNSEPIRIERGIFQGDSLSPLWFCLALNPLSTLLEDSGLGYRLRRGGQVISHLLYMDDLKLFAPNDLQLMELLKVTETFSSAIRMEFGVDKCAVMHVKRGEIVESVGTQLSDSINLRSLSATETYKYLGMSEALGINVADMKQSLKERFFGRLKKVFNSLLSGGNKVRAFNGWVMPVLMYSFGILKWTQTELDALDRRVRTLLTAYRMHHPRSSVMRLYIPRKCGGRGFLNAKTLHNREICSLREYFLETDVGMHRDVVAVDKGLTPLSLAKENWRKPLVLDTNDRMEVWQSKELHGRFFRALHGPDVDLSASVAWLRCGDLFGETEGFVCAIMDEVMMTNNYRRFIVKDGTVDICRACHRPGESIRHIISGCSRLANGEYLHRHNLVARIIHQQLALKYNLVESEVPYYKYVPDPVLENGSITLYWDQSIITDRTIVANKPDIVVVDRSERRTMIVDITVPHDENLVKAEKDKKIKYLDLAREVVDMWDVDSAIIVPIVVSAHGLIAKSLDQYLRRLSLGSWIKGLIQKAVLLDTARIVRRFLSLEP

SEQ ID NO: 10991 - protein, 868 aa, Noctua fimbriata
MRFVRRAFSGTDISPRDYMSRITERIDFLKQKVYAWASRIRRYKRRVDRYTQNRTFQRDERWVYRTWERPDQGVADTRIPDDDAMCSFWRSIWSVPVSHTEGEWTREVERACDLVPEMGAITISPQDVVRAVRPLPNWKSPGPDGLHNFWIKWFTRSHARLAILFQSALESGSLPEFLTTGITHLLHKSGSTAEPKNYRPITCLPTVYKVLTSILRAKINKHIDDNSIMSASQNGCRNGSRGTKELLLIDMAISQQVRRSRRDLSTCWIDYKKAYDSVPHTWLMRVLELYKVDATLRTFLMSCMGQWRTVLRYPGCWQIQRNSEPIRIERGIFQGDSLSPLWFCLALNPLSTLLEDSGLGYQLRRGGQVISHLLYMDDLKLFAPNDLQLMELLKVTETFSSAIRMEFGVDKCAVMHVKRGEIVESVGTQLSDSINLRSLSATETYKYLGMSEALGINVADMKQSLKERFFGRLKKVFNSLLSGGNKVRAFNGWVMQVLMYSFGILKWTQTELDALDRRVRTLLTAYRMHHPRSSVMRLYIPRKCGGRGFLNAKTLHNREICSLREYFLETDVGMHRDVVAMDKGLTPLSLAKENWRKPLVLDTNDRMEVWQSKELHGRFFRALHGPDVDLSASVAWLRSGDLFGETEGFVCAIMDEVMMTNNYRRFIVKDGTVDICRACHRPGESIRHIISGCSRLANGEYLHRHNLVARIIHQQLALKYNLVESEVPYYKYVPDPVLENGSITLYWDQSIITDRTIVANKPDIVVVDRSERRTMIVDITVPHDENLVKAEKDKKIKYLDLAREVVDMWDVDSAIIVPIVVSAHGLIAKSLDQYLRRLSLGSWIKGLIQKAVLLDTARIVRRFLSLEP

SEQ ID NO: 10992 - protein, 1198 aa, Noctua fimbriata
MLTRAAAKRARLSPPDPSLSSASPPPESSPVMSAVTPAVAVASSSSDEYFSPPTTPPPVRRRGGRRPPDGLGPRGPPASDRVPAPGGSVQRMRWTQSINENVMRSYYGATEGGNNLTAYRVRMLSLFQVLEPAVNVSAQRLSDQVRVIQRNRMLDDTVLDRLRTEMQSSHVIATPPPQAVVPPQSTIIPNRDNDVSNDIVTNVSTQCNEEMRSALEGAIREYRFMQPDLRPRIPRLPMHNKNRALVAVLDSQLSNYFDNCEDLTDAHSILYCAAVAACRVAHVKFSNDRATRPKPAVPPWQYRIERRIGGARALIGKLICFREGNTRPRVMRFVRRAFSGTDISPRDYMSRITERIDFLKQKVYAWANRIRRYKRRVDRYTQNRTFQRDERWVYRAWERPDQGVADTRLPDDDAMCSFWRSIWSVPVSHTEGEWTQGVERACDLVPEMGAITISPQDVVRAVRPLPNWKSPGPDGLHNFWIKWFTRSHARLAILFQSALESGSLPEFLTTGITHLLHKSGSTAEPKNYRPITCLPTVYKVLTSILRAKINKHIDDNSIMSASQNGCRNGSRGTKELLLIDMAISQQVRRSRRDLSTCWIDYKKAYDSVPHTWLMRVLELYKVDATLRTFLMSCMGQWRTVLRYPGCRQIQRNSEPIRIERGIFQGDSLSPLWFCLALNPLSTLLEDSGLGYRLRRGGQVISHLLYMDDLKLFAPNDLQLMELLKVTETFSSAIRMEFGVDKCAVMHVKRGEIVESVGTQLSDSINLRSLSATETYKYLGMSEALGVNVADMKQSLKERFFGRLKKVFNSLLSGGNKVRAFNGWVMPVLMYSFGILKWTQTELDALDRRVRTLLTAYRMHHPRSSIMRLYIPRKCGGRGFLNAKTLHNREICSLREYFLETDVGMHRDVVAVDKGLTPLSLAKENWRKPLVLDTNDRMEVWQSKELHGRFFRALHGPDVDLSASVAWLRSGDLFGETEGFVCAIMDEVMMTNNYRRFIVKDGTVDICRACHRPGESIRHIISGCSRLANGEYLHRHNLVARIIHQQLALKYNLVESEVPYYKYVPDPVLENGSITLYWDQSIITDRTIVANKPDIVVVDRSERRTMIVDITVPHDENLVKAEKDKKIKYLDLAREVVDMWDVDSAIIVPIVVSAHGLIAKSLDQYLRRLSLGSWIKGLIQKAVLLDTARIVRRFLSLEP

SEQ ID NO: 10993 - protein, 1198 aa, Noctua fimbriata
MLTRAAAKRARLSPPDPSLSSASPPPESSPVMSAVTPAVAVASSSSDEYFSPPTTPPPVRRRGGRRPPDGLGPRGPPASDRVPAPGGSVQRMRWTQSINENVMRSYYGATEGGNNLTAYRVRMLSLFQVLEPAVNVSAQRLSDQVRVIQRNRMLDDTVLDRLRTEMQSSHVIATPPPQAVVPPQSTIIPNRDNDVSNDIVINVSTQCNEEMRSALEGAIREYRFMQPDLRPRIPRLPMHNKNRALVAVLDSQLSNYFDNCEDLTDAHSILYCAAVAACRVAHVKFSNDRATRPKPAVPPWQYRIERRIGGARALIGKLICFREGNTRPRVMRFVRRAFSGTDISPRDYMSRITERIDFLKQKVYAWANRIRRYKRRVDRYTQNRTFQRDERWVYRAWERPDQGVADTRLPDDDAMCSFWRSIWSVPVSHTEGEWTQGVERACDLVPEMGAITISPQDVVRAVRPLPNWKSPGPDGLHNFWIKWFTRSHARLAILFQSALESGSLPEFLTTGITHLLHKSGSTAEPKNYRPITCLPTVYKVLTSILRAKINKHIDDNSIMSASQNGCRNGSRGTKELLLIDMAISQQVRRSRRDLSTCWIDYKKAYDSVPHTWLMRVLELYKVDATLRTFLMSCMGQWRTVLRYPGCRQIQRNSEPIRIERGIFQGDSLSPLWFCLALNPLSTLLEDSGLGYRLRRGGQVISHLLYMDDLKLFAPNDLQLMELLKVTETFSSAIRMEFGVDKCAVMHVKRGEIVESVGTQLSDSINLRSLSATETYKYLGMSEALGINVADMKQSLKERFFGRLKKVFNSLLSGGNKVRAFNGWVMPVLMYSFGILKWTQTELDALDRRVRTLLTAYRMHHPRSSIMRLYIPRKCGGRGFLNAKTLHNREICSLREYFLETDVGMHRDVVAVDKGLTPLSLAKENWRKPSVLDTNDRMEVWQSKELHGRFFRALHGPDVDLSASVAWLRSGDLFGETEGFVCAIMDEVMMTNNYRRFIVKDGTVDICRACHRPGESIRHIISGCSRLANGEYLHRHNLVARIIHQQLALKYNLVESEVPYYKYVPDPVLENGSITLYWDQSIITDRTIVANKPDIVVVDRSERRTMIVDITVPHDENLVKAEKDKKIKYLDLAREVVDMWDVDSAIIVPIVVSAHGLIAKSLDQYLRRLSLGSWIKGLIQKAVLLDTARIVRRFLSLEP

SEQ ID NO: 10994 - protein, 868 aa, Noctua fimbriata
MRFVRRAFSGTDISPRDYMSRITERIDFLKQKVYAWASRIRRYKRRVDRYTQNRTFQRDERWVYRTWERPDQGVADTRIPDDDAMCSFWRSIWSVPVSHTEGEWTREVERACDLVPEMGAIPISPQDVVRAVRPLPNWKSPGPDGLHNFWIKWFTRSHARLAILFQSALESGSLPEFLTTGITHLLHKSGSTAEPKNYRPITCLPTVYKVLTSILRAKINKHIDDNSIMSPSQNGCRNGSRGTKELLLIDMAISQQVRRSRRDLSTCWIDYKKAYDSVPHTWLMRVLELYKVDATLRTFLMSCMGQWRTVLRYPGCRQIQRNSEPIRIERGIFQGDSLSPLWFCLALNPLSTLLEDSGLGYQLRRGGQVISHLLYMDDLKLFAPNDLQLMELLKVTETFSSAIRMEFGVDKCAVMHVKRGEIVESVGTQLSDSINLRSLSATETYKYLGMSEALGINVADMKQSLKERFFGRLKKVFNSLLSGGNKVRAFNGWVMPVLMYSFGILKWTQTELDALDRRVRTLLTAYRMHHPRSSVMRLYIPRKCGGRGFLNAKTLHNREIYSLREYFLETDVGMHRDVVAMDKGLTPLSLAKENWRKPLVLDTNDRMEVWQSKELHGRFFRALHGPDVDLSASVAWLRSGNLFGETEGFVCAIMDEVMMTNNYRRFIVKDGTVDICRACHRPGESIRHIISGCSRLANGEYLHRHNLVARIIHQQLALKYNLVESEVPYYKYVPDPVLENGSITLYWDQSIITDRTIVANKPDIVVVDRSERRTMIVDITVPHDENLVKAEKDKKIKYLDLAREVVDMWDVDSAIIVPIVVSAHGLIAKSLDQYLRRLSLGSWIKGLIQKAVLLDMARIVRRFLSLEP

SEQ ID NO: 10995 - protein, 1198 aa, Noctua fimbriata
MLTRSAAARRARLLSPDPSLSSASPPPESSPIVSAVTPAVAVASSSSDEYFSPPTTPPPVRRRGGRRPPDGLGPRGPPASDRVPAPGGSVQRMRWTQSINENVMRSYYGATEGGNNLTAYRVRMLSLFQVLEPAVNVSAQRLSDQVRVIQRNRMLDDTVLDRLRTEMQSSHVITPSAQAVVLPQSSTITNRDNDVSNDMVTNVSTQCNEEMRSALEGAIREYRFMQSDLRPRIPRLPMHNKNRALVAVLDSQLSNYFDNCEDLTDAHSILYCAAVAACRVAHVKFFDDRATRPKPVVPPWQYRIERRIGGARALIGKLICFREGNTRPRVMRFVRRAFSGTDISPRDYMSRITERIDFLKQKVYAWASRIRRYKRRVDRYTQNRTFQRDERWVYRTWERPDQGVADTRIPDDDAMCSFWRSIWSVPVSHTEGEWTRRVERACDLVPEMGAITISPQDVVRAVRPLPNWKSPGPDGLHNFWIKWFTRSHARLAILFQSALESGSLPEFLTTGITHLLHKSGSTAEPKNYRPITCLPTVYKVLTSILRTKINKHIDDNSIMSASQNGCRNGSRGTKELLLIDMAISQQVRRSRRDLSTCWIDYKKAYDSVPHTWLMRVLELYKVDATLRTFLMSCMGQWRTVLRYPGCRQIQRNSEPIRIERGIFQGDSLSPLWFCLALNPLSTLLEDSGLGYQLRRGGQVISHLLYMDDLKLFAPNDLQLMELLKVTETFSSAIRMEFGVDKCAVMHVKRGEIVESVGTQLSDSINLRSLSATETYKYLGMSEALGINVADMKQSLKERFFGRLKKVFNSLLSGGNKVRAFNGWVMPVLMYSFGILKWTQTELDALDRRVRTLLTAYRMHHPRSSVMRLYIPRKCGGRGFLNAKTLHNREICSLREYFLETDVGMHRDVVAMDKGLTPLSLAKENWRKPLVLDTNDRMEVWQSKELHGRFFRALHGPDVDLSASVAWLRSGNLFGETEGFVCAIMDEVMMTNNYRRFIVKDGTVDICRACHRPGESIRHIISGCSRLANGEYLHRHNLVARIIHQQLALKYNFVESEVPYYKYVPDPVLENGSITLYWDQSIITDRTIVANKPDIVVVDRSERRTMIVDITVPHDENLVKAEKDKKIKYLDLAREVVDMWDVDSAIIVPIVVSAHGLIAKSLDQYLRRLSLGSWIKGLIQKAVLLDTARIVRRFLSLEP

SEQ ID NO: 10996 - protein, 1207 aa, Atethmia centrago
MLTRSRARRLRQDAHPTSSVSSLSSASQLPEPAPDVSPVIPAAAVASSSSDEYFSPPTTPPPVRPRGRGRPPASLGLRGPPASDRVPAPGGSVQRMRWTEALNENVMRAYFGATEGGSNLTAYRGRMLSLFQVLEPAVNVSAQRLSDQVRVIQRKHMLDDVVLDRLRIESRNSHVSPASPLVAVQMQNLPGGSPRPDHADEEDDDEAISVSSQCNVRLRSALDDAFREYRSTPPGLRPRLPRLPMHKKNKALVCALDSQLSNYFDSSKDLTDTHSILYCAAVAACRVAQVKFPNSDRAPRPKPAVPAWQSRIERRIGETRALIGKLICFREGNTCPRVMRFVKRAFAGTDILSSRDYLTRVTERIDFLKQKICAWANRIRRYRRRMERYTQNRTFQNDERWVYRTWERPDQGVADTRLPDDDAICSFWQNIWSVPVNHTEGDWTKRIERACDLIPKMGALTILPQDVAHAVRPLPNWKSPGPDGLHNFWIKWFQRSHARLASQFQSALESGSLPLFLTTGITHLLHKSGSTAEPKNYRPITCLPTVYKVLTSILRVKINKHIETNLIMSASQNGCKNGSRGTKELLLIDIAISQQVRRSRKDLSTCWIDYKKAYDSVPHTWLMRVLELYKVDATLRTFLMSCMGQWRTVLCYPGCRYIQRNSEPIRIKRGIFQGDSLSPLWFCLALNPLSTLLENSGLGYRLRRGGQVISHLLYMDDLKLFAPNNLQLMELLKVTKTFSSAIRMEFGVDKCAVMHVKRGGIVESVGTQLSDSIHLRSLSSTETYKYLGMSEALGINAADIKQSLRERFFGRLNKVLNSLLSGGNKVRAFNGWVMPVLMYSFGILKWTQTELDALDRRVRTLLTANRMHHPRSSVMRLYIPRKCGGRGFLNAKTLHNREICSLRQYFLETDVVMHRDVVSVDKGLTPLSLADENWRKPIILDTNDRREVWQSKELHGRFYRVLHGLDVDLLASVSWLRFGDLFGETEGFVFAIMDEVIMTNNYRKYIVKDGTVDICRACHRPGESIRHIISGCSRLANGDYLHRHNLVAKIIHQQLALKYSLVESEVPYYRYAPDPVLENGNITLYWDRSIITDRTIVANKPDIVVIDRLTRRTMIIDIAVPHDENLVKAEKDKQIKYLDLAHEVVDMWDVDTAIIVPIVVTANGIIPKSLDQHLKRLSLGSWIKGLIQRAVLLDTARIVRRFLSQEP

SEQ ID NO: 10997 - protein, 1198 aa, Atethmia centrago
MLTRSAAVRARLPPPDSSLSSASPPPVPSPTVCAVTTPTAAVASSSSDEYFSPPTTPPPVRRRGGRRPPDGLGSRGPPASDRVPAPGGSVKRMRWTQFVNENVMRSYYGATEGGNNLTAYRVRMLSLFQVLEPAVNVSAQRLSDQVRVIQRNHMLDDTVLDRLRSEMQRSHVIVPPSQTVVHSPQLSTNQADEGSDDRATNVSTQCNVELRSALEDAIREYRLMSPELRPRLPRLPMHKKNRALVAALDSQLSNYFDDCEDLTDTHSILYCAAVAVCRVAHVKFAKDSRTTRPKPTVPAWQCRIESRIGGARALIGKLICFREGNTRPRVMRFVRRAFSGTDIGPQDYMTRVTERIDFLKQKVYAWANRIRRYKRRVERYTQNRTFQSDERWVYRGWERPDQDVTDTRLPDDDVMCSFWRSIWSVPVSHTEGDWARKVERACDPIPEMGAITICPQDVARAVRPLPNWKSPGPDGLHNFWLKWFLRSHARLAAQYQTALESGSLPQFLTTGVTHLLHKSGSTAEPKNYRPITCLPTVYKLLTSILRAKINKHIDTNSIMSASQNGCRNGSRGTKELLLIDMTISQQVRRSRKDLSTCWIDYKKAYDSVPHTWLMRVLELYKVDATLRTFLISCMGQWRTVLRYPGCRNIQRNSEPIRIERGIFQGDSLSPLWFCLALNPLSTLLEDSGLGYRMRRGGQVISHLLYMDDLKLFASNNLQLMELLKITESFSSAIRMEFGVDKCAVMHIKRGKIVESVGTQLSDSINLRTLSASETYKYLGMSEALGINVTDMKQSLKERFFGRLKKVFNSLLSGGNKVRAFNGWVMPVLMYSFGILKWTQTELDALDRRVRTLLTVYRMHHPRSSVMRLYIPRKCGGRGFLNAKILHNREVCSLREYFLEADVGMHRDVVAVDKGLTPLSLAKENWRKLVVLDTNDRREVWQSKELHGRFFRALHEPDVDFQASVAWLRFGDLFGETEGFVCAIMDEVIMTKNYRRFIVKDGTVDVCRACHRPGESIRHIISGCSRLANEEYLHRHNLVARIIHQQLALKYSLVESEVPYYRYVPDPVLDNGNITLYWDRSIITDRTIVANKPDIVVVDRTERRAMIVDITVPHDGNLVKAEKDKQIKYLDLAREVVDMWDVDSAIIVPIVVSANGLIAKSLDQHLKRLTLHGWIKGLIQKAVLLDTARIVRRFLSLEP

SEQ ID NO: 10998 - protein, 1207 aa, Mesoligia furuncula
MLTRSALRKARLPLPDSSLSSASPPPVPSLTVSAVTTPAAAVASSSSDEYFSPPTTPPPARRRGGRRPPDGLGPRGPPASDRVPAPGGSVQRMRWTQSINENVMRSYYGATEGGNNLTAYRVRMLSLFQVLEPTVNVSAQRLSDQVRVIQRNHMLDDTVLDRLRNEMQSSHVIAPQSQTAVVLPQSNTSHADEGSNDRATNVSTQCNEELRSTLEDAIQEYRFMSPELRPRLPRLPMHNKNRALVAVLDSQLSNYFDGCEDLTDTHSILYCAAVAACRVAHVKFANDARATRPKPAVPAWQCRIERRIGEARALIGKLTCFREGNTRPRVMRFVRRAFLGTDISPQDYMSCVTERIDFLKQKVYAWANRIRRYKRRVERYTQNRTFQSDQRWVYRDWERPDQSVTDACLPDDDAMCSFWRSIWSVPVSHTESDWTREVERACDPIPEMGAITICPQDVAITICPQDVARAVRPLPNWKSPGPDGLHNFWIKWFTRSHARLTSQFQTALESGSLPQFLTTGITHLLHKSGSTAEPKNYRPITCLPTVYKVLTSILRVKIDKHINTNSIMSASQNGCRNGSRGTKELLLIDTTISQQVRRFRKDLSTCWIDYKKAYDSVPHTWLMRVLGLYKVDTTLRTFLMSCMGQWRTVLRYPGCRNIQRNSEPIRIERGIFQGDSLSPLWFCLALNPLSTLLEDSGLGYRLRRGGQVISHLLYMDDLKLFAPNNLQLMELLKITETFSSAIRMEFGVDKCAVMHVKRGEIVESAGTQLSDSTNLRALSASETYKYLGMSEALGINVTDMKQSLKERFFGRLKKVFNSLLSGGNKVRAFNGWVMPVLMYSFGILKWTQTELDALDRKVRTLLTANRMHHPRSSVMRLYIPRKCGGRGFLNAKTLHNREICSLREYFLETDVGMHRDVVAVDKGLTPLSLGKENWRKPVVLDTNDRMEVWQSKELHGRFFRALHGPDVDLLASVAWLRFGDLFGETEGFVCAIMDEVMMTNNYRRFIVKDGTVDICWACHRPGESIRHIISGCSRLANGEYLHRHNLVARIIHQQLALKYSLVKSEVPYYRYVPDPVLENGNITLYWDGSIITDRTIIANKPDIVVVDRSERRAMIVDITVPHDENLVKAEKDKQIKYLDLAHEVVDMWDVDSAIIVPIVVTANGLIAKSLDQHLKRLSLGSWIKGLIQKAVLLDTARIVRRFLSLEP

SEQ ID NO: 10999 - protein, 1206 aa, Mesoligia furuncula
MLTRSRARHLLKNTHPTSSGSSLSSASQLPDPAPDVSSVRPAAAVASSSSDEYFSPPTTPPPVCRRGRGRPPASLGLRGPPASDRVPAPGGSVQRMRWTQTVNENVMRAYFGATEGGSNLTAYRGRMLSLFQVLEPAVNVSAQRLSDQVRVIQRNHMLDNVVLDRLRLESRNSHVTPASSLIAVQLQNVPSVSPRPDHVYVEDDDEAITVSSQCNARLRSALEDAFREYRSIPPGLRPRLPRLPMHKKNKALVCALDLQLSNCFNNSKDLTDTHSILYCAAVAACRVAHVKFPNSDRAPRPKPAVPAWQCRIECRIGEARALIGKLICFREGNTRPRVMRFVRRAFSGTDISSRDYLSRVTERIDFLKQKIYAWANRIRRYRRRVERYTQNRTFQNDERWVYRAWERPDQDVTDTPLPDDDAMCSFWRNIWSVPVSHTEGDWTAKIERACDLIPEMGVLTISPQDVARAVRPLPNWKSPGPDGLHNFWIKWFQGSHARLASQFQSALESGSLPQFLTTGITHLLHKSGSTADPKNYRPITCLPTVYKVLTSILRAKINKHIDTNSIMSVSQNGCRNGSRGTKELLLIDMTISQQVRRFRKDLSTCWIDYKKAYDSVPHTWLMRVLELYKVDTTLRTFLMSCMGQWRTVLRYPGCRNIQRNSEPIRIERGIFQGDSLSPLWFCLALNPLSTLLEDSGLGYRLRRGGQVISHLLYMDDLKLFAPNNLRLMELLKITETFSSAIRMEFGVDKCAVMHVKRGEIVESVGTQLSDSTNLRALSASETYKYLGMSEALGINVTDMKQSLKERFFGRLKKVFNSLLSGGNKVRAFNSWVMPVLMYSFGILKWTQTELDALDRKVRTLLTANRMHHPRSSVMRLYIPRKCGGRGFLNAKTLHNREICSLREYFLETDVGMHRDVVAVDKGLTPLSLGKENWRKPVVLDTNDRMEVWQSKELHGRFFRALHGPDVDLLASVAWLRFGDLFGETEGFVYAIMDEVMMTNNYRRFIVKDGTVDICRACHRPGESIRHIISGCSRLANGEYLHRHNLVARIIHQQLALKYSLVESEVPYYRYVPDPVLENGNITLYWDRSIITDRTIVANKPDIVVVDRSERRAMIVDITVPHDENLVKAEKDKQVKYLDLAREVVDMWDVNSAIIVPIVVTANGLIAKSLDQHLKRLSLGSWIKGLIQKAVLLDTARIVRRFLSLEP

SEQ ID NO: 11000 - protein, 1095 aa, Mesoligia furuncula
MRSYYGATEGRNNLTAYRVRMLSLFQVLEPAVNVSAQRLSDQVRVIQRNHMLDDTVLDRLRNEMQSSHVIAPQPQTAVLLPQCNTNHADEGSNDRATNVSTQCNEEFRSALEDAIREYRFMSPEHRPRLPRLPMHNKNRALVAALDSQLSNYFDDCEDLTDTHSILYCAAVAVCRVAHVKFANDSRATRPKPAIPAWQCRIERRIGGARALIGKLICFREGNTRPRVMRFVRRAFLGTDISPQDYMSCVTERIDFLKQKVYAWANRIRRYKRRVERYTQNRTFQSDERWVYRSWERPDQSVADTCLPDDEAMCSFWRNIWSVPVSHTEGDWAREVERACDPIPEMGAITICPQDVARAVRPLPNWKSPGPDGLHKFWIKWFLRSHARLASQFQTALESGSLPQFLTTGITHLLHKSGSTTEPKNYRPITCLPTVYKVLTSILRAKIDKHINTNSIMSVSQNGCKNGSRGTKELLLIDMAISQQVRRSRKDLSTCWIDYKKAYDSVPHTWLMRVLELYKIDATLRTFLMSCMGQWRTVLRYPGCRNIQRNSEPIRIERGIFQGDSLSPLWFCLALNPLSTLLEDSGLGYRLRRGGQVISHLLYMDDLKLFAPNNLQLMELLKVTQTFSSAIRMEFGVDKCAVMHVKRGEIVESVGTQLSDSTNLRALSASETYKYLGMSEALGINVTDMKQSLKERFFGRLKKVLNSLLSGGNKVRAFNGWVMPVLMYSFGILKWTQTELDALDRRVRTLLTANRMHHPRSSVMRLYIPRKCGGRGFLNAKTLHNREICSLREYFLETDVGMHRDVVAVDKGLTPLSLAKENWRKPVVLDTNDRMEVWQSKELHGRFFRALHGPDVDLLASVAWLRFGDLFGETEGFVCAIMDEVMMTNNYRRFIVKDGTVDICRACHRPGESIRHIISGCSRLANGEYLHRHNLVARIIHQQLALKYSLVESEVPYYRYVPDPVLENGNISLYWDRSIITDRTIVSNKPDIVVVDRSERRAMIVDITVPHDENLVKAEKDKQIKYLDLAREVVDMWDVDSAIIVPIVVTANGLIAKSLDQHLRRLSLGSWIKGLIQKAVLLDTARIVRRFLSLEP

SEQ ID NO: 11001 - protein, 1198 aa, Mesoligia furuncula
MLTRLAARRARLLPPDSSLSSASPPPVPSPTVSAVMTPAAAVASSSSDEYFSPPTTPPPARRRRGRRPPDGLGLRGPPVSDRVPAPGGSVQRMRWTQSINENVMRSYYGATEGGNILTAYRVRMLSLFQVLEPAVNVSAQRLSDQVRVIQRNHMLDDTVLDRLRSEMQSSRVIAPQSRTAVILPQPNISHADEGSNDTAINVSTQCNEELRSALEDAIQEYRFMSPELRPRLPRLPMHNKNRALVAALDSQLSKYFDTCEDLIDTHSILYCAAVAACRVAHVKFTNDSRATRPKQAVPAWQCRIERRIGGARTLIGKLICFREGNTRPRVMRFVRRAFSGTDISPQDYMSCVTERIDFLKQKVYAWANRIRRYRRRVERYTQNRTFQSDERWVYRGWERPDQGVAETCLPDDDAMFSFWRNIWSVPVSHTEGDWAREVERACDPIPEMGAITICPQDVARAVRPLPNWKSPGPDGLHNFWIKWFPRSHALLASQFQTALKSGSLPQFLTTGITHLLHKSGSTAEPKNYRPITCLPTVYKVLTSILRTKINKHIDTNSIMSASQNGCRNGSRGTKELLLIDMAISQQVRRFRKDLSTCWIDYKKAYDSVPHTWLMRVLELYKIDTTLRTFLMSCMGQWRTVLRYPGCRNIQRNSEPIRIERGIFQGDSLSPLWFCLALNPLSTLLEDSGLGYRLRRGGQVISHLLYMDDLKLFAPNNLQLMELLKITETFSSAIRMGFGVDKCAVMHVKRGEIVESVGTQLSDSTNLRALSASETYKYLGMSEALGINVTDMKQSMKERFFGRLKKVLNSLLSGGNKVRAFNGWVMPVLMYSFGILKWTQTELDALDRRVRTLLTANRMHHPRSSVMRLYIPRKCGGRGFLNAKTLHNREICSLREYFLETDVGMHRDVVIVDKGLTPLSLAKENWRKPVVLDTNDRMEVWQSKELHGRFLRALRGPDVDLQASVAWLRFGNLFGETEGFVCAIMDEVMMTNNYRRFIVKDGTVDICRACHRPGESIRHIISGCSRLANGEYLHRHNLVARIIHQQLALKYNLVESEVPYYRYVPDPVLENGNITLYWDRSIITDRTIVANKPDIVVVDRSERRAMIVDITVPHDENLVKAEKDKQIKYLDLAREVVDMWDVDTAIIVPIVVTANGLIAKSLDQHLRRLSLGSWIKGLIQRAVLLDTARIVRRFLSLEP

SEQ ID NO: 11002 - protein, 1198 aa, Mesoligia furuncula
MLTRSALRKARLPPPDSSLSSASPPPVPSLTVSAVTTPAVAVASSSSDEYFSPPTTPPPARRRGGRRPPDGLGPRGPPVSDRVPAPGGSVQRMRWTRSINENVMRSYYGATEGGNNLTAYRVRMLSLFQVLEPAVNVSAQRLSDQVRVIQRNHMLDDTVLDRLRNEMQSSHVIAPQPQTAVLLPQCNTNHADEGSNDRATNVSTQCNEELRSALEDAIREYRFMSPEHRPRLPRLPMHNKNRALVAALDSQLSNYFDDCEDLTNTHSILYCAAVAVCRVAHVKFANDSRATRPKPAIPAWQCRIERRIGGARALIGKLICFREGNTRPRVMRFVRRAFLGTDISPQDYMSCVTERIDFLKQKVYAWANRIRRYKRRVERYTQNRTFQSDERWVYRSWERPDQSVADTCLPDDEAMCSFWRSIWSVPVSHTEGDWAREVERACDPIPEMGAITICPQDIARAVRPLPNWKSPGPDGLHNFWIKWFLRSHARLASQFQTALESGSLPQFLTTGITHLLHKSGSTTEPKNYRPITCLPTVYKVLTSILRAKIDKHINTNSIMSVSQNGCKNGSRGTKELLLIDMAISQQVRRSRKDLSTCWIDYKKAYDSVPHTWLMRVLELYKIDATLRTFLMSCMGQWRTVLRYPGCRNIQRNSEPIRIERGIFQGDSLSPLWFCLALNPLSTLLEDSGLGYRLRRGGQVISRLLYMDDLKLFAPNNLQLMELLKVTQTFSSAIRMEFGVDKCAVMHVKRGEIVESVGTQLSDSTNLRALSASETYKYLGMSEALGINVTDMKQSLKERFFGRLKKVLNSLLSGGNKVRAFNGWVMPVLMYSFGILKWTQTELDALDRRVRTLLTANRMHHPRSSVMRLYIPRKCGGRGFLNAKTLHNREICSLREYFLETDVGMHRDVVAVDKGLTPLSLAKENWRKPVVLDTNDRMEVWQSKELHGRFFRALHGPDVDLLASVAWLRFGDLFGETEGFVCAVMDEVMMTNNYRRFIVKDGTVDICRACHRPGESIRHIISGCSRLANGEYLHRHNLVARIIHQQLVLKYSLVESEVPYYRYVPDPVLENGNISLYWDRSIITDRTIVANKPDIVVVDRSERRAMIVDITVPHDENLVKAEKDKQIKYLDLAREVVDMWDVESAIIVPIVVTANGLIAKSLDQHLRRLSLGSWIKGLIQKAVLLDTARIVRRFLSLEP

SEQ ID NO: 11003 - protein, 1198 aa, Mesoligia furuncula
MLTRLAARRARLLPPDSSLSSASPPPVPSPTVSAVMTPAAAVASSSSDEYFSPPTTPPPARRRRGRRPPDGLGLRGPPASDRVPAPGGSVQRMRWTQSINENVMRSYYGATEGGNILTAYRVRMLSLFQVLEPAVNVSAQRLSDQVRVIQRNHMLDDTVLDRLRSEMQSSHVIAPQSQTAVILPQPNISHADEGSNDRAINVSTQCNEELRSALEDAIQEYRFMSPELRPRLPRLPMHNKNRALVAALDSQLSKYFDTCEDLIDTHSILYCAAVAACRVAHVKFADDSRATRPKQAVPAWQCRIERRIGGARTLIGKLICFREGNTRPRVMRFVRRAFSGTDISPQDYMSCVTERIDFLKQKVYAWANRIRRYRRRVERYTQNRTFQSDERWVYRGWERPDQGVAETCLPDDDAMCSFWRNIWSVPVSHTEGDWAREVERACDPIPEMGAITICPQDVARAVRPLPNWKSPGPDGLHNFWIKWFPRSHARLASQFQTALKSGSLPQFLTTGITHLLHKSGSTAEPKNYRPITCLPTVYKVLTSILRTKINKHIHTNSIMSASQNGCRNGSRGTKELLLIDMAISQQVRRFRKDLSTCWIDYKKAYDSVPHTWLMRVLELYKVDTTLRTFLMSCMGQWRTVLRYPGCRNIQRNSESIRIERGIFQGDSLSPLWFCLALNPLSTLLEDSGLGYRLRRGGQVISHLLYMDDLKLFAPNNLQLMELLKITETFSSAIRMEFGVDKCAVMHVKRGEIVESVGTQLSDSTNLRALSASETYKYLGMSEALGINVTDMKQSVKERFFGRLKKVLNSLLSGGNKVRAFNGWVMPVLMYSFGILKWTQTELDALDRRVRTLLTANRMHHPRSSVMRLYIPRKCGGRGFLNAKTLHNREICSLREYFLETDVGMHRDVVIVDKGLTPLSLAKENWRKPVVLDTNDRMEVWQSKELHGRFLRALRGPDVDLQASVAWLRFGNLFGETEGFVCAIMDEVMMTNNYRRFIVKDGTVDICRACHRPGESIRHIISGCSRLANGEYLHRHNLVARIIHQQLALKYNLVESEVPYYRYVPDPVLENGNITLYWDRSIITDRTIVANKPDIVVVDRSERRAMIVDITVPHDENLVKAEKDKQIKYLDLAREVVDMWDVDTAIIVPIVVTANGLIAKSLDQHLRRLSLGSWIKGLIQRAVLLDTARIVRRFLSLEP

SEQ ID NO: 11004 - protein, 1198 aa, Mesoligia furuncula
MLTRSALRKARLPPPDSSLSSASPPPVPSLTVSAVTTPAVAVASSSSDEYFSPPTTPPPARRRGGRRPPDGLGPRGPPASDRVPAPGGSVQRMRWTRSINENVMRSYYGATEGGNNLTAYRVRMLSLFQVLEPAVNVSAQRLSDQVRVIQRNHMLDDTVLDRLRNEMQSSHVIAPQPQTAVLLPQCNTNHADEGSNDRATNVSTQCNEELRSALEDAIREYRFMSPEHRPRLPRLPMHNKNRALVAALDSQLSNYFDDCEDLTDTHSILYCAAVAVCRVAHVKFANDSRATRPKPAIPAWQCRIERRIGGARALIGKLICFREGNTRPRVMRFVRRAFLGTDISPQDYMSCVTERIDFLKQKVYAWANRIRRYKRRVERYTQNRTFQSDERWVYRSWERPDQSVADTCLPDDESMCSFWRKIWSVPVSHTEGDWAREVERACDPIPEMGAITICPQDVARAVRPLPNWKSPGPDGLHNFWIKWFLRSHARLASQFQTALESGSLPQFLTTGITHLLHKSGSTTEPKNYRPITCLPTVYKVLTSILRAKIDKHINTNSIMSVSQNGCKNGSRGTKELLLIDMAISQQVRRSRKDLSTCWIDYKKAYDSVPHTWLMRVLELYKIDATLRTFLMTCMGQWRTVLRYPGCRNIQRNSEPIRIERGIFQGDSLSPLWFCLALNPLSTLLEDSGLGYRLRRGGQVISHLLYMDDLKLFAPNNLQLMELLKVTQSFSSAIRMEFGVDKCAVMHVKRGEIVESVGTQLSDSTNLRALSASETYKYLGMSEALGINVTDMKQSLKERFFGRLKKVLNSLLSGGNKVRAFNGWVMPVLMYSFGILKWTQTELDALDRRVRTLLTANRMHHPRSSVMRLYIPRKCGGRGFLNAKTLHNREICSLREYFLETDVGMHRDVVAVDKGLTPLSLAKENWRKPVVLDTNDRMEVWQSKELHGRFFRALHGPDVDLLASVAWLRFGDLFGETEGFVCAIMDEVMMTNNYRRFIVKDGTVDICRACHRPGESIRHIISGCSRLANGEYLHRHNLVARIIHQQLALKYSLVESEVPYYRYVPDPVLENGNISLYWDRSIITDRTIVANKPDIVVVDRSERRAMIVDITVPHDENLVKAEKDKQIKYLDLAREVVDMWDVDSAIIVPIVVTANGLIAKSLDQHLRRLSLGSWIKGLIQKAVLLDTARIVRRFLSLEP

SEQ ID NO: 11005 - protein, 1199 aa, Spilarctia lutea
MLTRARRRAQLSPPDSSLRSALPSPEEAIEVPAGAEASSSSSSDELFSPPTSPIPVRRQGRGRPPTSLGSRGPLTSNRAPAAGGDVRRMKWTHSINENVMRAYFRATELGTNLTAYRVRLVSLFQELEPAANVSAQRLSDQVRAIQRCHLLDDAALERIRSDIRNSLTVPSSSHVLNVVTNSTPQVPQNDDISELVDSEIISVSTQYNDRIRSTLEDAIREYRYVNLNNRPRLSRLPIHKRNLALVSALDSLLPKYFSNSEDLSDTHSILYCAAIAVCRVAGVKFAEYTTTTRQENTLPAWQYRIERRIAEARTLIGKLMSFRSGNTRPRVMRFVKRAFLGTTISPQEYMSCVTERIDFLKQKVYAWANRIRRYRKRVDRYNQNRMFQRNEKWVYRKWENLRPCMSDGQVPDENATNSFWRNMWSVPVTHTEGDWYRDVERSCESLLPMEPISIDEEDVSCAVRSLPNWKAPGPDGLHNFWLKWFRSSHACLASQFQTALDSGSLPQFLTTGITHLLHKSGDAMDPKNFRPITCLPTLYKLLTSILRLKITTHINHNSILSISQNGCRSGTRGTKELLIIDMTISQQVRRNRKSLATCWIDYKKAFDSVPHTWLLKVLELYKIDTTLCTFLKVCRGQWRTALRYPGCRQSAMNDVLIKIERGIFQGDSLSPLWFCLALNPLSTLLEGSGLGYRLQKDDRVISHLFYMDDLKLLAPTKLQLTALLKVTENFSNSIKMEFGVDKCAVMYVKKGEIVESEGIELSDSTKLRSLSATETYKYLGFSQSLGMPESDMKQTLRERFFSRLKKVLKSLLSGGNKVRACNGWVMPVLMYSFGVLRWTQTELDAIDRRVRTLLTAFRMHHPRSLVMRLYIPRRLGGRGLLNIKTLHNREVYNLREYFLQTDVGVHRSVVTVDTGLTPLALAKENWRKPVVLGTNDRREVWKGKVLHGRFYRALNGPDIDFKASTSWLRYSDLFGETEGFVCAIMDEVIMTNNYRKYILKDGTVDICRACHRPGESIRHIISGCSRLANGEYLHRHNQVARIVHQQLALKYNLVISEVPYYRYVPDPVLENGRATLYWDRSIITDRTIVANKPDIVVIDRLERRAMIVDIAVPHDENLVKVEKEKQIKYLDLSHEIVDMWNVDSVIIVPIVVSAHGLIAKSLDQHLKRLTLGGWIKGLIQKAVLLDTARIVRRFLSLEP

SEQ ID NO: 11006 - protein, 1199 aa, Spilarctia lutea
MLTRARRRAQLSPPDSSLRSALPSPEEAIEVPAGAEASSSSSSDEFFSPPTSPIPVRRQGRGRPPTSLGSRGPLTSNRAPAAGGDVRRMKWTHSINENVMRAYFRATELGTNLTAYRVRLVSLFQELEPAVNVSAQRLSDQVRAIQRCHLLDDAALERIRSDIRNSLTVPSSSHVLNVVTNSTPQVPQNDDISELVDSEIISVSTQYNDRIRSTLEDAIREYRYVNLNNRPRLSRLPIHKRNLALVSALDSLLPKYFSNSEDLSDTHSILYCAAIAVCRVAGVKFAEYTTTTRQENTLPAWQYRIERRIAEARTLIGKLMSFRSGNTRPRVMRFVKRAFLGTTISPQEYMSCVAERIDFLKQKVYAWANRIRRYRKRVDRYNQNRMFQRNEKWVYRKWENLSPCMSDGQVPDENATNSFWRNMWSVPVTHTEGDWYRDVERSCESLLPMEPISIDEEDVSCAVRSLPNWKAPGPDGLHNFWLKWFRSSHACLASQFQTALDSGSLPQFLTTGITHLLYKSGDAMDPKNFRPITCLPTLYKLLTSILRLKITTHINHNSILSISQNGCRSGTRGTKELLIIDMTISQQVRRNRKSLATCWIDYKKAFDSVPHTWLLKVLELYKIDTTLCTFLKVCMGQWRTALRYPGCRQSAMNDVLIKIERGIFQGDSLSPLWFCLALNPLSTLLEGSGLGYRLQKDDRVISHLFYMDDLKLLAPTKLQLTALLKVTENFSNSIKMEFGVDKCAVMYVKKGEIVESEGIELSDSTKLRSLSATETYKYLGFSQSLGMPESDMKQTLRERFFSRLKKVLKSLLSGGNKVRACNGWVMPVLMYSFGVLRWTQTELDAIDRRVRTLLTAFRMHHPRSSVMRLYIPRRLGGRGLLNIKTLHNREVYNLREYFLQTDVGVHRSVVTVDTGLTPLALAKENWRKPVVLGTNDRREVWKGKELHGRFYRALHGPDIDFKTSTSWLRYGDLFGETEGFVCAIMDEVIMTNNYRKYILRDGTVDICRACHRPGESIRHIISGCSRLANGEYLHRHNQVARIVHQQLALKYHLVNSEVPYYRYVPDPVLENGRATLYWDRSIITDRTIVANKPDIVVIDRLERRAIIIDIAVPHDENLVKVEKEKQIKYLDLSHEIVDMWNVDSVIIVPIVVSAHGLIAKSLDQHLKRLTLEGWIKGLIQKAVLLDTARIVRRFLSLEP

SEQ ID NO: 11007 - protein, 880 aa, Spilarctia lutea
MSFRSGNTRPRVMRFVKRAFLGTTISPQEYMSCVTERIDFLKQKVYAWANRIRRYRKRVDRYNQNRMFQRNEKWVYRKWENLSPCMSDGQVPDENATNSFWRNMWSVPVTHTEGDWYRDVERSCESLLPMEPISIDEEDVSCAVRSLPNWKAPGPDGLHNFWLKWFRSSHACLASQFQTALDSGSLPQFLTTGITHLLYKSGDAMDPKNFRPITCLPTLYKLLTSILRLKITTHINHNSILSISQNGCRSGTRGTKELLIIDMTISQQVRRNRKSLATCWIDYKKAFDSVPHTWLLKVLELYKIDTTLCTFLKVCMGQWRTALRYPGCRQSAMNDVLIKIERGIFQGDSLSPLWFCLALNPLSTLLEGSGLGYRLQKDDRVISHLFYMDDLKLLAPTKLQLTALLKVTENFSNSIKMEFGVDKCAVMYVKKGEIVESEGIELSDSTKLRSLSATETYKYLGFSQSLGMPESDMKQTLRERFFSRLKKVLKSLLSGGNKVRACNGWVMPVLMYSFGVLRWTQTELDAIDRRVRTLLTAFRMHHPRSSVMRLYIPRRLGGRGLLNIKTLHNREVYNLREYFLQTDVGVHRSVVTVDTGLTPLALAKENWRKPVVLSTNDRRAVWKGKELHGRFYRALHGPDIDFKTSTSWLRYGDLFGETEGFVCAIMDEVIMTNNYRRYILKDGTVDICRACHRPGESIRHIISGCSRLANGEYLHRHNQVARIIHQQLALKYHLVNSEVPYYRYVPDPVLENGRATLYWDRSIITDRTIVANKPDIVVIDRLERRAIIIDIAVPHDENLVKVEKEKQIKYLDLSHEIVDMWNVDSVIIVPIVVSAHGLIAKSLDQHLKRLTLEGWIKGLIQKAVLLDTARIVRRFLSLEP

SEQ ID NO: 11008 - protein, 1109 aa, Spilarctia lutea
MKWTHSINENVMRAYFRATELGTNLTAYRVRLVSLFQELEPAVNVSAQRLSDQVRAIQRCHLLDDAVLERIRSDVRNTLTIPSSSHTVDVVVNTPQLPDNHDVDEQRESEIISVSTQCNDRIRSALEDAIQEYRYVNYNNRPRLPRLPIHKRNLALVGALNSLLPDYFGNSEDLSDTHSILYCAAIAVCRVVGVKFIERITTRTKNTVPAWQYRMERRIAETRTLIGKLISFKSGNTRPRVMRFVKQAFLGTTISPQQYMSSVTERIDFLKQKVCAWANRIRRYKKRGDRFNQNRMFQTNEKWVYRKWEAPNPCDRDGHLPDENATNTFWRNIWSVPVTHTDGDWMRDVKRSCESITNMEPVRINKEDVSCAVRSLPNWKAPGPDGLHNFWLKWFRSSHACLASQFQAALDSGSLPQFLTTGITHLLYKSGGTMDPKNFRPITCLPTLYKLLSSILRIKITTHINHNSILSISQNGCRSGTRGTKELLIIDMTISQQVRRNRRNLATCWIDYKKAYDSVPHTWLLKVLELYKIDKTLCTFLKSCMGQWRTVLRYPGCRQSPMTDVLIKIERGIFQGDSLSPLWFCLALNPLSTLLEGSELGYGLRKDDRVISHLLYMDDLKLLAPTKLQLTALLKITENFSNSIKMEFGVDKCAVMYVKKGLIVESEGVELSDSTKLRSLSVTEGYKYLGFTQSLGIPESDMKQALRERFFGRLKKVLKSLLSGGNKVRACNGWVMPVLMYSFGILRWTQTELDALDRGVRTLLTAFRMHHPRSSVMRLYIPRKLGGRGLLNIKTLHNREIYNLREYFLHTDVGMHRSVVAVDTGLTPLALAKENWRKPVVLSTDDRREVWKGKELHGRFYRALHRPDIDFKTSTSWLRYGDLFGETEGFVCAIMDEVIMTNNYRKYILKDGTVDICRACHRPGESIRHIISGCSRLANGEYLHRHNQVARIVHQQLALKYNLVISEVPYYRYVPDPVLENGRATLYWDRSIITDRTIVANKPDIVVIDRLERRAIIIDIAVPHDDNLVKVEKEKQIKYLDLSHEIVDMWNVDSVIIVPIVVSVHGLIARSLDQHLKRLTLDGWIKGLIQKAVLLDTARIVRRFLSLEP

SEQ ID NO: 11009 - protein, 1199 aa, Xestia c-nigrum
MLTRAAARRARLPPPDPSLSSASPPPEPSPIVSAVTPAVAVASSSSDEYFSPPTTPPPARRRGGRRPPDGLGPRGPPASDRVPAPGGSVQRMRWTKSNNENVMRAYYGATEGGINLTAYRVRMLSLFQVLEPAVNVSAQRLSDQVRVIQRNRMLDDTVLDRLRTEVQSSRVTATPPSQAVVPPQSTVTTPYCDGDVSSDMVTNVSTQCSEDMRSALEGAIREYRFMTPELRPRLPRLPMHNKNKMLMAVLDSQLSNYFDSCEDLTDIHSILYCAAVAACRVAHVKFSDDRATRPKPAVPAWQYRIEQRIGGARALIGKLICFREGNTRPRVMRFVRRAFSGTDISPRDYMFRVTERIDFLKQKVYAWASRIRRYKRRVDRYTQNRTFQRDERWVYRAWERPDQGVADTRLPDDDAMCSFWRSIWSVPVSHAEGEWTRVVERACDPVPEMGAITISPQDVACAVRPLPNWKSPGPDGLHNFWIKWFTRSHARLATLFQSALESGSLPEFLTTGITHLLHKSGSTAEPKNYRPITCLPTVYKVLTSILRAKITKHIDENSVMSASQNGCRNGSRGTKELLLIDMAISQQVRRSRKDLSTCWIDYKKAYDSVPHTWLRRVLELYKVDATLRTFLMSCMGQWRTVLCYPGCRQIQRNSEPIRIERGIFQGDSLSPLWFCLALNPLSTLLEDSGLGYRLRKDGRVISHLLYMDDLKLFAPNDFQLMELLKVTETFSSAIRMEFGVEKCAVMHVKRGGIVESVGTQLSDSINLRSHSATETYKYLGMSEALGISVADMKQSLKERFFGRLKKVFNSLLSGGNKVRAFNGWVMPVLMYSFGILKWTQTELDALDTKVRKLLTAYRMHHPRSSVMRLYIPRKCGGRGFLNAKTLHNREICSLREYFLAADVGMHRDVVAMDKGLTPLSLAKENWRIPVVFTTDDRRKEWQSKELHGRFYRALHGPDVDFQASVSWLRSGDLFGETEGFVCAIMDEVMMTNNYRRFIVKDGTVDICRACHRPGESIRHIISGCSRLANGEYLHRHNLVARIIHQQLALKYNLVESEVPYYRYVPDPVLVNGSITLYWDQSIITDRTVIANRPDIVVMDRSERRAMIVDITVPHDENLVKAEKDKQIKYLDLAREVVDMWEVDSAIIVPIVVSAHGLIAKSLDQHLRRLSLGSWIKGLIQKAVLLDTARIVRRFLSLEP

SEQ ID NO: 11010 - protein, 1199 aa, Xestia c-nigrum
MLTRAAARRARLSPPDPSLSSASPPPEPSPIVSAVTPAVAVASSSSDEYFSPPTTPPPARRRGGRRPPDGLGPRGPPASDRVPAPGGSVQRMRWTQSNNENVMRAYYGATEGGINLTAYRVRMLSLFQVLEPAVNVSAQRLSDQVRVIQRNRMLDDTVLDRLRTEVQSSRVTATPPSQAVVPPQSTVTTPYCDGDVSSDMVTNVSTQCSEDMRSALEGAIREYRFMTPELRPRLPRLPMHNKNKMLMAVLDSQLSNYFDSCEDFTDIHSVLYCAAVAACRVAHVKFSDDRATRPKPAVPAWQYRIEQRIGGARALIGKLICFREGNTRPRVMRFVRRAFSGTDISPRDYMFRVTERIDFLKQKVYAWASRIRRYKRRVDPYTQNRTFQRDERWVYRAWERPDQGVADTRLPDDDAMCSFWRSIWSVPVSHAEGEWTRVVERACDPVPEMGAITISPQDVACAVRPLSNWKSPGPDGLHNFWIKWFTRSHARLATLFQSALESGSLPEFLTTGITHLLHKSGSTAEPKNYRPITCLPTVYKVLTSILRAKITKHIDENSVMSASQNGCRNGSRGTKELLLIDMAISQQVRRSRKDLSTCWIDYKKAYDSVPHTWLRRVLELYKVDATLRTFLVSCMGQWRTVLRYPGCRQIQRNSEPIRIERGIFQGDSLSPLWFCLALNPLSTLLEDSGLGYQLRKDGRVISHLLYMDDLKLFAPNDLQLMELLKVTETFSSAIRMEFGVDKCAVMHVKRGGIVESVGTQLSDSINLRSLSATETYKYLGMSEALGISVADMKQSLKERFFGRLKKVFNSLLSGGNKVRAFNGWVIPVLMYSFGILKWTQTELDALDTKVRKLLTAYRMHHPRSSVMRLYIPRKCGGRGFLNAKTLHNREICSLREYFLAADVGMHRDVVAMDKGLTPLSLAKENWRIPVVFTTYDRRKEWQSKELHGRFYRALHGPDVDFQASVSWLRSGDLFGETEGFVCAIMDEVMMTNNYRRFIVKDGTVDICRACHHPGESIRHIISGCSRLANGEYLHRHNLVARIIHQQLALKYNLVESEVPYYRYVPDPVLNSGSITLYWDQSIITDRTVIANRPDIVVMDRSERRAMIVDITVPHDENLVKAEKDKQIKYLDLAREVVDMWEVDSAIIVPIVVSAHGLIAKSLDQYPRRLSLGSWIKGLIQKAVLLDTARIVRRFLSLEP

SEQ ID NO: 11011 - protein, 1198 aa, Xestia c-nigrum
MLTRAAARRARLPPPDPSLSSASPPPEPSSIVSAVTPAVAVASSSSDEYISPPTTPPPARRRGGRRPPDGLGPRGPPASDRVPAPGGSVQRMRWTSSNNENVMRAYYGATEGGNNLTAYRVRMLSLFQVLEPAVNVSAQRLSDQVRVIQRNRMLDDTVLDRLRTEMQSSHVTAMPPSQAVVSPQSSSIPNRDGDVSSEMVTNVSTQCNEDMRSALEGAIREYRFMAPELRPRLPRLPMHNKNRMLVAVLDSQLSNYFDTCEDLTDVHSILYCAAVAACRVAHVKFSDDRATRPKPAIPAWQYRIEQRIGGARALIGKLICFREGNTRPRVMRFVRRAFSGTDISPRDYISRVTERIDFLKQKVYAWASRIRRYKRRVDRYTQNRTFQRDERWVYRAWERPDQGVADTRLPDDDAMCSFWRSIWSVPVSHAEGEWTRVIERVCDPVLEMGAITISPQDAACAVRPLPNWKSPGPDGLHNFWIKWFTRSHARLATLFQSALESGSLPEFLTTGVTHLLHKSGSTTEPKNYRPITCLPTIYKVLTSILRTKINKHIDDNSIMSASQNGCRNGSRGTKELLLIDMAISQQVRRSRKDLSTCWIDYKKAYDSVPHTWLMRVLELYKVDATLRTFLMSCMGQWRTVLRYPGCRQIQRNSEPIRIERGIFQGDSLSPLWFCLALNPLSTLLEDSGLGYRLRKDGRVISHLLYMDDLKLFAPNDLQLMELLKVTETFSSAIRMEFGVDKCAVMHVKRGEIVESVGTQLSDSINLRSLSATETYKYLGMSEALGNNVADMKQSLKERFFGRLKKVFNSLLSGGNKVRAFNGWVMPVLMYSFGILKCTKTELDALDTKVRKLLTAYRMHHPRSSVMRLYIPRKCGGRGFLNAKTLHNREICSLREYFLEANVGMHRDVVAMDKGLTPLSLAKENWRKPVLLTTDDRRKEWQSKELHGRFYRALHGPDVDFLASVSWLRSGDLFGETEGFVCAIMDEVMMTNNYRRFIVKDGTVDICRACHRPGESIRHIISGCSRLANGEYLHRHNLVARIIHQQLALKYNLVESEVPYYRYVPDPVLDNGSITLYWDQSIITDRTVIANRPDIVVMDRSERRAMIVDITVPHDENLVKAEKDKQIKYLDLAREVVDMWEVDSAIIVPIVVSAHGLIAKSLDQYLRRLSLGSWIKGLIQKAVLLDTARIVRRFLSLEP

SEQ ID NO: 11012 - protein, 962 aa, Griposia aprilina
MHNKNRVLVAALDAQLSNYFDDCVDLTDTHSILYCAAVAACRVAHVKFANDSRATRPKPAVPAWQCRIERRIGEARALIGKLICFREGNTRPRVMRFVRRAFAGTNISPQDYMSCVTERIDFLKQKVYAWANRIRRYKRRVERYTQNRTFQRDERWVYRGWERPDQGVADTCLPDDDAMCSFWRNIWSVPVSHTEGDWTREVERACDPIPEMGAITICPQDVTRAVRPLPNWKSPGPDGLHNFWIKWFGRSHARLAAQYQVALESGSLPQFLTTGVTHLLHKSGSTAEPKNYRPIACLPTVYKVLTSILRDKINKHIDTNYIMSPSQNGCRNGSRGTKELLLIDMAISQQVRRSRKDLSTCWIDYKKAYDSVPHTWLMRVLELYKVEATLRTFLMSCMGQWRTVLHYPACRNTQRNSEPIRIERGIFQGDSLSPLWFCLALNPLSTLLEDSGLGYRLRRGGQVISHLLYMDDLKLFAPNNSQLMDLLKVTETFSSAIRMEFGVDKCAVMHVKRGEIVESVGTQLSDPINLRALSASETYKYLGMSEALGINGTDMKQSLKDRFFGRLKKVFNSLLSGGNKVRAFNGWVMPVLMYSFGILKWTQTELDALDRKVRTLLTANRMHHPRSSVMRLYIPRKCGGRGFLNAKTLHNREICSLREYFLEADVGMHRDVVTVDKGLTPLSLAKENWRKPVVLDTNDRMEVWQSKELHGRFFRALHGPDVDQLASVAWLRFGDLFGETEGFVCAIMDEVMMTNNYRRFIVKDGTVDICRACHRPGESIRHIISGCSRLANEEYLHRHNLVARIIHQQLALKYSLVESEVPYYRYVPDPVLENGHITLYWDRSIITDRTIVANKPDIVMVDRLERRAMIVDITVPHDGNLVKAEKDKQIKYLDLAREVVDMWDVDSAIIVPIVVTANGLIAKSLDQHLRRLSLGSWIKGLIQKAVLLDTARIVRRFLSLEP

SEQ ID NO: 11013 - protein, 1198 aa, Griposia aprilina
MLTRSAARRARPPPPDSSLSSASLPPVSSPTVSAVTTPAPVVASSSSDEYFSPPTTPPPVRRRGGHRPPDGLGPRGPPASDRVPAPGGSVQRMRWTRSINENVMRSYYGATEGGNNLTAYRVRMLSLFQVLEPAVNVSAQRLSDQVRVIQRNHMLDDTVLDRLRNEMQSSHVIAPPSQTVVVLPQSNTSQADEESDDRATNVSTQCNDELRSALEDAIREYRFISPELRPRLPRLPMHNKNRVLVAALDAQLSNYFDDCVDLTDTHSILYCAAVAACRVAHVKFANDSRATRPKPAVPAWQCRIERRIGEARALIGKLICFREGNTRPRVMRFVRRAFAGTNISPQDYMSCVTERIDFLKQKVYAWANRIRRYKRRVERYTQNRTFQRDERWVYRGWERPDQGVADTCLPDDDAMCSFWRNIWSVPVSHTEGDWTREVERACDPIPEMGAITICPQDVTRAVRPLPNWKSPGPDGLHNFWIKWFGRSHARLAAQYQVALESGSLPLFLTTGVTHLLHKSGSTAEPKYYRPIACLPTVYKVLTSILRDKINKHIDTNYIMSPSQNGCRNGSRGTKELLLIDMAISQQVRRSRKDLSTCWIDYKKAYDSVPHTWLMRVLELYKVEATLRTFLMSCMGQWRTVLHYPACRNTQRNSEPIRIERGIFQGDSLSTLWFCLALNPLSTLLEDSGLGYRLRRGGQVISHLLYMDDLKLFAPNNSQLMDLLKVTETFSSAIRMEFGVDKCAVMHVKRGEIMESVGTQLSDSINLRALSASETYKYLGMSEALGINGTDMKQSLKDRFFGRLKKVFNSLLSGGNKVRAFNGWVMPVLMYSFGILKWTQTELDALDRKVRTLLTANRMHHPRSSVMRLYIPRKCGGRGFLNAKTLHNREICSLREYFLEADVGMHRDVVTVDKGLTPLSLAKENWRKPVVLDTNDRMEVWQSKELHGRFFRALHGPDVDQLASVAWLRFGDLFGETEGFVCAIMDEVMMTNNYRRFIVKDGTVDICRACHRPGESIRHIISGCSRLANEEYLHRHNLVARIIHQQLALKYSLVESEVPYYRYVPDPVLENGHITLYWDRSIITERTIVANKPDIVMVDRLERRAMIVDITVPHDGNLVKAEKDKQIKYLDLAREVVDMWDVDSAIIVPIVVTANGLIAKSLDQHLRRLSLGSWIKGLIQKAVLLDTARIVRRFLSLEP

SEQ ID NO: 11014 - protein, 1196 aa, Griposia aprilina
MLTRSRRARPPPPDSSLSSASLPPVSSPTVSAVTTPAAVVASSSSDEYFSPPTTPPPARRRGGHRPPDGLGPRGPPASDRVPAPGGSVQRMRWTRSINENVMRSYYRATEGGSNLTAYRVRMLSLFQVLEPAVNVSAQRLSDQVRVIQRNHMLDDTVLDRLRNEMQSSHVIAPPSQTVIVLPQCNTTQADEESDDRATNVSTQCNEELRSALEDAIREYRFISPELRPRLPRLPMHNKNRVLVAALDAQLSNYFDDCVDLTDTHSILYCAAVAVCRVAHVKFANDSRATRPKPAVPAWQCRIERRIGGARALIGKLICFREGNTRPRVMRFVRRAFAGTNISPQDYMSYVTERIDFLKQKVYAWANRIRRYKRRVERYTQNRTFQRDERWVYRGWERPDQGVADTCLPADDAMCSFWRNIWSVPVSHTEGDWAREVERACDPIPEMGAISICPQDVTRAVRPLPNWKSPGPDGLHNFWIKWFGRSHARLAAQYQVALESGSLPQFLTTGVTHLLHKSGSTAEPKNYRPITCLPTVYKVLTSILRAKINKHIDTNYIMSPSQNGCRNGSRGTKELLLIDMAISQQVRRSRKDLSTCWIDYKKAYDSVPHTWLVKVLELYKVDATLRTFLKSCMGQWRTVLHYPGCRNIQRDNEPIRIERGIFQGDSLSPLWFCLALNPLSTLLEDSGLGYRLRRGGQVISHLLYMDDLKLFAPNNLQLMELLKVTETFSSAIRMEFGVDKCAVMHVKRGEIVESVRTQLSDSINLRALSASETYKYLGMSEALGINGTDMKQSLKERFFGRLKKVFNSLLSGGNKVRAFNGWVMPVLMYSFGILKWTQTELDALDRKVRTLLTANRMHHSRSSVMRLYIPRKCGGRGFLNAKTLHNREICSLREYFLEADVGMHRDVVTVDKGLTPLSLAKENWRKPVVLDTNDRMEVWQSKELHGRFFRALHGPDVDQLASVAWLRFGDLFGETEGFVCAIMDEVILTNNYRRHIMKDGTVDVCRACHRPGESIRHIISGCSRLANEEYLHRHNLVARIIHQQLALKYSLVESEVPYYRYVPDPVLENGHITLYWDRSIITDRTIVANKPDIVVVDRLERRAMIVDITVPHDGNLVKAEKDKQIKYLDLAREVVDMWDVDSAIIVPIVVTANGLIAKSLDQHLRRLSLGSWIKGLIQKAVLLDTARIVRRFLSLEP

SEQ ID NO: 11015 - protein, 1188 aa, Griposia aprilina
MMLTRSAKRRAHPPPPDSSLSSASPPPVSSPTVSAVTTPAAVVASSSSDEYFSPPTTPPPVRRRGGHRPPDGLGPRGPPASDRVPAPGGSVQRMRWTRSINENVMRSYYGATEGGNNLTAYRVRMLSLFQVLEPAVNVSAQRLSDQVRVIQRNYMLDDTVLDRLRNEMQSSHVIAPPSQTVVVLPQSNTSQVDEESDDRATNVSTQCNDELRSALEDAIREYRFISPELRPRLPRLPMHNKNRVLVAALDAQLSNYFDNCVDLTDTHSILYCAAVAACRVAHIKFANDSRPTRPKPAVPAWQCRIERRISGARALIGKLICFREGNTRPRVMRFVRRAFAGTNISPQDYMSCVTERIDFLKQKVYAWANRIRRYKRRVERYTQNRTFQRDERWVYRGWERPDQGVADTCLPDDVAMCSFWRNIWSVPVSHTEGDWGREVERACDPIPEMGAISICPQDVTRAVRPLPNWKSPGPDGLQNFWIKWFGRSHARLAAQYQVAIESGSLPQFLTTGVTHLLHKSGSTAEPKNYRPITCLPTVYKVLTSILRAKINKHIDTNSIMSPSQNGCRNGSRGTKELLLIDMAISQQVRRSRKDLSTCWIDYKKAYDSVPHTWLVRVLELYKVDATLRTFLKSCMGQWRTILHYPGCRNIQRDNEPIRIERGIFQGDSLSPLWFCLALNPLSTLLEDSGLGYRLRRGGQVISHLLYMDDLKLFAPNNLQLIELLKVTETFSSAIRMEFGVDKCAVMHVKRGEIVESVGTQLSYSINLRALSASDTYKYLGMSEALGINGTDMKQSLKERFFGRLKKVFNSLLSGGNKVRAFNGWVMPVLMYSFGILKWTQTELDALDRKVRTLLTANRMHHPRSSVMRLYIPRKCGGRGFLNAKTLHNREICSLREYFLEADVGMHTDVVKVDKGLTPLSLAKENWRKPVVLDTNDRMEVWQSKELHGRFFRALHEPDVDQLASVAWLRFGDLFGETEGFVCAIMDEVILTNNYRRHIMKDGTVDVCRACHRPGESIRHIISGCSRLANEEYLHRHNLVARIIHQQLALKYSLVESEVPYYRYVPDPVLENGHITLYWDRSIITDRTIVANKPDIVVVDRLEHDGNLVKAEKDKQIKYLDLAREVVDMWDVDSAIIVPIVVTANGLIAKSLDQHLRRLSLGSWIKGLIQKAVLLDTACIVRRFLSLEP

SEQ ID NO: 11016 - protein, 1074 aa, Griposia aprilina
MLSLFQVLEPAVNVSAQRLSDQVRVIQRNHMLDDTVLDRLRSEMQSSHVIAPPSQTVVVLPQPITSHDEGSDDRATNVSTQCNEELRSALEGAIREYRFMSPELRPRLPRLPMHNKNRALVAALDSQLSNYFDDCVDLTDTHSILYCAAVAACRVAHVKFANDSRATRPTPAVPAWQCRIERRIGGARALIGKLICFREGNTRPRVMRFVRRAFAGTDVSPQDYISCVTERIDFLKQKVYAWASRIRRYKRRVERYTQNRTFQRDERWVYRDWERPDQGVADTYLPDDDAMCSFWHNIWSVPVSHTEGDWTREVERACEPIPEMGAITICPQDVARAVRPLPNWKSPGPDGLHNFWIKWFLKSHARLAAQFQAALESGSLPQFLTTGVTHLLHKSGSIAEPKNYRPITCLPTVYKVLTSILRAKINKHIDTNSIMSASQNGCRNGSRGTKELLLIDMAISQQVRRSRKDLSTCWIDYKKAYDSVPHTWLMRVLELYKVDATLRTFLKSCMGQWRTVLRYPTCRNTQRNSEPIRIERGIFQGDSLSPLWFCLALNPLSTLLEDSGLGYRLRRGGRVISHLLYMDDLKLFAPNNLQLIELLKVTETFSSAIRMEFGLDKCAVMHVKRGEIVESVGTQLSDSMNLRALSASETYKYLGMSEALGVNNTDMKQSLKERFFGRLKKVFNSLLSGGNKVRAFNGWVMPVLMYSFGILKWTQTELDTLDRRVRTLLTANRMHHPRSSVMRLYIPRKCGGRGFLNAKTLHNREICSLREYFLEADVGMHRDVVAVDKGLTPLSLAKENWRKPVVLDTNDRMEVWQSKELHGRFFRALHGLDVDVQASVAWLRFGDLFGETEGFVCAIMDEVMMTNNYRRFIVKDGTVDICRACHRPGESIRHIISGCSRLANEEYLHRHNLVARIIHQQLALKYSFVESEVPYYRYVPDPVLENGTITLYWDRSIITDRAIIANKPDIVLVDRRERRAMIVDITIPHDGNLVKAEKDKQIKYLDLAREVVDMWDVDSAIIVPIVVTANGLIAKSLDQHLRRLSLSSWIKGLIQKAVLLDTARIVRRFLSLEP

SEQ ID NO: 11017 - protein, 1198 aa, Griposia aprilina
MLTRSAARRARPPPPDSSLSSASLPPVSSPTVSAVTTPAAVVASSSSDEYFSPPTTPPPVRRRGGHRPPDGLGPRGPPASDRVPAPGGSVQRMRWTRSINENVMRSYYGATEGGNNLTAYRVRMLSLFQVLEPAVNVSAQRLSDQVRVIQRNHMLDDTVLDRLRNEIQSSHVIAPPSQTVVVLPQSNTSQADEESDDRATNVSTQCNDELRSALEDAIREYRFISPELRPRLPRLPMHNKNRVLVAALDAQLSNYFDDCVDLTDTHSILYCAAVAACRVAHVKFANDSRATRPKPAVPAWQCRIERRIGEARALIGKLICFREGNTRPRVMRFVRRAFAGTNISPQDYMSCVTERIDFLKQKVYAWANRIRRYKRRVERYTQNRTFQRDERWVYRGWERPDQGVADTCLPDDDAMCSFWRNIWSVPVSHTEGDWTREVERACDPIPEMGAITICPQDVTRAVRPLPNWKSPGPDGLHNFWIKWFGRSHARLAAQYQVALESGSLPQFLTTGVTHLLHKSGSTAEPKNYRPIACLPTVYKVLTSILRDKINKHIDTNYIMSPSQNGCRNGSRGTKELLLIDMAISQQVRRSRKDLSTCWIDYKKAYDSVPHTWLMRVLELYKVEATLRTFLMSCMGQWRTVLHYPACRNTQRNSEPIRIERGIFQGDSLSPLWFCLALNPLSTLLEDSGLGYRLRRGGQVISHLLYMDDLKLFAPNNSQLMDLLKVTETFSSAIRMEFGVDKCAVMHVKRGEIVESVGTQLSDSINLRALSASETYKYLGMSEALGINGTDMKQSLKDRFFGRLKKVFNSLLSGGNKVRAFNGWVMPVLMYSFGILKWTQTELDALDRKVRTLLTANRMHHPRSSVMRLYIPRKCGGRGFLNAKTLHNREICSLREYFLEADVGMHRDVVTVDKGLTPLSLAKENWRKPVVLDTNDRMEVWQSKELHGRFFRALHGPDVDQLASVAWLRFGDLFGETEGFVCAIMDEVMMTNNYRRFIVKDGTVDICRACHRPGESIRHIISGCSRLANEEYLHRHNLVARIIHQQLALKYSLVESEVPYYRYVPDPVLENGHITLYWDRSIITDRTIVANKPDIVMVDRLERRAMIVDITVPHDGNLVKAEKDKQIKYLDLAREVVDMWDVDSAIIVPIVVTANGLIAKSLDQHLRRLSLGSWIKGLIQKAVLLDTARIVRRFLSLEP

SEQ ID NO: 11018 - protein, 1097 aa, Griposia aprilina
MRSYYGATEGGNNLTAYRVRMLSLFQVLEPAVNVSAQRLSDQVRVIQRNHMLDDTVLDRLRSEMQSSHVIAPPSQTIVVLPQPFTSHDEGSDDRATNVSTQCNEELRSALEGAIREYRFMSPELRPRLPRLPMHNKNRALVAALDSQLSNYFDDCVDLTDTHSILYCAAVAACRVAHVKFANDSRATRPKPAVPAWQCRIERRIGGARMLIGKLICFREGNTRPRVMRFVRRAFAGNDVSPQDYMSCVTERIDFLKQKVYAWASRIRRYKRRVERYTQNRTFQRDERWVYRDWERPDQGVADTYLPDDDAMCSFWRNIWSVPVSHTEGDWTREVERACELIPEMGAITICPQDVARAVRPLPNWKSPGPDGLHNFWIKWFLRSHARLAAQFQAALESGSLPQFLTTGVTHLLHKSGSIAEPKNYRPITCLPTVYKVLTSILRAKINKHIDTNSIMSASQNGCTNGSRGTKELLLIDMAISQQVRRSRKDLSTCWIDYKKAYDSVPHTWLMRVLELYKVDATLRTFLKSCMGQWRTVLRYPACGNTQRNSEPIRIERGIFQGDTLSPLWFCLALNPLSTLLEDSGLGYRLRRGGRVISHLFYMDDLKLFAPNNLQLMELLKVTETFSSVIRMEFGLDKCAVMHVKRGEIVESVGTQPSDSMNLRALSASETYKYLGMSEALGVNNTDMKQSLKERFFGRLKKVFNSLLSGGNKVRAFNGWAMPVLMYSFGILKWTQTELDTLDRRVRTLLTANRMHHPRSSVMRLYIPRKCGGRGFLNAKTLHNREICSLREYFLEADVGMHRDVVAVDKGLTALSLAKENWRKPVVLDTNDRMEVWQSKELHGRFFRALHRPDVDVQASVAWLRFGDLFGETEGFVCAIMDEVMMTINYRRFIVKDGTVDICRACHRPGESIRHIVSGCSRLANEEYLHRHNLVARIIHQQLALKYSFVESEVPYYRYVPDPVLENGTITLYWDRSIFTDRTIIANKPDILLVDRRERRAMIVDITIPHDGNLVKAEKDKQIKYLDLARKVVDMWDVDSAIIVPIVVTANGLIAKSLDQHLRRLSLSSWIKGLIQKAVLLDTARIVRRSSLWSPDRR

SEQ ID NO: 11019 - protein, 1074 aa, Griposia aprilina
MLSLFQVLEPAVNVSAQRLSDQVRVIQRNHMLDDTVLDRLRSEMQSSHVIAPPSQTVVVLPQPITSHDEGSDDRATNVSTQCNEELRSALEGAIREYRFMSPELRPRLPRLPMHNKNRALVAALDSQLSNYFDDCVDLTDTHSILYCAAVAACRVAHVKFANDSRATRPKPAVPAWQCRIERRIGGARALIGKLICFREGNTRPRVMRFVRRAFAGTDVSPQDYISCVTERIDFLKQKVYAWASRIRSYKRRVERYTQNRTFQRDERWVYRDWERPDQGVADTYLPDDDAMCSFWHNIWSVPVSHTEGDWTREVERACEPIPEMGAITICPQDVARAVRPLPNWKSPGPDGLHNFWIKWFLKSHARLAAQFQAALESGSLPQFLTTGVTHLLHKSGSIAEPKNYRPITCLPTVYKVLTSILRAKINKHIDTNSIMSASQNGCRNGSRGTKELLLIDMAISQQVRRSRKDLSTCWIDYKKAYDSVPHTWLMRVLELYKVDATLRTFLKSCMGQWRTVLRYPTCRNTQRNSEPIRIERGIFQGDSLSPLWFCLALNPLSTLLEDSGLGYRLRRGGRVISHLLYMDDLKVFAPNNLQLIELLKVTETFSSAIRMEFGLDKCAVMHVKRGEIVESVGTQLSDSMNLRALSASETYKYLGMSEALGVNNTDMKQSLKERFFGRLKKVFNSLLSGGNKVRAFNGWVMPVLMYSFGILKWTQTELDTLDRRVRTLLTANRMHHPRSSVMRLYIPRKCGGRGFLNAKSLHNREICSLREYFLEADVGMHRDVVAVDKGLTPLSLAKENWRKPVVLDTNDRMEVWQSKELHGRFFRALHGPDVDVQASVAWLRFGDLFGETEGFVCAIMDEVMMTNNYRRFIVKDGTVDICRACHRPGESIRHIISGCSRLANEEYLHRHNLVARIIHQQLALKYSFVESEVPYYRYVPDPVLENGTITLYWDRSIITDRTIIANKPDIVLVDRRERRAMIVDITIPHDGNLVKAEKDKQIKYLDLAREVVDMWDVDSAIIVPIVVTANGLIAKSLDQHLRRLSLGSWIKGLIQKAVLLDTARIVRRFLSLEP

SEQ ID NO: 11020 - protein, 959 aa, Griposia aprilina
MYNVDIIIVIIIIIIIIDDCVDLTDTHSILYCAAVAVCRVAHVKFANDSRATRPKPAVPAWQCRIERRIGEARALIGKLICFREGNTRPRVMRFVRRAFAGTNISPQDYMSCVTERIDFLKQKVYAWANRIRRCKRRVERYTQNRTFQRDERWVYRGWERPDQGVADTCLPDDDAMCSFWRNIWSVPVSHTEGDWTREVERACDPIPEMGAITICPQDVTRAVRPLPNWKSPGPDGLHNFWIKWFGRSHARLAAQYQVALESGSLPQFLTTGVTHLLHKSGSTAEPKNYRPIACLPTVYKVLTSILRDKINKHIDTNYIMSPSQNGCRNGSRGTKELLLIDMAISQQVRRSRKDLSTCWIDYKKAYDSVPHAWLMRVLELYKVEATLRTFLMSCMRQWRTVLHYPACRNTQRNSEPIRIERGIFQGDSLSPLWFCLALNPLSTLLEDSGLGYRLRRGGQVISHLLYVDDLKLFAPNNSQLMDLLKVTETFSSAVRMEFGVDKCAVMHVKRGEIVESVGTQLSDSINLRALSASETYKYLGMSEALGINGTDMKQSLKDRFFGRLKKVFNSLLSGGNKVRAFNGWVMPVLMYSFGILKWTQTELDALDRKVRTLLTANRMHHPRSSVMRLYIPRKCGGRGFLNAKTLHNREICSLREYFLEADVGMHRDVVTVDKGLTPLSLAKENWRKPVVLDTNDRMEVWQSKELHGRFFRALYGPDVDQLASVAWLRFGDLFGETEGFVCAIMDEVMMTNNYRRFIVKDGTVDICRACHRPGESIRHIISGCSRLANEEYLHRHNLVARIIHQQLALKYSLVELEVPYYRYVPDPVLENGHITLYWDRSIITDRTIVANKPDIVMVDRLERRAMIVDITVPHDGNLVKAEKDKQIKYLDLAREVVDMWDVDSAIIVPIVVTANGLIAKSLDQHLRRLSLGSWIKGLIQKAVLLDTARIVRRFLSLEP

SEQ ID NO: 11021 - protein, 1205 aa, Omphaloscelis lunosa
MLTRSRARKLIDTHPTSSGSSLSSASQLPDPAPDVSPVIPVAAVASSSSDEYFSPPTTPPPTRQRGRGRPPASLGLRGPPASDRVPAPGGSVQRMRWTQTVNENVMRAYFGATEGGSNLTAYRGRMLSLFQVLEPAVNVSAQRLSDQVRVIQRNHMLDDVVLDRLRLESRNNHVTPASPLVTVQLQNLPSSSPRSDRVGEEDDDGVISVSSQCNVRLRSALEDAFREYRSIPPGLRPQLPRLPMHKKNKALMCTLDSLLSNCFDGSKDLADTHSILYCAAVAACRVAHVKFPNSDRAPRPKPAVPAWQCRIERRIGEARVLIGKLICFREGNTRPRVMRFVKRAFSGTDISFQDYLTRVTERIDFLKQKIYAWANRIRRYRRRVERYTQNRTFQSDERWVYRAWERPDQGVADTHLPDDDAMCSFWRSIWSVPVSHTEGDWTREVERACDPIPEMGAITICPQDVARAVRPLPNWKSPGPDGLHNFWIKWFQRSHARLASQFQSALESGSLPQFLTTGITHLLHKSGSTAEPKNYRPITCLPTVYKVFTSILRTKINKHIDTNSIMSASQNGCRNGSRGTKELLLIDMAINQQVRRSRRDLSTCWIDYKKAYDSVPHTWLMRVLELYKVNATLRTFLMSCMGQWRTVLRYPGCRQILRNSEPIRIERGIFQGDSLSPLWFCLALNPLSTLLEDSGLGYRLRRGGQVISHLLYMDDLKLFAPNNLQLLELLKVTETFSSAIRMEFGVDKCAVMHVKRGEIVESVGTQLSDSIQLRSLSSIETYKYLGMSEALGVNAADMKQSLKERFFNRLNKVLNSLLSGGNKVRAFNGWVMPVLMYSFGILKWTQTELDALDRRVRTLLTANRMHHPRSSVMRLYIPRKCGGRGFLNAKTLHNREVCSLREYFLEADVGMHRDVATVDKGLTPLSLANENWRKPIVLDTNDRREVWQSKELHGRFYRALHGPDVDLLASVSWLRFGDLFGETEGFVFAIMDEVMMTNNYRKYIVKDGTVDICRACHRPGESIRHIISGCSRLANGDYLHRHNLVARIIHQQLALKYSLVESEVPYYRYVPDPVLENGNITLYWDRSIITDRTIVANKPDIVVIDRLERRTMIIDIAVPHDENLVKAEKDKQIKYLDLAREVVDMWDVYTAIIVPIVVTANGIIAKSLDQHLKRLSLGSWIKGLIQKAVLLDTARIVRRFLSQEP

SEQ ID NO: 11022 - protein, 1205 aa, Omphaloscelis lunosa
MLTRSRARKLIDTHPTSSGSSLSSASQLPDPAPDVSPVISVAAVASSSSDEYFSPPTTPPPTRQRGRGRPPASLGLRGPPASDRVPAPGGSVQRMRWTQTVNENVMRAYFGATEGGSNLTAYRGRMLSLFQVLEPAVNVSAQRLSDQVRVIQRNHMLDDVVLDRLRLESRNNHVTPASPLVTVQLQNLPSSSSRSDRVGEEDDDGVISVSSQCNVRLRSALEDAFREYRSIPPGLRPQLPRLPMHKKNKALMCTLDSLLSNCFDGSKDLADTHSILYCAAVAACRVAHVKFPNSDRAPRPKPAVPAWQCRIERRIGEARVLIGKLICFREGNTRPRVMRFVKRAFSGTDISFQDYLTRVTERIDFLKQKIYAWANRIRRYRRRVERYTQNRTFQSDERWVYRAWERPDQGVADTHLPDDDAMCSFWRSIWSVPVSHTEGDWTREVERACDPIPEMGAITICPQDVARAVRPLPNWKSPGPDGLHNFWIKWFQRSHARLASQFQSALESGSLPQFLTTGITHLLHKSGSTAEPKNYRPITCLPTVYKVFTSILRTKINKHIDTNSIMSASQNGCRNGSRGTKELLLIDMAINQQVRRSRRDLSTCWIDYKKAYDSVPHTWLMRVLELYKVNATLRTFLMSCMGQWRTVLRYPGCRQILRNSEPIRIERGIFQGDSLSPLWFCLALNPLSTLLEDSGLGYRLRRGGQVISHLLYMDDLKLFAPNNLQLLELLKVTETFSSAIRMEFGVDKCAVMHVKRGEIVESVGTQLSDSIQLRSLSSIETYKYLGMSEALGVNAADMKQSLKERFFNRLNKVLNSLLSGGNKVRAFNGWVMPVLMYSFGILKWTQTELDALDRRVRTLLTANRMHHPRSSVMRLYIPRKCGGRGFLNAKTLHNREVCSLREYFLEADVGMHRDVVTVDKGLTPLSLANENWRKPIVLDTNDRREVWQSKELHGRFYRALHGPDVDLLASVSWLRFGDLFGETEGFVFAIMDEVMMTNNYRKYIVKDGTVDICRACHRPGESIRHIISGCSRLANGDYLHRHNLVARIIHQQLALKYSLVESEVPYYRYVPDPVLENGNITLYWDRSIITDRTIVANKPDIVVIDRLERRTMIIDIAVPHDENLVKAEKDKQIKYLDLAREVVDMWDVDTAIIVPIVVTTNGIIAKSLDQHLKRLSLGSWIKGLIQKAVLLDTARIVRRFLSQEP

SEQ ID NO: 11023 - protein, 1200 aa, Sesamia nonagrioides
MLTRSAARRARPPSPDSLLSSASPPPASSATVSAVTTPAAAVASSSSDEYFSPPTTPPPARRRGGRRPPDRLGPRGPSASDRVPAPGGSVQRMRWTQSINENVMRSYYGATEGGNNLTAYRVRMLSLFQVLEPAVNVSAQRLSDQVRVIQRNHMLDDVVLDRLRLESRNSHVTPASSLVAVQLNSVSPRPNHVDEEDGDRAISVSPQCNEKLRSALEDAFREYRSIPPELRPRLPRLPMHKKNKALVCALDSQLSNYLKDSKDLNETHSILYCGAVAICRVAHVKFPDSDRATRPKSAVPAWQCRIERRIGETRALIGKLISFREGNTRPRVMRFVRRAFSGTDISTRDYLFRITERIDFFKQKIYAWANRIRRYRRRVERYSQNRNFHSDERRVYRAWERSDQGVTDTCLPDDDAMSSFWRNIWSVPVSHTEGVWTRDVERACDPIPEMGAITICPQDVARAVRPLPNWKSPGPDGLHNFWIKWFSRSHALLASQFQTALESGSLPQFLTTGITHLLHKSGSTAEPKNYRPITCLPTVYKVLTSILKAKINTHIDSNSIMSASQNGCGNGSRGTKELLLIDMVISQQVRRSRKDLSTCWIDYKKAYDSVPHTWLMRVLELYKVHATLRTFLLTCMAQWRTVLLYPGCRNIQRNSEPIRIECGIFQGDSLSPLWFCLALNPLSTLLENSGLGYRLKRDGQVISHLLYMDDLKLFAPNDLQLRELLKITQTFSSAIRMEFGVDKCAVMHVQRGEIVESVGTQLTGSINLRSLSAAETYKYLGMSEALGINVTDMKQSLKERFFGRLKKVLNSLLSGGNKVRAFNGWVMPVLMYSFGILKWTQTELDALDQRVRTLLTANRLHHPRSSVMRLYIPRKCGGRGFLNAKALHNREICSLREYFLKTDVGMHRDVVAVDKGLTPLSLAKENWRKPVVLETNDRMEVWQSKELHGRFFRALHGPDVDFQASVAWLRFGNLFGETEGFVCAIMDEVMMTNNYRRFIVKDGTVDICRACHRPGESIRHIISGCSRLANGEYLHRHNLVARIIHQQLALKYNLVESEVPYYRYVPDPVLENGHITLYWDRSIITDRTIVANKPDIVMVDRSERRAMIVDITIPHDENLVKAEKDKQIKYLDLAHEVVDMWEVDSAIIVPIVVTANGLIAKSLDQHLRRLSLGSWIKGLIQKAVLLDTARIVRKFLSLEP

SEQ ID NO: 11024 - protein, 1197 aa, Sesamia nonagrioides
MLTRSAARRARPPSPDSLLGSASPPPVSSPTVSAVTTPAAAVALSSSDEYFSPPTTPPPVRRRGGRRPPDRLGPRGPSASDRVPAPGGSVQRMRWTQSINENVMRSYYGATEGGNNLTAYRVRMLSLFQVLEPAVNVSAQRLSDQVRVIQRNHMLDDTVLDRLRNEMQSSRVIAHQSQTAEIPPQSTNYADEGSNDRATNVSTQCNEELINALEAAIREYRSTSAELRPRLPRLPMHNRNRALMAALDAQLSNYFDTCEDLTDTHSILYCAAVAACRVAHVKFPSDSRATRPKPVVPAWQHRIERRIGGARALIGKLICFREGNTRPRVMRFVRRAFAGTNISPQNYMARVTERIDFLKQKVYAWANRIRRYKRRVERYTQNRTFQNNERWVYRDWERPEQGVTDTCLPDDDVMCSFWRSIWSVPVSHTEGDWARDVERACDLIPEMGAITICPQDVACAVRPLPNWKSPGPDGLHNFWIKWFPRSHARLASQFQTALVSGSLPQFLTTGITHLLHKSGSIAEPKNYRPITCLPTVYKVLTSILKTKINKHIDSNSIMSASQNGCKSGSRGTKELLLIDMAISQQVRRSRKDLSTCWIDYRKAYDSVPHTWLMRVLELYKVDATLRTFLMSCMRTWRTVLRYPGCRNIQRNSEPIRIERGIFQGDSLSPLWFCLALNPLSTLLEDSGLGYRLRRGGQVISHLLYMDDLKLFAPNNSQLRELLKITETFSSSIRMEFGVDKCAVMHVKRGEIMESVGTQLTGSINLRALSASETYKYLGMSEALGINVTDMKQSLKERFFGRLKKVLNSLLSGGNKVRAFNGWVMPVLMYSFGILKWTQTELDALDQRVRTLLTANRLHHPRSSVMRLYIPRKCGGRGFLNAKTLHNREVCSLREYFLETDVGMHRDVVAADKGLTPLSLAKENWRKPVVLDTNDRLEVWKSKELHGRFFRALHGLDVDFQASVAWLRFGDLFGETEGFVFAIMDEVMMTNNYRRFIVKDGTVDICRACHRPGESIRHIISGCSRLANGEYLHRHNLVARIIHQQLALKYKLVESEVPYYRYMPDPVFENGHITLYWDRSIITDRTIVANKPDIVLVDRSERRAMIVDITIPHDENLVKAEKDKQIKYLDLAHEVVDMWEVDSAIIVPIVVTANGLIAKSLDQHLRRLSLGSWIKGLIQKAVLLDTARIVRKFLSLEP

SEQ ID NO: 11025 - protein, 868 aa, Sesamia nonagrioides
MRFVRRAFSGTDVSTRDYLLRVTERIDFLKQKIYAWANRIRRYRRRVERYSQNRNFQSDERWVYRAWERSDQGVTDTCLPDDDATRSFWRNIWSVPVSHTEGGWTRDVERACDPVPEMGAITICPQDVARAVRPLPNWKSPGPDGLHNFWIKWFSGSHACLASQFQTALESGSLPQFLTTGITHLLHKSGSTAEPKNYRPITCLPTVYKVLTSILKAKINTHIDSNSIMSASQNGCRNGSRGTKELLLIDMAISQQVRRSRKDLSTCWIDYKKAYDSVPHTWLMRVLELYKVDATLRTFLMTCMSQWRTVLRYPGCRNIQRNSEPIRIERGIFQGDSLSPLWFCLALNPLSTLLEDSGLGYRLRRGGQVISHLLYMDDLKLFAHTNSQLKELLKITETFSSAIRMEFGVDKCAVMHVQRGEIVESVGTQLTGSINLRSLSASETYKYLGMSEALGINVTDMKQSLKERFFGRLKKVLNSLLSGGNKVRAFNGWVMPVLMYSFGILKWTQTELDALDQRVRTLLTANRLHHPRSSVMRLYIPRKCGGRGFLNAKTLHNREVCSLREYFLKTDVGMHRDVVAVDKGLTPLSLAKENWRKPVVLETNDRMEVWQSKELHGRFFRALRGPDVDFHASVAWLRYGDLFGETEGFVCAIMDEVMMTNNYRKFIVKDGTVDICRACHRPGESIRHIISGCSRLANGEYLHRHNLVARIIHQQLALKYNLVESEVPYYRYMPDPVLENGHITLYWDRSIITDRTIVANKPDIVMVDRSERRAMIVDITIPHDENLVKAEKDKQIKYLDLAHEVVDMWEVDSAIIVPIVVTANGLIAKSLDQHLRRLSLGGWIKGLIQKAVLLDTARIVRKFLSLEP

SEQ ID NO: 11026 - protein, 1197 aa, Sesamia nonagrioides
MLTRSAARRARPPSPDSLLGSASPPPVSSPTVSAVTTPAAAVALSSSDEYFSPPTTPPPVRRRGGRRPPDRLGPRGPSASDRVPAPGGSVQRMRWTQSINENVMRSYYGATEGGNNLTAYRVRMLSLFQVLEPAVNVSAQRLSDQVRVIQRNHMLDDTVLDRLRNEMQSSRVIAHQSQTAEIPPQSTNYADEGSNDRATNVSTQCNEELINALEAAIREYRSTSAELRPRLPRLPMHNRNRALMAALDAQLSNYFDTCEDLTDTHSILYCAAVAACRVAHVKFPSDSRATRPKPVVPAWQHRIERRIGGARALIGKLICFREGNTRPRVMRFVRRAFAGTNISPQNYMARVTERIDFLKQKVYAWANRIRRYKRRVERYTQNRTFQNNERWVYRDWERPEQGVTDTCLPDDDVMCSFWRSIWSVPVSHTEGDWARDVERACDLIPEMGAITICPQDVACAVRPLPNWKSPGPDGLHNFWIKWFPRSHARLASQFQTALVSGSLPQFLTTGITHLLHKSGSTAEPKNYRPITCLPTVYKVLTSILKTKINKHIDSNSIMSASQNGCKSGSRGTKELLLIDMAISQQVRRSRKDLSTCWIDYRKAYDSVPHTWLMRVLELYKVDATLRTFLMSCMRTWRTVLRYPGCRNIQRNSEPIRIERGIFQGDSLSPLWFCLALNPLSTLLEDSGLGYRLRRGGQVISHLLYMDDLKLFAPNNSQLRELLKITETFSSSIRMEFGVDKCAVMHVKRGEIMESVGTQLTGSINLRALSASETYKYLGMSEALGINVTDMKQSLKERFFGRLKKVLNSLLSGGNKVRAFNGWVMPVLMYSFGILKWTQTELDALDQRVRTLLTANRLHHPRSSVMRLYIPRKCGGRGFLNAKTLHNREVCSLREYFLETDVGMHRDVVAADKGLTPLSLAKENWRKPVVLDTNDRLEVWKSKELHGRFFRALHGPDVDFQASVAWLRFGDLFGETEGFVFAIMDEVMMTNNYRRFIVKDGTVDICRACHRPGESIRHIISGCSRLANGEYLHRHNLVARIIHQQLALKYKLVESEVPYYRYMPDPVLENGHITLYWDRSIITDRTIVANKPDIVLVDRSERRAMIVDITIPHDENLVKAEKDKQIKYLDLAHEVVDMWEVDSAIIVPIVVTANGLIAKSLDQHLRRLSLGSWIKGLIQKAVLLDTARIVRKFLSLEP

SEQ ID NO: 11027 - protein, 1197 aa, Sesamia nonagrioides
MLTRSAARRARPPSPDSLLSSASPPPVSSPTVSAVTTPAATVASSSSDEYFSPPTTPPPVRRRGGRRPPDCLGPRGPSASDRVPAPGGSVQRMRWTQSINENVMRSYYGATEGGTNLTAYRVRMLSLFQVLEPAVNVSAQRLSDQVRVIQRNHMLDDTVLDRLRNEMQSSRVIAHQSQSAEIPPQPTNYADEGSNDRATNVSTQCNEDLRNALEAAIREYRSISAELRPRLPRLPMHNRNRALMAALDAQLSNYFDTCEDLIDTHSILYCAAVAACRVAHVKFPSDSRATRPKPVVPAWQHRFERRIGGARALIGKLICFREGNTRPRVMRFVRRAFSGTNTRPQNYMARVTERIDFLKQKVYAWANRIRRYKRRVERYTQNRTFQSNERRVYRDWERPEQGVTDTCLPDDDAMCSFWRSIWSVPVSHTEGDWARDVERACDPIPEMGAITICPQDVACAVRPLPNWKSPGPDGLHNFWIKWFPRSHARLASQFQTALVSGSLPQFLTTGITHLLHKSGSTAEPKNYRPITCLPTVYKVLTSILKTKINKHIDSNSILSASQNGCRSGSRGTKELLLIDMAISQQVRRSRKDLSTCWIDYKKAYDSVPHTWLMRVLELYKVDATLRTFLMTCMRTWRTVLRYPGCRNIQRNSEPIRIERGIFQGDSLSPLLFCLALNPLSTLLEDSGLGYRLRRGGQVISHLLYMDDLKLFAPNNSQLNELLKITEIFSSSIRMEFGVDKCAVMHVKRGEIMEPVGTQLTSSINLRALSSSETYKYLGMSEALGINVTDMKQSLKERFFGRLKKVLNSLLSGGNKVRAFNGWVMPVLMYSFGILKWTQTELDALDQRVRTPLTANRLHHPRSSVMRLYIPRKCGGRGFLNAKTLHNREICSLRDYFLETDVGMHRDVVAADKGLIPLSLAKENWRKPVVLDTNDRMEVWKSKELHGRFFRALHGPDVDFQASVAWLRFGDLFGETEGFVFAIMDEVMMTNNYRRFIVKDGTVDICWACQRPGESIRHIISGCSRLANGEYLHRHNLVARIIHQQLALKYKLVESEVPYYRYMPDPVLENGHITLYWDRSIITDRTIIANKPDIVLVDRSERRAMIVDITIPHDENLVKAEKDKQTKYLDLAHEVVDMWEVDSAIIVPIVVTANGLIAKSLDQYLRRLSLGGWIKGLIQKAVLLDTARIVRKFLSLEP

SEQ ID NO: 11028 - protein, 1200 aa, Sesamia nonagrioides
MLTRSAARRARSPPPDSSPSSASPPPVSSPTVNAVMTPAAAVALSSSDEYFSPPTTPPPVRRRGGRRPPDCLGPRGPPASDRAPATGGNVQRMKWTQTINENVMRAYFGATEGGSNLTAYRGRMLSLFQVLEPAVNVSAQRLSDQVRVIQRNHMLDDVVLDRLRLESRNSHVTPASSLVAVQFNSVPSRPNLVDEEDDDEAISVTPQCNEKVRSALEDAFREYRSTPPELRPRLPRLPMHKKNKALVCALDSQLSNYLKDSKDLADTHSILYCGAVAICRVAHVKFPDSDRATRPKPAVPAWQCRIERRIGETRALIGKLISFREGNTRPRVMRFVRRAFSGTDVSTRDYLLRVTERIDFLKQKIYAWANRIRRYRRRVERYSQNRNFQSDERWVYRAWERSDQGVTDTCLPDDDATRSFWRNIWSVPVSHTEGGWTRDVERACDPVPEMGAITICPQDVARAVRPLPNWKSPGPDGLHNFWIKWFSGSHACLASQFQTALESGSLPQFLTTGITHLLHKSGSTAEPKNYRPITCLPTVYKVLTSILKAKINTHIDSNSIMSASQNGCRNGSRGTKELLLIDMAISQQVRRSRKDLSTCWIDYKKAYDSVPHTWLMRVLELYKVDATLRTFLMTCMSQWRTVLRYPGCRNIQRNSEPIRIERGIFQGDSLSPLWFCLALNPLSTLLEDSGLGYRLRRGGQVISHLLYMDDLKLFAHTNSQLKELLKITETFSSAIRMEFGVDKCAVMHVLRGEIVESVGTQLTGSINLRSLSASETYKYLGMSEALGINVTDMKQSLKERFFGRLKKVLNSLLSGGNKVRAFNGWVMPVLMYSFGILKWTQTELDALDQRVRTLLTANRLHHPRSSVMRLYIPRKCGGRGFLNAKTLHNREVCSLREYFLKTDVGMHRDVVAVDKGLTPLSLAKENWRKPVVLETNDRMEVWQSKELHGRFFRALRGPDVDFQASVAWLRYGDLFGETEGFVCAIMDEVMMTNNYRKFIVKDGTVDICRACHRPGESIRHIISGCSRLANGEYLHRHNLVARIIHQQLALKYNLVESEVPYYRYMPDPVLENGHITLYWDRSIITDRTIVANKPDIVMVDRSERRAMIVDITIPHDENLVKAEKDKQIKYLDLAHEVVDMWEVDSAIIVPIVVTANGLIAKSLDQHLRRLSLGGWIKGLIQKAVLLDTARIVRKFLSLEP

SEQ ID NO: 11029 - protein, 1197 aa, Sesamia nonagrioides
MLTRSAALRARPPPPDSLLSSASPPPVSSATVSAVTTPAAAVALSSSDEYFSPPTTPPPARRRGGRRPPDRLGPRGPSASDRVPAPGGSVQRMRWTQSINENVMRSYYGATEGGNNLTAYRVRMLSLFQVLEPAVNVSAQRLSDQVRVIQRNHMLDHTVLDRLRNEMQSSRVIAHQSQTAEIPPQSTNYADEGSNDRATNVSTQCNEELINALEAAIREYRYTSAELRPRLPRLPMHNRNRALMAALDAQLSNYFDTCEDLTDTHSILYCAAVAACRVAHVKFPSDSRATRPKPVVPAWQHRIERRIGGARALIGKLICFREGNTRPRVMRFVRRAFAGTNISPQNYMARVTERIDFLKQKVYAWANRIRRYKRRVERYTQNRTFRSNERWVYRDWERPEQGVTDTCLPDDDAMCSFWRSIWSVPVNHTEGDWARDVERACDPIPEMGAIAICPQDVACAVRPLPNWKSPGPDGLHNFWIKWFPRSHARLASQFQTALVSGSLPQFLTTGITHLLHKSGSTAEPKNYRPITCLPTVYKVLTSILKTKINKHIDSNSIMSASQNGCKSGSRGTKELLLIDMAISQQVRRSRKDLSTCWIDYRKAYDSVPHTWLMRVLELYKVDATLRTFLMSCMRTWRTVLRYPGCRNIQRNSEPIRIERGIFQGDSLSPLWFCLALNPLSTLLEDSGLGYRLRRGGQVISHLLYMDDLKLFAPNNSQLRELLKITETFSSSIRMEFGVDKCAVMHVKRGEIMESVGTQLTDSINLRALSASETYKYLGMSEALGINVTDMKQSLKERFFGRLKKVLNSLLSGGNKVRAFNGWVMPVLMYSFGILKWTQTELDALDQRVRTLLTANRLHHPRSSVMRLYIPRKCGGRGFLNAKTLHNREVCSLREYFLETDVGMHRDVVAADKGLTPLSLAKENWRKPVVLDTNDRLEVWKSKELHGRFFRALHGPDVDFQASVAWLRFGDLFGETEGFVFAIMDEVMMTNNYRRFIMKDGTVDICRACHRPGESIRHIISGCSRLANGEYLHRHNLVARIIHQQLALKYNLVESEVPYYRYMPDPVLENGHITLYWDRSIITDRTIVANKPDIVLVDRSERRAMIVDITIPHDENLVKAEKDKQIKYLDLAHEVVDMWEVDSAIIVPIVVTANGLIAKSLDQRLRRLSLGNWIKGLIQKAVLLDTARIVRKFLSLEP

SEQ ID NO: 11030 - protein, 1197 aa, Sesamia nonagrioides
MLTRSAARRARPPSPDSLLSSASPPPACSATVSAVTTPAAAAASSSSDEYFSPPTTPPPVRRWGGRRPPDCLGPRGPSASDRVPAPGGSVQRMRWTQSINENVMRSYYGATEGGTNLTAYRVRMLSLFQVLEPAVNVSAQRLSDQVRVIQRNHMLDDTVLDRLRNEMQSSRVIAHQSQSAEIPPQPTNYADEGSNDRATNVSTQCNEELRNALEAAIREYRSISAELRPRLPRLPMHNRNRALMAALDAQLSNYFDTCEDLTDTHSILYCAAVAACRVAHVKFPSDSRATRPKPVVPAWQHRIERRIGGARALIGKLICFREGNTRPRVMRFVRRAFSGTNTSPLNYMARVTERIDFLKQKVYAWANRIRRYKRRVERYTQNRTFQSNERRVYRDWERPEQGVTDTCLPDDDAMCSFWRSIWSVPVSHTEGDWARDVERACDPIPEMGAITICPQDVACAVRPLPNWKSPGPDGLHNFWIKWFPRSHARLASQFQTALVSGSLPQFLTTGITHLLHKLGSTAEPKNYRPITCLPTVYKVLTSILKTKINKHIDSNSILSASQNGCRSGSRGTKELLLIDMAISQQVRRSRKDLSTCWIDYKKAYDSVPHTWLMRVLELYKVDATLRTFLMTCMRTWRTVLRYPGCRNIQRNSEPIRIERGIFQGDSLSPLWFCLALNPLSTLLEDSGLGYRLRRGGQVISHLLYMDDLKLFAPNNSQLNELLKITEIFSSSIRMEFGVDKCAVMHVKRGEIMEPVGTQLTSSINLRALSASETYKYLGMSEALGINVTDMKQSLKERFFGRLKKVLNSLLSGGNKVRAFNGWVMPVLMYSFGILKWTQTELDALDQRVRTLLTANRLHHPRSSVMRLYIPRKCGGRGFLNAKTLHNREICSLRDYFLETNVGMHRDVVASDKGLTPLSLAKENWRKPVVLDTNDRMEVWKSKELHGRFFRALHGPDVDFQASVAWLRFGDLFGETEGFVFAIMDEVMMTNNYRRFIVKDGTVDICRACHRPGESIRHIISGCSRLANGEYLHRHNLVARIIHQQLALKYKLVESEVPYYRYMPDPVLENGHITLYWDRSIITDRTIIANKPDIVLVDRSERRAMIVDITIPHDENLVKAEKDKQTKYLDLAHEVVDMWEVDSAIIVPIVVTANGLIAKSLDQHLRRLSLGSWIKGLIQKAVLLDTARIVRKFLSLEP

SEQ ID NO: 11031 - protein, 1025 aa, Sesamia nonagrioides
MFLTKIAKKTCDICHVKPKNIRKNEAISVTPQCNEKVRSALEDAFREYRSTPPELRPRLPRLPTHKKNKALVCALDSQLPNYLKDSKDLTDTHSILYCGAVAICRVAHVKFPDSDRAIRPKSAVPAWQRRIERRIGETRALIGKLISFRDGNTRPRVMRFVRRAFSGTDISTRDYLFRVTERIDFLKQKLYAWADRIRWYKRRVERYSQNRNFQSDERRVYRAWERSDQGVTDTCLPDDDATCSFWRNIWSVPVSHTEGGWTRDIERACDPVPEMGAITICPQDVARAVRPLPNWKSPGPDGLHNFWIKWFSRSYACLASQFQTALESGSLPQFLTTGITHLLHKSGSIAEPKNYRPITCLPTVYKVLTSILKAKINTHIDSNSIMSASQNGRGNGSRGTKELLLIDMAISQQVRRFRKDLSTCWIDYKKAYDSVPHTWLMRVLELYIVDATLRTFLMTCMSQGRTVLHYPGCRNIQRNSEPIRIERGIFQGDSLSPLWFCLALNPLSTLLEDSGLGYRLRRGGQVISHLLYMDDLKLFAPNYLQLRELLKITETFSSAIRMEFGVDKCAVMHVKRGEIVESVGTQPTGSINLRALSASDTYKYLGMSEALGINVTDMKQSLKERFFGRLKKVLNSFLSGGNKVRAFNGWVMPVLMYSFGILKWTQTELDALDQRVRTLLTANRLHHPRSSVMRLYIPRKCGGRGFLNAKTLHNREICSLREYFLKTDVGMHRVVVAVDKGLTPLSLAKENWRKPVVLETNDRMEVWKSKELHGRFFRALHGPDVDFQASVAWLRFGDLFVETEGFVCAIMDEFMMTNNYRRFIVKDGTVDICRACHRPGESIRHIISGCSRLANGEYLHRHNLVARIIHQQLALKYNLVESEVPYYRYMPDPVLENDHITLYWDRSIITDRTIVANKPDIVLMDRSERRAMIVDITIPHDENLVKAEKDKQIKYLDLAHEVVDMWEVDSAIIVPIVVTANGLIAKSLDQHLRRLSLGSWIKGLIQKAVLLDTARIVRKFLSLEP

SEQ ID NO: 11032 - protein, 1197 aa, Sesamia nonagrioides
MLTRSAARRARPPSPDSLLSSASPPPASSTTVSAVTTPAAAVALSSSDEYFSPPTTPPPARRRGGRRPPDRLGPRGPSASDRVPAPGGSVQRMRWTQSINENVMRSYYGATEGGNNLTAYRVRMLSLFQVLEPAVNVSAQRLSDQVRVIQRNHMLDDTVLDRLRNEMQSSRIIAHQSQTAEIPPQPTNYADEGSNDRATNVSTQCNEELINALEAAIREYRFTPAEQRPRLPRLPMHNRNRALMAALDAQLSDYFDTCEDLTDTHSILYCAAVAACRVAHVKFPSDSRATRPKPVVPAWQRRIERRIGGARALIGKLICFREGNTRPRVMRFVRRAFAGTNISPQNYMARVTERIDFLKQKVYAWANRIRRYKRRVERYTQNRTFQSNERWVYRDWERPEQGVTDTCLPDDDAMCSFWRSIWSVPVSHTEGDWARDVERACDPIPEMGAITICPQDVACAVRPLPNWKSPGPDGLHNFWIKWFPRSHARLASQFQTALVSGSLPQFLTTGITHLLHKSGSTAEPKNYRPITCLPTVYKVLTSILKTKINKHIDSNSIMSASQNGCKSGSRGTKELLLIDMAISQQVRRSRKDLSTCWIDYRKAYDSVPHTWLMRVLELYKVDATLRTFLMSCMKTWRTVLRYPGCRNIQRNSEPIRIERGIFQGDSLSPLWFCLALNPLSTLLEDSGLGYRLRRGGQVISHLLYMDDLKLFAPNNSQLRELLKITETFSSSIRMEFGVDKCAVMHVKRGEIMESVGTQLTDSINLRALSASETYKYLGMSEALGINVTDMKQSLKERFFGRLKKVLNSLLSGGNKVRAFNGWVMPVLMYSFGILKWTQTELDALDQRVRTLLTANRLHHPRSSVMKLYIPRKCGGRGFLNAKTLHNREVCSLRDYFLVTDVGMHRDVVAADKGLTPLSLAKENWRKPVVLDTNDRMEVWKSKELHGRFFRALHGPDVDFQASVAWLRFGDLFGETEGFVFAIMDEVMMTNNYRRFIVKDGTVDICRACHRPGESIRHIISGCSRLANGEYLHRHNLVARIIHQQLALKYNLVESEVPYYRYTPDPVLENGYITLYWDRSIITDRTIVANKPDIVMVDRSERRAMIVDITIPHDENLVKAEKDKQIKYLDLAHEVVDMWEVDSAIIVPIVVTANGLIAKSLDQHLRRLSLGSWIKGLIQKAVLLDTARIVRKFLSLEP

SEQ ID NO: 11033 - protein, 1206 aa, Drepana arcuata
MFTRSQARRHNARPPPSASPPSSVSQTPADSDSATLDLRVVATAASSSSDEYFSPPTSPRPVRRQGRVQPPPNGLGPRGQSAPDRVLAVGGNVQRMRWTHTINENVMRAYYGATEGGTSLTAYRIRMLLLFQELEPTVNVSAQRLSDQVRVIQRNHRLDDNVLDRLRSEMQGSHVTSAPAQSAAQSLVSSITLPQPSYTDMEGGDRPLNAGTQYNELVRSTLKDAVQQYKSVSPGLRPRLPRLPMHKKNLALVAILDSLLPEYLDCCEDLTETLQILYCAAIAACRLAHVNFPNHERTGQPKPAVPIWQRRIQRRIDDARVLIGKLSCFREGNTRPRVMRYVRKAFSGSDINPRDYVACVTERIDYLKQKVYAWANRIRRYKQRVDRYTQNRMFQNDQKWVYRGWERSEQGVSDEQLPDNDAVCTFWSNIWSVPVTHTEGDWIEEIKRVCESIQEMGEVTISPKDVADAVQSLSNWKSPGPDGLHNFWLKWLRTSHARLASQFQSSLESGSLPSFLTTGITHLLHKSGSTMDPKNYRPITCLPTMYKLLTSILRAKISMHINNNVIMSASQNGCKNGSRGTKELLLIDMTISQQVRRSRKNLSTCWIDYKKAYDSVPHTWLMRVLELYKVNSTLRIFLKSVMGQWKTVLHYPRGRQIPGNDEPIRIERGIFQGDSLSPLWFCLALNPLSTLLESSGLGYRLRRGGQVISHLLYMDDLKLFAPSELQLTELLNVTQNFSNSIRMEFGIDKCAVMHVKRGNIVESVGIQLSDSINIRSLTPTENYTYLGMSEALGIHEADMKKSLLDRFYGRLTKVLKSLLTGGNKVRAYNGWVMPVLMYSFGILKWTQRELEITDRKVRTLLTSYRMHHPRSSVMRLYIPRKCGGRGFLNAKTLHNREVYKLREYFRSTEVGMHRDVVAVDKGLTALSLAKENWRKPVVLTTNDRREIWQSKELHGRFYRALHGPDVDLEASLAWLRFGDLFGETEGFVCAIMDEVMMTNNYRKYILRDGTVDICRACHRPGESLRHIISGCSHLANGEYLHRHNQVAKIIHQQLALKYNLVDSEVPYCKYSPDPVLENGHVTLYWDRSIITDRCITANKPDIVLIDRLERRTMIVDITVPHDGNLVKAEKDKQIKYLDLAHEIVSMWDVDSAIIVPIVITANGLMAKSLDQHLKRLSLDGWIKCLIQKAVLLETARIVRRFLSLGP

SEQ ID NO: 11034 - protein, 962 aa, Apamea monoglypha
MHNKNRALVAVLDAQLSSHFDACEDLTDTHSILYCAAVAACRVAHVKFDSDSRATRPKPAIPAWQCRIERRIGGARALIGKLICFREGNTRPRVMRFVRRAFLGTDISSQDYLSRVTERIDFLKQKVYAWANRIRRYKRRVERYTQNRTFQSDERWVYRGWERPDQSVADTCLPDDDAMCSFWRSIWSAPVSHTEGDWTGKIERACELIPEMGAITICPQDVARAVRPLPNWKSPGPDGLHNFWIKWFQRSHAPLAAQFQSALESGLLPQFITTGITHLLHKSGSTADPKNYRPITCLPTIYKVLTSILRAKINKHIDSNSIMSVSQNGCRNGSRGTKELLLIDMAISQQVRRSRKDLSTCWIDYKKAYDSVPHTWLMRVLELYKVDTTLRTFLMTCMGQWRTVLRYPGCRNIQRNSEPIRIERGIFQGDSLSPLWFCLALNPLSTLLDDSGLGYRLRRGGQVISHLLYMDDLKLFAPNNLQLMKLLKITETFSSAIRMEFGVDKCAVMHVKRGEIVESVGTQLSDFTNLRALSAAETYKYLGMSEALGINVTDMKQSLKERFFGRLKKVLNSLLSGGNKVRAFNSWVMPVLMYSFGILKWTQTELDALDRRVRTLLTANRMHHPRSSVMRLYIPRKCGGRGFLNAKTLHNREICSLREYFLETDVGMHRDVVAVDKGLTPLSLAKENWRRPVVLDTNDRMEVWQSKELHGRFYRALHGPDVDLLASVAWLRFGDLFGETEGFVCAIMDEVMMTNNYRRYIVKDGTVDICRACHRPGESIRHIISGCSRLANGEYLHRHNLVARIIHQQLALKYSLVESEVPYYRYVPDPVLENGNITLYWDRSIITDRTIVANKPDIVVVDRSERRAMIVDITVPHDENLVKAEKDKQIKYLDLAHEVVDMWDVDSAIIVPIVVSANGLIAKSLDQHLRRLSLGSWIKGLIQKAVLLDTARIVRRFLSLEP

SEQ ID NO: 11035 - protein, 1198 aa, Apamea monoglypha
MLTRSAARRARLPSPDSSLSSASPPPVPSPTVSAVTTPAAVVASSSSDEYFSPPTTPPPARRRGGRRPPDGLGPRGPLASDRVPAPGGSVQRMRWTRSINENVMRSYYGATEGGNNLTAYRVRMLSLFQVLEPAVNVSAQRLSDQVRVIQRNHMLDDTVLDRLRSEMQSSHVIAPQSQTAAVLPQSNTSHADEGSNDRATNVSIQCNEELRNALEGAIREYRFMSPELRPRLPRLPMHNKNRALVAVLDAQLSSHFDACEDLTDTHSILYCAAVAACRVAHVKFDSDSRATRLKPAIPAWQCRIERRIGGARALIGKLICFREGNTRPRVMRFVRRAFLGTDISSQDYLSRVTERIDFLKQKVYAWANRIRRYKRRVERYTQNRTFQSDERWVYRGWERPDQSVADTCLPDDDAMCSFWRSIWSAPVSHTEGDWTGKIERACELIPEMGAITICPQDVARAVRPLPNWKSPGPDGLHNFWIKWFQRSHAPLAAQFQSALESGLLPQFITTGITHLLHKSGSTADPKNYRPITCLPTIYKVLTSILRAKINKHIDSNSIMSVSQNGCRNGSRGTKELLLIDMAISQQVRRSRKDLSTCWIDYKKAYDSVPHTWLMRVLELYKVDTTLRTFLMTCMGQWRTVLRYPGCRNIQRNSEPIRIERGIFQGDSLSPLWFCLALNPLSTLLDDSGLGYRLRRGGQVISHLLYMDDLKLFAPNNLQLMKLLKITETFSSAIRMEFGVDKCAVMHVKRGEIVESVGTQLSDFTNLRALSAAETYKYLGMSEALGINVTDMKQSLKERFFGRLKKVFNSLLSGGNKVRAFNSWVMPVLMYSFGILKWTQTELEALDRRVRTLLTANRMHHPRSSVMRLYIPRKCGGRGFLNAKTLHNREICSLREYFLETDVGMHRDVVAVDKGLTPLSLAKENWRKPVVLDTNDRMEVWQSKELHGRFYRALHGPDVDLLASVAWLRFGDLFGETEGFVCAIMDEVMMTNNYRRYIVKDGTVDICRACHRPGESIRHIISGCSRLANGEYLHRHNLVARIIHQQLALKYSLVESEVPYYRYVPDPVLENGNITLYWDRSIITDRTIVANKPDIVVVDRSERRAMIVDITVPHDENLVKAEKDKQIKYLDLAREVVDMWDVDSAIIVPIVVSANGLIAKSLDQHLRRLSLGSWIKGLIQKAVLLDTARIVRRFLSLEP

SEQ ID NO: 11036 - protein, 1045 aa, Apamea monoglypha
MLDDTVLDRLRSEMQSSHVIAPQSQTSAVLPQSNTSHADEGSNDRATNVSIQCNEELRNALEGAIREYRFMSPELRPRLPRLPMHNKNRALVAVLDAQLSSHFDACEDLTDTHSILYCAAVAACRVAHVKFDSDSRATRPKPAIPAWQCRIERRIGGARALIGKLICFREGNTRPRVMRFVRRAFLGTDISSQDYLSRVTERIDFLKQKVYAWANRIRRYKRRVERYTQNRTFQSDERWVYRGWERPDQSVADTCLPDDDAMCSFWRSIWSAPVSHTEGDWTGKIERACELIPEMGAITICPQDVARAVRPLPNWKSPGPDGLHNFWIKWFQRSHAPLAAQFQSALESGLLPQFITTGITHLLHKSGSTADPKNYRPITCLPTIYKVLTSILRAKINKHIDSNSIMSVSQNGCRNGSRGTKELLLIDMAISQQVRRSRKDLSTCWIDYKKAYDSVPHTWLMRVLELYKVDTTLRTFLMTCMGQWRTVLRYPGCRNIQRNSEPIRIERGIFQGDSLSPLWFCLALNPLSTLLDDSGLGYRLRRGGQVISHLLYMDDLKLFAPNNLQLMKLLKITETFSSAIRMEFGVDKCAVMHVKRGEIMESVGTQLSDFTNLRALSAAETYKYLGMSEALGINVTDMKQSLKERFFGRLKKVFNSLLSGGNKVRAFNSWVMPVLMYSFGILKWTQTELEALDRRVRTLLTANRMHHPRSSVMRLYIPRKCGGRGFLNAKTLHNREICSLREYFLETDVGMHRDVVAVDKGLTQLSLAKENWRKPVVLDTNDRMEVWQSKELHGRFYRALHGPDVDLLTSVAWLRFGDLFGETEGFVCAIMDEVMMTNNYRRYIVKDGTVDICRACHRPGESIRHIISGCSRLANGEYLHRHNLVARIIHQQLALKYSLVESEVPYYRYVPDPVLENGNITLYWDRSIITDRTIVANKPDIVVVDRSERRAMIVDITVPHDENLVKAEKDKQIKYLDLAREVVDMWDVDSAIIVPIVVSANGLIAKSLNQHLRRLSLGSWIKGLIQKAVLLDTARIVRRFLSLEP

SEQ ID NO: 11037 - protein, 1081 aa, Furcula furcula
MLSLFQVLEPAVNVSAQRLSDQVRAIQRGHMLDDTVLDRLRSVVQGGRVAPCIPSQAVAPVVDTAPAPRLAANRDDDRDDTTTNVSTQYINLLRSTLEDVVREYRSMPQSLRPRLPRLPMHKRNRALVCALDSLLSSYFDSSEDLADAHSLLYCAAMTACRVARVKLPNTDAATRPRPAVPAWQCRIERRIGEARVLIGKLTCFREGNTRPRVMRFVRRAFSGTGIGPREYVSRITERIDFLKQKVCAWANRIRRYRARVDRYSQNNMFQRDQRWVYRSWERPSQTGGEAQRPDDDAMIRFWRNIWSVPVTHSEGDWIRDVEQVCEPIPEMGAITIRPQDVADAVRPLPNWKAPGPDGLHNFWLKWLRSSHACLASLFQSAVESGSLPDFLTTGITHLLHKTNSTTDPKNYRPITCLPTVYKTLTSILRAKIYRHVEGNSIMSASQNGCKSGARGTKELLLIDMAICQQARRNRKDLSTCWIDYKKAYDSVPHTWLMRVLELYKVNTTLRTFLASCMRQWRTVLLYPGSRQTLGDGEPIRIERGIFQGDSLSPLWFCLALNPLSTLLKSSGLGCRLRRGGQVISHLLYMDDLKLFAPTELQLMGLLKVTETFSNSIRMEFGVDKCAVMHVKRGRLVESRSVQLSDSTDLRTLSAIETYKYLGMSQALGINETDMKQSLRERFLGRLRKVLKSLLSGGNRVRAYNGWVMPVLMYSFGILKWTQTELDTLDRTVRTLLTTYRMHHPRSSVMRLYIPRKCGGRGFLNAKTLHNREIYNLREYFLHCGGEMQTDVVAVDNGLTPLSLAKGNWRKPVVLTTGDREAVWQSKELHGRFYRALHGPDVDFSASVAWLRFGDLFGETEGFVCAIMDEVVMTNNYRKYILRDGTIDICRACHRPGESLRHIISGCSRLANGEYLHRHNQVARIIHQQLALKYRLVTSEVPYYRYVPEPVLEDGHITLYWDRSIITDRTIVANKPDIVLIDRTERRAMIVDVTVPHDENLVKAEKDKECKYLDLAHEVVDMWDIDRAIIVPIVVSVHGLMAKSLDKHLKRLTLDGWIKGQMQKAVLLETARIVRKFLSLEP

SEQ ID NO: 11038 - protein, 1196 aa, Furcula furcula
MLTRHKARLRPPDSSPRSASQPLAPSTGGPPAAVASSESDEYFSPPSSPPPVCRRRGRPPRDLGLLGQPAPNRVLVPGGVVRRMKWTLSINENVMRAYYEATEGGTNLTAYRDRMLSLFQTLEPAVNVSAQRLSDQVRAIQRGHMLDDAVLDRLRSEVQGSRVVPCIPSSQAVAPAVNTAPAPRLAATSGDDRDDMSTNISTNVSTQLRSTLEDVVREYRTMPQGLRPRLPRLPMHKRNRALVCALDSLLSSYFDSSEDLADAHSLLYCAAMTACRVARVKFPNSDAATRPRPAVPAWQCRIERRIGEARVLIGKLTCFREGNTRPRVMRFVRRAFSGTGIDPREYFSCVTERIDFLKQKVCAWANRIRRYRARVDRYSQNNMFQRDQRWVYRSWERPSQIGGEVQRPDDDAMIRFWRNIWSVPVTHSEGDWIRDVEQVCEPIPEMGAITIRPQDVADAVRPLPNWKAPGPDGLHNFWLKWLRSSHACLASLFQSAVESGSLPEFLTTGITHLLHKTNSTADPKNYRPITCLPTVYKTLTSILRAKIYRHVEGNSIMSASQNGCRSGARGTKELLLIDMAICQQARRNRRDLSTCWIDYKKAYDSVPHTWLVRVLELYKVNTTLRTFLASCMRQWRTVLLYPGSRQTLGDGEPIRIERGIFQGDSLSPLWFCLALNPLSTLLKSSGLGYRLRRGGQVISHLLYMDDLKLFAPTEVQLMGLLKVTETFSSSIRMEFGVDKCAVMHVKRGRLVESRSIQLSDSTDLRTLSATETYKYLGMSQALGINETDMKQSLRERFLGRLRKVLKSLLSGGNRVRAYNGWVMPVLMYSFGILKWTQTELDTLDRTVRTLLTAYRMHHPRSSVMRLYIPRKCGGRGFLNAKTLHNREIYNLREYFLHCGGEMHTDVVAVDSGLTPLSLAKGNWRRPVVLTTGDREAVWQSKELHGRFYRALHGPDVDFSASVAWLRFGDLFGETEGSVCAIMDEVVMTNNYRKYILRDGTIDICRACHRPGESLRHIISGCSRLANGEYLHRHNQVARIIHQQLALKYRLVTSEVPYYRYVPEPVLEDGHITLYWDRSIITDRSIVANRPDIVLIDRTERRAMIVDVTVPHDENLVKAEKDKECKYLDLAHEVVDLWDIDKAIIVPIVVSAHGLMAKSLDKHLKRLTLDGWIKGQMQKAVLLETARIVRKFLSLEP

SEQ ID NO: 11039 - protein, 973 aa, Furcula furcula
MPQSLRPRLPRLPMHKRNRALVCALDSLLSSYFDSSEDLADAHALLYCAAITACRVARVKFPDAATRPKPAVPAWQCRIERRIGEARVLIGKLTCFREGNMRPRVMRFVRRAFSGTGIDPREYLSRVTERIDFLKQKVCAWANRIRRYRARVDRYSQNNMFQRDQRWVYGSWERPSQIVGEVQRPDDDAMIRFWRNIWSVPVTHSEGDWIGDVEEVCEPLPEMGPITIGPQDVADAVRPLPNSKAPGPDGLHNFWLKCIRSSHICLASLFQSALESGSLPEFMTTGITHLLHKTDSTTNPKNYRPITCLPTVYKTLTSILRAKIYRHVEDNSIMSSSQNGCRSGARGTKELLLIDMAICQQARRNRKDLSTCWIDYKKAFDSVPHTWLMRVLELYKVNTTLRTFLASCMRQWRTVLLYPGSRQTLGNGDPIRIERGIFQGDSLSPLWFCLALNPLSTLLKSSGLGCRLRRGGQVISHLLYMDDLKLFAPTELQLMGLLKVTETFSNSIRMEFGVDKCAVMHVKRGRMVESRSVQLSDSTDLRTLSATETYKYLGMSQALNINETAMKQSLRERFLGRLRKVLKSLLSGGNKVRAYNGWVMPVLMYSFGILKWTQTELDTLDRTVRTLLTTYRMHHPRSSVMRLYIPRKCGGRGFLNAKVLHNREICNLREYFLHCSGEMHTDVVAVDNGLTPLSLAKGNWRKPVVLTTGDREAVWQSKELHGRFYRALHWPDVDFTASVAWLRFGDLFGETEGFVCAIMDEVVMTNNYRRYILRDGTIDICRACHRPGESLRHIISGCSRLANGEYLHRHNQVARIIHQQLALKYRLVTSEVPYYRYAAEPVLEDGHITLYWDRSIITDRTIVANKPDIVLIDRTERRAMIVDITVPHDENLVKAEKDKQCKYLDLAHEVVDMWDIDDAIIVPIVVSAHGLMAKSLDKHLKRLSLDGWIKGQIQKAVLLETARIVRKFLSLEP

SEQ ID NO: 11040 - protein, 1197 aa, Furcula furcula
MLTRSKVAQLRPPDSSPSSASQPPAPSTDGTPPAAVASSESDEYFSPPSSPPPVRRRRGRPPRELGRLGQPAPNRVLAPGGVVRRMKWTSSINESVMRAYYEATEGGTNLTAYRDRMLSLFQVLEPAVNVSAQRLSDQVRAIQRGHMLDDTVLDRLRSVVQGSRVAPCIPSQAVAPVVDTAPAPRLAANSDDDRDDTTTNVSTQYINLLRSTLEDVVREYRTMPQSLRPRLPRLPMHKRNRALVCALDSLLSSYFDSSEDLADAHSLLYCAAMTACRVARVKLPNTDAATRPRPAVPAWQCRIERRIGEARVLIGKLTCFREGNTRPRVMRFVRRAFSGTGIGPREYVSRITERIDFLKQKVCAWANRIRRYRARVDRYSQNNMFQRDQRWVYRSWERPSQTGGEAQRPDDDAMIRFWRNIWSVPVTHSEGDWIRDVEQVCEPIPEMGAITIRPQDVADAVRPLPNWKAPGPDGLHNFWLKWLRSSHACLASLFQSAVESGSLPDFLTTGITHLLHKTNSTTDPKNYRPITCLPTVYKTLTSILRAKIYRHVEGNSIMSASQNGCRSGARDTKELLLIDMAICQQARRNRKDLSTCWIDYKKAYDSVPHTWLMRVLELYKVNTTLRAFLASCMRQWRTVLLYPGSRQTLGDGEPIRIERGIFQGDSLSPLWFCLALNPLSTLLKSSGLGCRLRRGGQVISHLLYMDDLKLFAPTELQLMGLLKVTETFSNSIRMEFGVDKCAVMHVKRGRLVESRSVQLSDSTDLRTLSAIETYKYLGMSQALGINETDMKQSLRERFLGRLRKVLKSLLSGGNRVRAYNGWVMPVLMYSFGILKWTQTELDTLDRTVRTLLTTYRMHHPRSSVMRLYIPRKCGGRGFLNAKTLHNREICNLREYFLHCGGEMQTDVVAVDNGLTPLSLAKGNWRKPVVLTTGDREAVWQSKELHGRFYRALHGPDVDFSASVAWLRFGDLFGETEGFVCAIMDEVVMTNNYRKYILRDGTIDICRACHRPGESLRHIISGCSRLANGEYLHRHNQVARIIHQQLALKYRLVTSEVPYYRYVPEPVLEDGHITLYWDRSIITDRTIVANKPDIVLIDRTERRAMIVDVTVPHDENLVKAEKDKECKYLDLAHEVVDMWDIDRAIIVPIVVSVHGLMAKSLDKHLKRLTLDGWIKGQMQKAVLLETARIVRKFLSLEP

SEQ ID NO: 11041 - protein, 1196 aa, Furcula furcula
MLTRNRAHPRPPDSSPRSASQPLGPSADGSLAAVASSGSDEYFSPPTSPPPVRRRRGRPPRVLGSLEQPAPNRVLAPGGVVRRMRWTSSINENVMRAYYEATERGTNLTAYRLRMLSLFQALEPAVNVSAQRLSDQVRAIQRGHMLDDAVLDRLRSEVQGSRVAPCIPSSQAVAPAVNIVPAPRPATNSDDDRDDMTTDVSTNLNTQLRSTLEDVVREYRTMPLNLRPRLPRLPMHKRNRALVCALDSLLSSYFDSSEDLADAHSLLYCAAMTACRVARVKFPSTDAATRPRPAVPAWQFRIECRIGEARVLIGKLNCFREGNTHPRVMRFVRRAFSGTGIDPREYLSRVTERIDFLKQKVCAWANRIRRYKARVDRYSQNNMFQRDQRWVYRSWERSSQIEGDGRRPDDSAMTTFWRNIWSVPVTHSEGDWMRDVEQTCEPLPEMGAITIRPQDVADAVRPMPNWKAPGPDGLHNFWLKWIRSSHICLASLFQSALESGSLPEFMTMGITHLLHKTSSTTDPKNYRPITCLPTVYKTLTSILRAKIYRHVEDNSIMSASQNGCRSGARGTKELLLIDMAICQQARRNRKDLSTCWIDYKKAYDSVPHTWLMRVLELYKVNPTLRTFLASCMRQWRTVLLYPGSRQILGNGDPIRIERGIFQGDSLSPLWFCLALNPLSTLLRGSGLGCRLRRGGQVISHLLYMDDLKLFAPTELQLMGLLKVTETFSNSISMEFGVDKCAVMHVKRGRMVESRSVQLLDTTDLRTLSATETYKYLGMSQALGINETDMKQSLRERFLGRLRKVLKSLLSGGNRVRAYNGWVMPVLMYSFGILKWTQTELDTLDRTVRTLLTTYRMHHPRSSVMRLYIPRKCGGRGFLNAKTLHNREICNLREYFLHCGGVMHTDVVAVDNGLTPLSLAKGNWRKPVVLTTGNREAVWQSKELHGRFYRALHGPDVDFSASVAWLRFGDLFGETEGFVCAIMDEVVMTNNYRKYILRDGTIDICRACHRPGESLRHIISGCSRLANGEYLHRHNQVARIIHQQLALTYRLVMSEVPYYRYVPEPVLEDGHITLYWDRSIITDRTIVANKPDIVLIDRNERRAMIVDVTVPHDENLVKAEKDKECKYLDLAHEVVDMWDIDRAIIVPIVVSAHGLMAKSLDNHLKRLTLGGWIKGQMQKAVLLETARIVRRFLSLEP

SEQ ID NO: 11042 - protein, 1200 aa, Arctia plantaginis
MITRARSKAQLTSPDSSLRSVLPSTETTTEALAVAEASSSTSSDEFFSPPTSPTPVRRQGRGRPPICLGSRGPLTSNRVPATGGNVRRMKWTNSINENVMRAYYRATEMGTSLTAYRVRLVSLFQELEPAVNVSAQRLSDQVRAIQRCHLLDDAVLEKIRSDIRNSLIVPSSSHTVDLVANSTPQLVSHTNDVDELVEGEVISVSTQYNDRIRSALEDAILEYRYVNWNNRPRLSRLPIHKRNLALVGALDSLLPDYLDNSEDLGDTHSILYCAAVAVCRVAGVNIVENVTTTRPKSTVPAWQCRIERRIAETRVLIGKLISFRSGNTRPRVMRFVKQAFLGTTIGPQQYMSCVTERIDFLKQKIYAWANRIRRYKKRIDRYNQNRMFQRNEKWVYRKWEEPDPCVSHGHLPDENVTHTFWRNIWSVPVTHIEGDWLRDVRRSCESITPMEPVIIDKDDVSCAVRSLPNWKSPGLDGLHNFWLKWFRSSHACLASQFQAALNSGSLPQFLTTGITHLLYKSGSVMDPKNFRPITCLPTMYKLLTSILRLKITLHINNNSIMSVSQNGCRSGSRGTKDLLIIDRAISQQVRRNRKSLATCWIDYKKAYDSVPHTWLLRVLELYKIDTTLCTFLKSCMGQWRTALRYPGCRQTTVIDAPIKIERGIFQGDSLSPLWFCLALNPLSTLLEGSGLGYRLQKDDQVISHLLYMDDLKLLAPTKLQLSALLKVTQNFSNSIKMEFGVDKCAVMYVKKGEIVESEGIELSDSTKLRSLSATETYKYLGISQSLGIPESDMKQTLQERFFGRLKKVLKSLLSGGNKVRACNGWVMPILMYSFGILKWTQTELDALDRSVRTLLTAFRMHHPRSSVMRLYIPRKLGGRGLLNIKTLHNREICNLREYFLHTDVGMHRNVVAVDIGFTPLALAKENWRKPVVFSTNDRREVWKGKELHGRFYRALNGSDIDFKASTTWLRYGDLFGETEGFVCAIMDEVIMTNNYRKYILKDGTVDICRACHRPGESIRHIISGCSRLANGEYLHRHNQVARIVHQQLALKYHLVNLEVPYYRYVPDPVLENGRATLYWDRSIITDRTIVANKPDIVVIDRLERRAIIVDIAVPHDENLLKVEKEKQIKYLDLSHEIVDMWNVDSVIIVPIVVSAHGLIAKSLDQHLKRLTLDGWIKGLIQKAVLLDTARIVRRFLSLQS

SEQ ID NO: 11043 - protein, 1112 aa, Arctia plantaginis
MKWTNSINENVMRAYYRATEMGTNLTAYRVRLVSLFQELEPAVNVSAQRLSDQVRAIQRCHLLDDAVLERIRSDLRNSLIIPSSSHTVDLVATSTPQLVSHTNDVDELVEGEVISVSTQYNDRIRSALEDAILEYRYVNWNNRPRLSRLPIHKRNLALVGALDSLLPDYLDNSEDLGDTHSILYCAAVAVCRVAGVNIVENVTTTRPKSTVPAWQCRIERRIAETRVLIGKLISFRSGNTRPRVMRFVKQAFLGTTIGPQQYMSCVTERIDFLKQKIYAWANRLRRYKKRIDRYNQNRMFQRNEKWVYRKWEEPGPCVSHGHLPDENVTHTFWRNIWSVPVTHIEGDWLRDVRRSCESITPMEPVIIDKDDVSCAVRSLPNWKSPGLDGLHNFWLKWFRSSHACLASQFQAALNSGSLPQFLTTGITHLLYKSGSVMDPKNFRPITCLPTMYKLLTSILRLKITLHINNNSIMSVSQNGCRSGSRGTKDLLIIDRAISQQVRRNRKSLATCWIDYKKAYDSVPHTWLLRVLELYKIDTTLCTFLMSCMGQWRTVLRYPGCRQTTVIDAPIKIERGIFQGDSLSPLWFCLALNPLSTLLEGSGLGYRLQKDDQVISHLLYMDDLKLLAPTKLQLSALLKVTENFSNSIKMEFGVDKCAVMYVKKGEIVESEGIELSDSTTLRSLSAIETYKYLGISQSLGIPESDMKQTLQERFFGRLKKVLKSLLSGGNKVRACNGWVMPILMYSFGILKWTQTELDALDRRVRTLLTAFRMHHPRSSVMRLYIPRKLGGRGLLNIKTLHNREICNLREYFLHTDVGMHRNVVAVDIGFTPLALAKENWRKPVVFSTNDRREVWKGKELHGRFYRALNGSDIDFKASTTWLRYGDLFGETEGFVCAIMDEVIMTNNYRKYILKDGTVDICRACHRPGESIRHIISGCSRLANGEYLHRHNQVARIVHQQLALKYHLVNLEVPYYRYVPDPVLENGRATLYWDRSIITDRTIVANKPDIVVIDRLERRAIIVDIAVPHDENLVKVEKEKQIKYLDLSHEIVDMWNVDSVIIVPIVVSAHGLIAKSLDQHLKRLTLDSWIKGLIQKAVLLDTARIVRRFLSLQS

SEQ ID NO: 11044 - protein, 1104 aa, Mamestra configurata
MRWTQSINENVMRSYFGATEGGTNLTAYRGRMLSLFQVLEPAVNVSAQRLSDQVRVIQRNRMLDDSVLDRLRMEMCGHVITPPSQTVAPPQSQISSHADEESNDRVTNVSTQCNEELRSALECAIREYRYVPPELRPRLPRLPMHNKNRALVAALDSQLSNYFDDCEDLTDTHSIMYCAAVAACRVAHVKMTNDRVTRPKPAVPAWQCRIERRIGGARALIGKLICFREGNTRPRVMRFVRRAFSGTDISPRDYMSRVTERIDFLKQKVYAWANRIRRYRRRVERYTQNRTFRSNERWVYRVWEQPDQGVTDTRLPDDDAMCSFWRNIWSVPVSHTEGDWIREVERACDPLPEMGAITISPQDVARAVRPLPNWKSPGPDGLHNFWIKWLQRSHARLASQYQTALESGSLPEFLTTGVTHLLHKSGSTAEPKNYRPITCLPTVYKVLTSILRAKINNHINSNNIMSVSQNGCRNGSRGTKELLLIDMAISQQVRRSRKDLSTCWIDYKKAYDSVPHTWLMRVLELYKIDTMLRTFLMSCMGQWRTVLRYPGCRNIQRNSEPVRIERGIFQGDSLSPLWFCLALNPLSTLLENSGLGYRLKRGGQVISHLLYMDDLKLFAPSNLQLMELLKVTETFSSAIRMEFGVDKCAVMHVKRGEIMESVGTQLSDSINLRSLSSTETYKYLGMSEALGINVTDMKQSLKERFFGRLKKVFNSLLSGGNKVRAFNGWVMPVLMHSFGVLKWTQTELDALDRRVRTLLTAYRMHHPRSSVMRLYIPRKCGGRGFLNAKTLHNREICSLREYFLAVDVGMHRDVVAVDKGLTPLSLANENWRKPAVLDTNDRRAVWQSKELHGRYFRALHGPDVDQLASVAWLRFGDLFGETEGFVCAIMDEVIMTNNYRRFIVKDGTVDICRACHRPGESIRHIVSGCSRLANGEYLHRHNLVARIIHQQLALKYSLVESEVPYYRYAPDPVLDNGNITLYWDRSIITDRTIVANKPDIVVVDRIERRAMIVDITVPHDENLVKAEKDKQIKYIDLAREVVDMWDVDSAIIVPIVVSANGLIATSLDQHLRRLSLGSWIKGLIQKAVLLDTARIVRRFLSLEP

SEQ ID NO: 11045 - protein, 1200 aa, Mamestra configurata
MLTRSRARAQTAQPTSSGSSLSSASQPPGPAPAVSPEIPVAAVASSSSDEYFSPPTTPPPARRRGRGRPPTSLGPRGPPASDRVPAIGGSVQRMRWTQTINENVMRSYYGATEGGTNLTAYRGRMLSLFQVLEPAVNVSAQRLSDQVRVILRNRMLDDAVLDRLRLESRSGRVSPASPPAAVQIQSSVSPRPNNVGEDDDDGAISVSTQCNERLRSALEDAFREYRSTPPELRPRLPRLPMHNKNRALVCALDSQLTNCFDSSEDLADTHSILYCAAAAACRVAHVKFPNSDRATRPAVPAWQCRIERRIGEARALIGKLICFREGNTRRRVMRFVRRAFSGTDTSPRDYLTRVTERIDFLKQKIYAWANRIRRYKRRVERYTQNRTFQSNERWVYRAWERPDQGVTDTRLPDDDVMCSFWRNIWSVPVSHTEGDWTREVERACDPIPEMGAITISPQDVARAVRPLPNWKSPGPDGLHNFWIKWFKRSHARLASQFQSALESGSLPQFLTTGITHLLHKSGSTAEPKNYRPITCLPTVYKVLTSILRAKINQHIETNSIMSASQNGCRNRSRGTKELLLIDVAISQQVRRSRRDLSTCWIDYKKAYDSVPHTWLMRVLELYKVDAVLRTFLMSCMGQWRTVLRYPGCRQIQANSDPIRIERGIFQGDSLSPLWFCLALNPLSTLLEGSGQGYRLRRGGQVISHLLYMDDLKLFAPNNLQLMKLLKVTETFSSAISMEFGVDKCAVMHVKRGEIMESVGTQLSDSIHLRSLSSTETYKYLGMSEALGINANDVKQSLKERFFGRLNKVLNSLLSGGNKVRAFNGWVMPVLMYSFGILKWTQTELDALDRRVRSLLTANRMHHPRSSVMRLYIPRKCGGRGFLNAKTLHNREICSLREFFLEADVGMHRDVVAVDKGLTALSLANENWRKPVVLDTNDRREVWQSKELHGRFYRVLHGPDVDFLASVAWLRFGDLFGETEGFVCAIMDEVMMTNNYRKYIVKDGTVDICRACHRPGESIRHIISGCSSLANGDYLHRHNLVARIIHQQLALKYNLVESEVPYYRYVPDPVLENGNCTLYWDRSIITDRTIIANKPDIVVIDRLERRAMIVDIAVPHDENLVKTEKDKQTKYLDLAREVVDMWDVNTAVIVPIVVTANGIIAKSLDQHLKRLSLGSWVKGLIQKAVLLDTARIVRRFLSQGP

SEQ ID NO: 11046 - protein, 1193 aa, Heliothis virescens
MLTRSRTRARPPPPGSSLSSASPPPDSGSPVSPAAAAASSSSDEYFSPPTSPPPVRRRAGHRPPDGMGSRGPQASDRVSAPGGRASRIRWTQEINESVMRAYYGATEGEANLTAYRSRMLSLFQVLEPTLNVSAQRLSDQVRVILRDHRLDNAVLDRLRSEMRSSCVVSSPPHPDAPEPVVPPRINDMVDRGDDGAIVAGTQCNEILRSTLEDAIAEYRTMSPEQRPRLPRLPMHKKNQALMGSLDSLLSILFESSENLADTHSILYCGAVAACRLANVKFPNVTTTRPKTAPAWQCRIQRRIDEARVLIGKLTCFREGNTRPRVMRFVRRAFTGLDINPSEYLARVTERIDFLKQNICAWAGRIRRYKRRMDRYNLNRAFQRDQRRVYRAWERPDCGVDDRCLPDNNTMNAFWRNIWSVPVGHTEGDWTVEVQRACEPIPEMEPVHISTEDVSCAVHPMPNWKSPGPDGLHNYWIKWFRSSHARLALQFQAALESGSLPAFLTTGITHLLYKSGSATEPKNYRPITCLPTVYKILTSILRAKMYHHIETHSIMSASQNGCRNGSRGTKELLLIDMAINQQVRRSRKNLSTCWIDYKKAYDSVPHAWLLRVLELYKIDATLRAFLKSCMGQWKTALYYPGCGQICGNGELIRIERGIFQGDSLSPLWFCLALNPLSTLLEGSGLGFKLRRGGQVISHLLYMDDLKLFAHNRLQLMELLKITKVFSEAIRMEFGVDKCAVMYVERGEIVESLGTQLTDSINFRSLSSTETYKYLGMSEALGINLTDMKQSLKERFFGRLKKVLNSLLAGGNKVRAFNGWVMPVLMYSFGILKWTQTELDALDRKVRTLLTAYRMHHPRSSVMRLYIPRKCGGRGFLNAKTLHNREVCNLREFFLKADVGMHRDVVAVDKGLTPLSLQVENWRKPVIMDTNDRKRIWQSKVLHGRFYQALHGPDIDFKASVTWLPTGDLFGETEGFVCAIMDEVMMTNNYRKYVVKDGTVDICRACRRPGESIRHIISGCSHLANGEYLHRHNLVARIIHQQLALKYKLVEQEVPYYRYVPDPVLENGHVTLYWDRSIITDRTVMANKPDIVVIDRLERRAVIVDITVPHDENLVKAEKDKQLKYLDLAHEVVNIWHVDSAIIVPIVVSANGLIAKSLDSHLKRLALDGWIKRLMQKAVLLDTARIVRRFLSMEP

SEQ ID NO: 11047 - protein, 868 aa, Amphipyra berbera
MRFVRRAFSGTDINPRDYLSRVTERIDFLKQKVYAWANRIRRYKRRVERYTQNRMFHSDERWVYRTWERPDHDVSDTHLPDNDVMNTFWRNIWSMPVTHTEGDWMQEVQRECEPIEEMGDITIVPQDVTSAVRPMANWKSPGPDGLHNFWLKWLRSSHARLASQFQSSLASGSLPEFLTTGVTHLLHKSGSTAEPKNYRPITCLPTVYKLLTSILRAKINSHIINNSIMSVSQNGCKNGSRGTKELLLIDMAISQQVRRSRKDLSTCWIDYKKAYDSVPHTWLMRVLELYKVNTTLCAFLTSCMGQWRTVLHYPGCRQIQGRGEPIRIERGIFQGDSLSPLWFCLALNPLSTLLEGSGLGYRLRRGGQVISHLLYMDDLKLFASNNLQLMKLLKVTETFSNSIRMEFGVDKCAVMHVKRGGIMESVGTQLSDSTHLRSLSSTETYKYLGMSEALGINETDMKQSLRERFYGRLKKVLKSLLSGGNKVRAFNGWVMPVLMYSFGILKWTQTELDALDRRVRTLLTAYRMHHPRSSVMRLYIPRKCGGRGFLNAKTLHNREVCSLREYFLQADVGMHRDVVAVDKGFTPLSLAKENWRKPVVLDTNGCREVWQSKELHGRFYRALHGPDVDFLASVAWLRFGDLFGETEGFVCAIMDEVMMTNNYRKYIVKDGTVDICRACHCPGESIRHIISGCSRLANGEYLHRHNLVARIIHQQLALKYNLVDAEVPYYKYVPDPVLENGHITLYWDRSIFTDRTIVANKPDIVVIDRTERLTMIVDITVPHDENLVKAEKDKEIKYQDLAHEVVDMWEIDSAVIVPIVVTANGLIAKSLDHHLTRLSLGSWVKGLIQKAVLLDTARIVRKFLSLRP

SEQ ID NO: 11048 - protein, 962 aa, Amphipyra berbera
MNKKNRALMCALDSLLSSYFDNSEGLEDTHSILYCAAVAACRVAHAKFDNNDRDTRPKPAVPAWQCRVERRINEARALIGKLICFREGNTRPRVMRFVRRAFSGTDINPRDYMSRITERIDFLKQKVYAWANRIRRYKRRVERYTQNRMFHSDERRVYRTWERPDHDVSDTHLPDSDVMNTFWRNIWSMPVTHTEGDWMQEVQRACEPIEEMGDVTIVPQDVTSAVRPMSNWKSPGPDGLHNFWLKWLRSSHARLASQFQSSLESGSLPQFLTTGVTHLLHKSGSTAEPKNYRPITCLPTVYKLLTSILRSKISTHITNNFIMSTSQNGCKNGSRGTKELLLIDMTISQQVRRSRKDLSTCWIDYKKAYDSVPHTWLMRVLELYKVNTTLCAFLTSCMGQWRTVLHYPGCRQIQGRGEPIRIKRGIFQGDSLSPLWFCLALNPLSTLLEGSGLGYRLRRGGQVISHLLYMDDLKLFAPNNLQLVKLLKVTETFSNSIRMEFGVDKCAVMHVKRRGIMESVGTQLSDSIHLRSLSSTETYKYLGMSEALGINVADMKQSLRERFYGRLKKVLKSLLSGGNKVRAFNGWVMPVLMYSFGILKWTQTELDALDRRVRTLLTAYRMHHPRSSVMRLYIPRKCGGRGFLNAKTLHNREVCNLREYFLQADVGMHRDVVAVDKGFTPLSLAKENWRKPVVLDTTGRRDVWQSKELHGRFYRALHGPDVDFLASVAWLRFGDLFGETEGFVCAIMDEVIMTNNYRKYIVKDGTVDICRACHCPGESIRHIISGCSRLANGEYLHRHNLVARIIHQQLALKYNLVDAEVPYYKYVPDPVLENGHITLYWDRSIITDRTIIANKPDIVVIDRSERLTMIVDITVPHDENLVKAEKDKEIKYQDLAHEVVDMWEVDSAVIVPIVVTANGLIAKSLDQHLMRLSLGSWVKGLIQKAVLLDTARIVRKFLSLRP

SEQ ID NO: 11049 - protein, 1208 aa, Amphipyra berbera
MLTRSRTKTQDTRTRPRPSASSLSSASQPPDSSIVSDVTPAAAVASSSSDEFYSPPTSPPPPPRRGRRGRGRPPACMGPRGPPASDRVPAPGGSVQRMRWTLTMNENCMRAYFGATEGGTNLTAYRGRMLSLFQVLEPTVNVSAQRLSDQVRVIQRDHRLTDAALDRLRSEVQSNRIISLQSQTAAQPQTPTVVPPLPIHADEESDDRVTNVSTQCNEQLRSALELAIREYRFTPPNIRPRIPRLPMHRKNRALMCALDSLLSSYFDNSENLEDTHSILYCAAVAACRVAHAKFDNNDRATRPKPAVPAWQCRIERRINEARALIGKLICFREGNTRPRVMRFVRRAFSGTDINPRDYLSRVTERIDFLKQKVYAWANRIRRYKRRVERYTQNRMFHSDERWVYRTWERPDHDVSDTHLPDNDVMNTFWRNIWSMPVTHAEGDWMQEVQRACEPIEEMGDITIVPQDVTSAVRPMANWKSPGPDGLHNFWLKWLRSSHARLASQFQSSLESGSLPEFLTTGVTHLLHKSGSTAEPKNYRPITCLPTVYKLLTSILRAKINSHIINNSIMSVSQNGCKNGSRGTKELLLIDMAISQQVRRSRKDLSTCWIDYKKAYDSVPHTWLMRVLELYKVNTTLCAFLTSCMGQWRTVLHYPGCRQIQGRGEPIRIERGIFQGDSLSPLWFCLALNPLSTLLEGSGLGYRLRRGGQVISHLLYMDDLKLFAPNNLQLMKLLKVTETFSNSIRMEFGVDKCAVMHVKRGGIMESVGTQLSDSIHLRPLSSTETYKYLGMSEALGINETDMKQSLRERFYGRLKKVLKSLLSGGNKVRAFNGWVMPVLMYSFGILKWTQTELDALDRRVRTLLTAYRMHHPRSSVMRLYIPRKCGGRGFLNAKTLHNREVCSLREYFLQADVGMHRDVVAVDKGFTPLSLAKENWRKPVVLDTNGRREVWQSKELHGRFYRALYGTDVDFLASVAWLRFGDLFGETEGFVCAIMDEVMMTNNYRKYIVKDGTVDICRACHCPGESIRHIISGCSRLANGEYLHRHNLVARIIHQQLALKYNLVDAEVPYYKYVPDPVLENGHITLYWDRSIITDRTIVANKPDIVVIDRSERLTMIVDITVPHDENLVKAEKDKEIKYQDLAHEVVDMWEVDSAVIVPIVVTANGLIAKSLDQHLTRLALGSWVKGLIQKAVLLDTARIVRKFLSLRP

SEQ ID NO: 11050 - protein, 1111 aa, Amphipyra berbera
MRWTLTMNENCMRAYFGATEGGTNLTAYRGRMLSLFQVLEPTVNVSAQRLSDQVRVIQRDHRLTDAALDRLRSEVQSNRIISLQSQTAAQPQAPTVVPPLPIHADEESDDRVTNVSTQCNDQLRSALELAIREYRFTPPNIRPRIPRLPMHRKNRALMCALDSLLSSYFDNSENLEDTHSILYCAAVAACRVAHAKFDNNDRATRPKPAVPAWQCRIERRINEARALIGKLICFREGNTRPRVMRFVRRAFSGTDINPRDYLSRVTERIDFLKQKVYAWANRIRRYKRRVERYTQNRMFHSDERWVYRTWERPDHDVSDTHLPDNDVMNTFWRNIWSMPVTHIEGDWMQEVQRACEPIEEMGDITIVPQDVTSAVRPMANWKSPGPDGLHNFWLKWLRSSHARLASQFQSSLESGSFPEFLTTGVTHLLHKSGSTAEPKNYRPITCLPTVYKLLTSILRAKINSHIINNSIMSVSQNGCKNGSRGTKELLLIDMAISQQVRRSRKDLSTCWIDYKKAYDSVPHTWLMRVLELYKVNTTLCAFLASCMGQWRTVLHYPGCRQIQGRGEPIRIERGIFQGDSLSPLWFCLALNPLSTLLEGSGLGYRLRRGGQVISHLLYMDDLKLFAPNNLQLVKLLKVTETFSNSIRMEFGVDKCAVMHVKRGGIMESVGTQLSDSIHLRSLSSTETYKYLGMSEALGINETDMKQSLRERFYGRLKKVLKSLLSGGNKVRAFNGWVMPVLMYSFGILKWTQTELDALDRRVRTLLTAYRMHHPRSSVMRLYIPRKCGGRGFLNAKTLHNREVCSLREYFLHADVGMHRDVVAVDKGFTPLSLAKENWRKPVVLDTNGRREVWQSKELHGRFYRALHGPDVDFLASVAWLRFGDLFGETEGFVCAIVDEVILTNNYRKYIVKDGTVDICRACHCPGESIRHIISGCSRLANGEYLHRHNLVARIIHQQLALKYNLVDAEVPYYKYMPDPVLENGHITLYWDRSIITDRTIVANKPDIVVIDRSERLAMIVDITVPHDENLVKAEKDKEIKYQDLAHEVVDIWEVDSAVIVPIVVTANGLIAKSLDQHLTRLALGSWIKGLIQKAVLLDTARIVRRFLSLRP

SEQ ID NO: 11051 - protein, 1111 aa, Amphipyra berbera
MRWTPTMNENCMRAYFGATEGGTNLTAYRGRMLSLFQVLEPAVNVSAQRLSDQVRVIQRDHRLTDDALDRLRSEVQSNCIISLQSQTAAQPQVPPMVPPQPIRADEESDDRVTIVSAQCNEQLRSALELAIREYRFTPPNLRPRIPRLPMNRQNRALMCALDSLLSNYFDNSEGLEDTHSILYCAAVAACRVAHVKFDNNDRATRPKPAVPAWQCRIERRINEARALIGKLICFREGNTRPRVMRFVRRAFSGTDINPREYMSRVTERIDFLKQKIYAWANRIRRYKRRVERYTQNRMFHSDERWVYRTWERPEHDVSDTHLPDNDVMNTFWRNIWSMPVTHTEGDWMQEVQRACEPIEEMGDIIIVPQDVTSAVRPMANWKSPGPDGLHNFWLKWLRSSHARLASQFQSSLESGSLPPFLTTGITHLLHKSGSTAEPKNYRPITCLPTIYKLLTSILRAKINTHIINNSIMSASQNGCKNGSRGTKELLLIDMAISQQVRRSRKDLSTCWIDYKKAYDSVPHTWLMRVLELYKVNTTLCAFLTSCMGQWRTVLHYPGCRQIQGRGEPIRIERGIFQGDSLSPLWFCLALNPLSTLLEGSGLGYRLRRGGQVISHLLYMDDLKLFAPNNLQLMKLLKVTETFSNSIRMEFGVDKCAVMHVKRGGIMESVGTQLSDSIHLRSLSSTETYKYLGMSEALGINETDMKQSLRERFYGRLKKVLKSLLSGGNKVRAFNGWVMPVLMYSFGILKWTQTELDALDRRVRTLLTAYRMHHPRSSVMRLYIPRKCGGRGFLNAKTLHNREVCSLREYFLQADVGMHRDVVAVDKGFTPLSLAKENWRKPVVLDTNGRREVWQSKELHGRFYRALHGPDVDFLASVAWLRFSDLFGETEGFVCAIMDEVMMTNNYRKYIVKDGTVDICRACHCPGESIRHIISGCSRLANGEYLHRHNLVARIIHQQLALKYNLVDAEVPYYKYVPDPVLENGHITLYWDRSIITDRTIVANKPDIVVIDRTERLTMIVDITVPHDENLVKAEKDKEIKYQDLAHEVVDMWEVDSAVIVPIVVTANGLIAKSLDHHLTRLSLGSWVKGLIQKAVLLDTARIVRKFLSLRP

SEQ ID NO: 11052 - protein, 1080 aa, Amphipyra berbera
MLSLFQVLEPTVNVSAQRLSDQVRVIQRDHRLTDAALDRLRSEVQSNRIISLQSQTAAQPQTPTVVQPLPTHADEESDDRVTNVSTQCNEQLRSALELAIREYRFTPPNIRPRIPRLPMHRKNRALMCALDSLLSSYFDNSENLEDTHSILYCAAVAACRVAHAKFDNNDRATRPKPAVPAWQCRIERRINEARALIGKLICFREGNTRPRVMRFVRRAFSGTDINPRDYLSRVTERIDFLKQKVYAWANRIRRYKRRVERYTQNRMFHSDERWVYRTWERPNHDVSDAYPPDNDVMNTFWRNIWSMPVTHTEDDWMQEVQRACEPIKEMGDITIVPQDVTSAVRPMANWKSPGPDGLHNFWIKWLRSSHARLASQFQSSLESGSLPEFLTTGVTHLLHKSGSTAEPKNYRPITCLPTVYKLLTSILRAKINSHILYNSIMSVSQNGCKNGSRGTKELLLIDMAISQQVRRSRKDLSTCWIDYKKAYDSVPHTWLMRVLELYKVNTTLCAFLTSCMGQWRTVLHYPGCRQIQGRGEPIRIERGIFQGDSLSPLWFGLALNPLSTLLEGSGLGYRLRRGGQVISHLLYMDDLKLFAPNNLQLMKLLKVTETFSNSIRMEFGVDKCAVMHVKRGGIMESVGTQLSDSIHLRSLSSTETYKYLGMSQAFGINETDMKQSLRERFYGRLKKVLKSLLSGGNKVRAFNGWVMPVLMYSFGILKWTQTELDALDRRVRTLLTAYRMHHPRSSVMRLYIPRKCGGRGFLNAKTLHNREVCSLREYFLQADVGMHRDVVAVDKGFTPLSLAKENWRKPVVLDTNGRREVWQSKELQGRFYRALHGPDVDFLASVAWLRFGDLFGETEGFVCAIMDEVMMTNNYRKYIVKDGTVDICRACHCPGESIRHIISGCSRLANGEYLHRHNLVARIIHQQLALKYNLVDAEVPYYKYVPDPVLENGHITLYWDRSIITDRTIVANKPDIVVIDRTERLTMIVDITVPHDENLVKAEKDKEIKYQDLAHEVVDMWEVDSAVIVPIVVTANGLIAKSLDHHLTRLSLGSWVKGLIQKAVLLDTARIVRKFLSLRP

SEQ ID NO: 11053 - protein, 1210 aa, Amphipyra berbera
MTAMLTRSRAKAITQSTRPRSSAPSLSSVSQPPDSSIVSDVTPAAAVASSSSDEFFSPPTSPLPPPARRRGRGRLPASIGPRGPPASDRVPAPGGSVQRMRWTLTMNENCMRAYFGATEGGTNLTAYRGRMLSLFQVLEPTVNVSAQRLSDQVRVIQRDHRLTDAALDRLRSEVQSNRIISLQSQTAAQPQAPTVVPPLPIHADEESDDRVTNVSTQCNDQLRSALELAIREYRFTPPNIRPRIPRLPMHRKNRALMCALDSLLSSYFDNSENLEDTHSILYCAAVAACRVAHAKFDNNDRATRPKPAVPAWQCRIERRINEARALIGKLICFREGNTRPRVMRFVRRAFSGTDINPRDYLSRVTERIDFLKQKVYAWANRIRRYKRRVERYTQNRMFHSDERWVYRTWERPDHDVSDTHLPDNDVMNTFWRNIWSMPVTHIEGDWMQEVQRACEPIEEMGDITIVPQDVTSAVRPMANWKSPGPDGLHNFWLKWLRSSHARLASQFQSSLESGSFPEFLTTGVTHLLHKSGSTAEPKNYRPITCLPTVYKLLTSILRAKINSHIINNSIMSVSQNGCKNGSRGTKELLLIDMAISQQVRRSRKDLSTCWIDYKKAYDSVPHTWLMRVLELYKVNTTLCAFLTSCMGQWRTVLHYPGCRQIQGRGEPIRIERGIFQGDSLSPLWFCLALNPLSTLLEGSGLGYRLRRGGQVISHLLYMDDLKLFAPNNLQLVKLLKVTETFSNSIRMEFGVDKCAVMHVKRGGIMESVGTQLSDSIHLRSLSSTETYKYLGMSEALGINETDMKQSLRERFYGRLKKVLKSLLSGGNKVRAFNGWVMPVLMYSFGILKWTQTELDALDRRVRTLLTAYRMHHPRSSVMRLYIPRKCGGRGFLNAKTLHNREVCSLREYFLHADVGMHRDVVAVDKGFTPLSLAKENWRKPVVLDTNGRREVWQSKELHGRFYRALHGPDVDFLASVAWLRFGDLFGETEGFVCAIMDEVILTNNYRKYIVKDGTVDICRACHCPGESIRHIISGCSRLANGEYLHRHNLVARIIHQQLALKYNLVDAEVPYYKYVPDPVLENGHITLYWDRSIITDRTIVANKPDIVVIDRSERLAMIVDITVPHDENLVKAEKDKEIKYQDLAHEVVDMWEVDSAVIVPIVVTANGLIAKSLDQHLTRLALGSWIKGLIQKAVLLDTARIVRRFLSLRP

SEQ ID NO: 11054 - protein, 1207 aa, Amphipyra berbera
MLTRSRAKALSETTRPRSSAPSLSSASQPPDSSIVSDVTPAAAVASSSSDEFFSPPTSPLPPPARRRGRGRPPASIGPRGPPASDRVPAPGGSVQRMRWTLTMNENCMRAYFGATEGGTNLTAYRGRMLSLFQVLEPTVNVSAQRLSDQVRVIQRDHRLTDAALDRLRSEVQSNRIISLQSQTAAQPQTPTVVPPLPIHADEESDDRVTNVSTQCNEQLRSALELAIREYRFTPPNIRPRIPRLPMHRKNRALMCALDSLLSSYFDNSENLEDTHSILYCAAVAACRVAHAKFDNNDRATRPKPAVPAWQCRIERRINEARALIGKLICFREGNTRPRVMRFVRRAFSGTDINPRDYLSRVTERIDFLKQKVYAWANRIRRYKRRVERYTQNRMFHSDERWVYRTWERPDHDVSDTHLPDNDVMNTFWRNIWSMPVTHTEGDWMQEVQRACEPIEEMGDITIVPQDVTSAVRPMANWKSPGPDGLHNFWLKWLRSSHARLASQFQSSLESGSLPEFLTTGVTHLLHKSGSTAEPKNYRPITCLPTVYKLLTSILRAKMNSHIINNSIMSVSQNGCKNGSRGTKELLLIDMAISQQVRRSRKDLSTCWIDYKKAYDSVPHTWLMRVLELYKVNTTLCAFLTSCMGQWRTVLHYPGCRQIQGRGEPIRIERGIFQGDSLSPLWFCLALNPLSTLLEGSGLGYRLRRGGQVISHLLYMDDLKLFAPNNLQLMKLLKVTETFSNSIRMEFGVDKCAVMHVKRGGIMESVGTQLSDSIHLRSLSSTETYKYLGMSEALGINETDMKQSLRERFYGRLKKVLKSLLSGGNKVRAFNGWVMPVLMYSFGILKWTQTELDALDRRVRTLLTAYRMHHPRSSVMRLYIPRKCGGRGFLNAKTLHNREVCSLREYFLQADVGMHRDVVAVDKGFTPLSLAKENWRKPVVLDTNGRREVWQSKELHGRFYRALHGPDVDFLASVAWLRFGDLFGETEGFVCAIMDEVMMTNNYRKYIVKDGTVDICRACHCPGESIRHIISGCSRLANGEYLHRHNLVARIIHQQLALKYNLVDAEVPYYKYVPDPVLENGHITLYWDRSIITDRTIVANKPDIVVIDRTERLTMIVDITVPHDENLVKAEKDKEIKYQDLAHEVVDMWEVDSAVIVPIVVTANGLIAKSLDHHLTRLSLGSWVKGLIQKAVLLDTARIVRKFLSLRP

SEQ ID NO: 11055 - protein, 1045 aa, Noctua janthe
MLDDTVLDRLRTEMQSSHVIATPPQTVVPPQSTIIPTHDNNVSNDMVTNVSPQCNEEMRCALEGAIREYRFMQPDLRPRVPRLPMHNKNRVLVAVLDSQLSNYFDNCEDLTDAHSVLYCAAVAACRVAHVKFPDDRATRPKPAVPSWQYRIERRIGEARALIGKLICFREGNTRPRVMRFVRRAFSGTDISARDYMSRVTERIDFLKQKVYAWANRIRRYKRRVDRYTQNRTFQRDESWVYRAWERPDRGVADTRLPDDDAMCSFWRSIWSVPVSHTEGEWTRRVERACDLVPEMGAINISPQDVVRAVRPLPNWKSPGPDGLHNFWIKWFTRSHARLAVLFQSALESGSLPEFLTTGITHLLHKSGSTAEPKNYRPITCLPTVYKVLTSILRAKINKHIDDNSVMSASQNGCRNGSRGTKELLLIDMAISQQVRRSRKDLSTCWIDYKKAYDSVPHTWLMRVLELYKIDATLRTFLMSCMGQWRTVLRYPGCRQIQRNSEPIRIERGIFQGDSLSPLWFCLALNPLSTLLEDSGLGYRLRRGGQVISHLLYMDDLKLFAPNDLQLMELLKVTETFSSAIRMEFGVDKCAVMHVKRGEIVESVGTQLSDSINLRSLSATETYKYLGMSEALGINVADMKQSLKERFFGRLKKVFNSLLSGGNKVRAFNGWVMPVLMYSFGILKWTQTELDALDRRVRTLLTAYRMHHPRSSVMRLYIPRRCGGRGFLNAKTLHNREICSLREYFLETEVGMHRDVVAVDKGLTPLSLAKENWRKPVVLDTNDRMEVWQSKELHGRFFRALHGPDVDLSASVAWLRSGDLFGETEGFVCAIMDEVMMTNNYRRFIVKDGTVDICRACHRPGESIRHIISGCSRLANGEYLHRHNLVARIIHQQLALKYNLVESEVPYYKYVPDPVLENGSITLYWDRSIITDRTIVANKPDIVVVDRSERRAMIVDITVPHDENLVKAEKDKQIKYLDLAREVVDMWDVDSAIIVPIVVSAHGLIAKSLDQYLRRLSLGSWIKGLIQKAVLLDTARIVRRFLSLEP

SEQ ID NO: 11056 - protein, 1197 aa, Noctua janthe
MLTRSAARRARLSPPDPSLSSASPPPESSPVVSAVTPAVAVASSSSDEYFSPPTTPPPVRRRGGRRPPDGLGPRGPPASDRVPAPGGSVPRMRWTQSINANVMRAYYGATEGGNNLTAYRVRMLSLFQVLEPAVNVSAQRLSDQVRVIQRNGMLDDTVLDRLRTEMQSSHVIATPPQTVVPPQSTIIPTHDNNVSNDMVTNVSTQCNEEMRCALEGAIREYRFMQPDLRPRVPRLPMHNKNRVLVAVLDSQLSNYFDNCVDLTDAHSVLYCAAVAACRVAHVKFSDDRATRPKPAVPSWQYRIERRIGEARALIGKLICFREGNTRPRVMRFVRRAFSGTDISARDYMSRVTERIDFLKQKVYAWANRIRRYKWRVDRYTQNRTFQRDERWVYRAWERPDQGVADTRLPDDDAMCSFWRSIWSVPVSHTEGEWTREVERACDLVPEMGAITISPQDVVRAVRPLPNWKSPGPDGLHNFWIKWFTKSHARLAILFQSALESGSLPKFLTTGITHLLHKSGSTAEPKNYRPITCLPTVYKVLTSILRAKINKHIDDNSVMSASQNGCRNGSRGTKELLLIDMAISQQVRRSRKDLSTCWIDYKKAYDSVPHTWLMRVLELYKIDATLRTFLMSCMGQWRTVLRYPGCRQIQRNSEPIRIERGIFQGDSLSPLWFCLALNALSTLLEDSGLGYRLRRGGQVISHLLYMDDLKLFAPNDLQLMELLKVTETFSSAIRMEFGVDKCAVMHVKRGEIVESVGTQLSDSINLRSLSATETYKYLGMSEALGINVADMKQSLKERFFGRLKKVFNSLLSGGNKVRAFNGWVMPVLMYSFGILKWTQTELDALDRRVRTLLTAYRMHHPRSSVMRLYIPRRCGGRGFLNAKTLYNREICSLREYFLETDVGMHRDVVAVDKGLTPLSLAKENWRKPVVLDTNDRMEVWQSKELHGRFFRALHGPDVDLSASVAWLRSGDLFGETEGFVCAIMDEVMMTNNYRRFIVKDGTVDICRACHRPGESIRHIISGCSRLANGEYLHRHNLVARIIHQQLALKYKLVESEVPYYKYVPDPVLENGSITLYWDRSIITDRTIVANKPDIVVVDRSERRAMIVDITVPHDENLVKAEKDKQIKYLDLAREVVDMWDVDSAIIVPIVVSAHGLIAKSLDQYLRRLSLGSWIKGLIQKAVLLDTARIVRRFLSLEP

SEQ ID NO: 11057 - protein, 1197 aa, Noctua janthe
MLTRSATRRARLSPPDPSLSSASPPPESSPIVSAVTPAVTVASSSSDEYFSPPTTPPPVRRRGGRRPPDGLGPRGPPASDRVPAPGGSVPRMRWTQSINANIMRAYYGATEGGNNLTAYRVRMLSLFQVLEPAVNVSAQRLSDQVRVIQRNGMLDDTVLDRLRTEMQSSHVIATPPQTVVPPQSTIIPTHDNNVSNDMVTNVSTQCNEEMRCALEGAIREYRFMQPDLRPRVPRLPMHNKNKVLVAVLDSQLSNYFDNCENLTDAHSVLYCAAVAACRVAHVKFSDDRATRPKPAVPSWQYRIERRIGEARALIGKLICFREGNTRPRVMRFVRRAFSGTDISARDYMSRVTERIDFLKQKVYAWANRIRRYKRRVDRYTQNRTFQRDERWVYRAWERPDQGVADTHLPDDDTMCSFWRSIWSVPVSHTEGEWTREVERACDLVPEMGAITISPQDVVRAVRPLPNWKSPGPDGLHNFWIKWFTRSHARLAILFQSALESGSLPEFLTTGITHLLHKSGSTAEPKNYRPIACLPTVYKVLTSILRAKINKHIDDNSVMSASQNGYRNGSRGTKELLLIDMAISQQVRRSRRDLSTCWIDYKKAYDSVPHTWLMRVLELYKVDSTLRIFLMSCMGQWRTVLRYPGCRQIQRNSEPIRIERGIFQGDSLSPLWFCLALNPLSTLLEDSGLGYRLRRGGQVISHLLYMDDLKLFAPNDLQLMELLKVTETFSSAIRMEFGVDKCAVMHVKRGEIVESVGTQLSDSINLRSLSATETYKYLGMSEALGINVADMKQSLKERFFGRLKKVFNSLLSGGNKVRAFNGWVMPVLMYSFGILKWTQTELDALDRRVRTLLTTYRMHHPRSSVMRLYIPRRCGGRGFLNAKTLHNREICSLREYFLETDVGMHRDVVAVDKGLTPLSLAKENWRKPVVLDTNDRMEVWQSKELHGRFFRALHGPDVDLPASVAWLRSGDLFGETEGFVCAIMDEVMMTNNYRRFIVKDGTVDICRACHRPGESIRHIISGCSRLANGEYLHRHNLVARIIHQQLALKYNLVESEVPYYKYVPDPVLENGNITLYWDRSIVTDRTIVANKPDIVVVDRSERRAMIVDITVPHDGNLVKAEKDKQIKYLDLAHEVVDMWDVDSAIIVPIVVSAHGLIAKSLDQYLRRLSLGSWIKGLIQKAVLLDTARIVRRFLSLEH

SEQ ID NO: 11058 - protein, 1197 aa, Noctua janthe
MLTRSATRRARLSPPDPSLSSASPPPESSPIVSAVTPAVAVASSSSDEYFSPPTTPPPVRRRGGRRPPDGLGPRGPPASDRVPAPGGSVPRMRWTQSINANVMRAYYGATEGGNNLTAYRVRMLSLFQVLEPAVNVSAQRLSDQVRVIQRNGMLDDTVLDRLRTEMQSSHVIATPPQTVVPPQSTIIPTHDNNVSNDMVTNVSTQCNEEMRCALEGAIREYRFMQPDLRPRVPRLPMHNKNKVLVAVLDSQLSNYFDNCENLTDAHSVLYCAAVAACRVAHVKFSDDRATRPKPTVPSWQYRIERRIGEARALIGKLICFREGNTRPRVMRFVRRAFSGTDISARDYMSRVTERIDFLKQKVYAWANRIRRYKRRVDRYTQNRTFQRDERWVYRAWERPDQGVADTHLPDDDAMCSFWRSIWSVPVSHTEGEWTREVERACDLVPEMGAITISPQDVVRAVRPLPNWKSPGPDGLHNFWIKWFTRSHARLAILFQSALESGSLPEFLTTGITHLLHKSGSTAEPKNYRPIACLPTVYKVLTSILRAKINKHIDDNSVMSASQNGCRNGSRGTKELLLIDMAISQQVRRSRRDLSTCWIDYKKAYDSVPHTWLMRVLELYKVDSTLRIFLMSCMGQWRTVLRYPGCRQIQRNSEPIRIERGIFQGDSLSPLWFCLALNPLSTLLEDSGLGYRLRSGGQVISHLLYMDDLKLFAPNDLQLMELLKVTETFSSAIRMEFGVDKCAVMHVKRGEIVESVGTQLSDSINLRSLSATETYKYLGMSEALGINVADMKQSLRERFFGRLKKVFNSLLSGGNKVRAFNGWVMPVLMYSFGILKWTQTELDALDRRVRTLLTAYRMHHPRSSVMRLYIPRRCGGRGFLNAKTLHNREIYSLREYFLETDVGMHRDVVAVDKGLTPLSLAKENWRKPVVLDTNDRMEVWQSKELHGRFFRALHGPDVDLPASVAWLRSGDLFGETEGFVCAIMDEVMMTNNYRRFIVKDGTVDICRACHRPGESIRHIISGCSRLANGEYLHRHNLVARIIHQQLALKYNLVESEVPYYKYVPDPVLENGNITLYWDRSIVTDRTIVANKPDIVVVDRSERRAMIVDITVPHDGNLVKAEKDKQIKYLDLAHEVVDMWDVDSAIIVPIVVSAHGLIAKSLDQYLRRLSLGSWIKGLIQKAVLLDTARIVRRFLSLEP

SEQ ID NO: 11059 - protein, 1200 aa, Mythimna ferrago
MLTRSRARSQIAQPTSSGSSLSSASQPPGPAPAVSPEIPVAAVASSSSDEYFSPPTTPPPARRRGRGRPPACLGPRGPPASDGVLAAGGSVQRMRWTQSINENVMRSYFGATEGGTNLTAYRGRMLSLFQVLEPAVNVSAQRLSDQVRVIQRNRMLDDAVLDRLRLESRNGRVSPISPPAAVQRQPSVSPRPDHVGEDDDDEAISVSTQCNARLRSALEDAFREYRSIPPELRPRLPRLPMHRKNRALVCALDSQLSNCFDSSEDLSDTHSILYCAAAAACRVAHVKIPNNDRATRPAKPAWQCRIERRIGETRALIGKLICFREGNTRPRVMRFVRRAFSGTDISPRDYLPRITERIDFLKQKVYAWANRIRRYKRRVERYTQNHTFQSNERWVYRAWERPDQSVIDTRLPDDDAMYSFWRSIWSVPVNHTEGDWTREIERECELIPEMGAINISPQDVACAVRPLPNWKSPGPDGLHNFWLKWFQSSHARLASQFQSALESGSLPQFLTTGITHLLHKSGSTAEPKNYRPITCLPTVYKVLTSILRAKINNHIETNSIMSASQNGCRNGSRGTKELLLIDVAISQQVRRSRRDLSTCWIDYKKAYDSVPHTWLMRVLELYKVDATLRAFLMSCMGQWRTVLHYPGCRRVSENSEPLRIERGIFQGDSLSPLWFCLALNPLSTLLEGSGLGYRLRREGQVISHLLYMDDLKLLASNNLQLMELLKVTETFSSAIRMEFGLDKCAVMHVKRGEIMESVGTQLSDSIHLRSLCSTETYKYLGMSEALGINAADVKQSLRERFFGRLNKVLNSLLSGGNKVRAFNGWVMPVLMYSFGILKWTQTELDALDRRVRTLLTANRMHHPRSSVMRLYIPRKCGGRGFLNAKTLHNREVCSLREYFLETDVGMHRDVVAVDKGLTPLFLASENWRKPIVMDTNERKEVWKGKELHGRFYRALHGPDVDLLASVSWLRFGNLFGETEGFVFAIMDEVMMTNNYRKYIVKDGTVDICRACHRPGESIRHIISGCSHLANGDYLHRHNLVARIIHQQLALKYNLVESEVPYYKYVPDPVLENGSVTLYWDRSIITDRTIVANKPDIVVIDRLERRTMIVDIAVPHDENLVKAEKDKQTKYLDLAREVVDMWEVDRAIIVPIVVTANGLIAKSLDQHLRRLSLGSWIKGLIQKAVLLDTARIVRRFLSQEP

SEQ ID NO: 11060 - protein, 868 aa, Mythimna ferrago
MRFVRRAFSGTDISPRDYMSRVTERIDFLKQKVYAWANRIRRYKRRVERYTQNSTFRSNERWVYRAWERPDQGVTDTRLPDDDAMTSFWRNIWSVPVSHTEGGWTREVERACESITEMGAITISPQDVARAVRPLPNWKSPGPDGLHNFWIKWLQRSHARLASQYQAALESGSLPEFLTTGVTHLLHKSGSTAEPKNYRPITCLPTVYKVLTSILRAKINHHVDSNAIMSASQNGCRNGSRGTKELLLIDMAISQQVRRSRKDLSTCWIDYKKAYDSVPHTWLMRVLELYKVDATLRTFLISCMRQWRTVLRYPGCRNIHRNSEPVRIERGIFQGDSLSPLWFCLALNPLSTLLENSGLGYRLKRGGQVISHLLYMDDLKLFAPNNLQLMELLKVTETFSSAIRMEFGVDKCAVMHIKRGEIVESVGIQLSDSIHLRSLSPTETYKYLGMSEALGINASGMKQSLRERFFGRLKKVLNSLLSGGNKVRAFNGWVMPVLMYAFGVLKWTQTELDALDRRVRTLLTAYRMHHPRSSVMRLYIPRKCGGRGFLNAKTLHNREVCSLREYFLAADGGMHRDVVAVDKGLTPLSLANENWRKPVVLDTNVRKEVWQSKELHGRFFRVLHGPDVDELASVAWLRSGDLFGETEGFVCAIMDEVIMTNNYRRFIVKDGTVDICRACHRPGESIRHIISGCSRLANGEYLHRHNLVARIIHQQLALKYSLVESEVPYYRYVPDPVLDSGDITLYWDRSIITDRTIVANKPDIVVVDRRERRAMIVDISVPHDENLVKAEKDKQIKYIDLAREVVNMWDVDSAIIVPIVVSANGLIAKSLDQHLRRLSLSGWIKGLIQKAVLLDTARIVRRFLSLEP

SEQ ID NO: 11061 - protein, 976 aa, Mythimna ferrago
MPLELRPRLPRLPMHNKNKALVAALDSQLSNYFDDCEDLTDTHSIMYCAAVAACRVAHVKFPNSDVATRPKPAVPAWQCRIERRIGGARALIGKLICFREGNTRPRVMRFVRRAFSGTDISPRDYMSRVTERIDFLKQKVYAWANRIRRYKRRVERYIQNSTFRSNERWVYRAWERPDQGVTDTRPPDNDAMYSFWRNIWSVPVSHTEGGWTREVERACESITEMGAFTISPQDVARAVRPLPNWKSPGPDGLHNFWIKWLQRSHARLASQYQAALESGSLPEFLTTGVTHLLHKSGSTAEPKNYRPITCLPTVYKVLTSILRAKINHHVDNNAIMSASQNGCRNGSRGTKELLLIDMAISQQVRRSRKDLSTCWIDYKKAYDSVPHTWLMRVLELYKVDATLCTFLMSCMRQWRTVLRYPGCRNIQRNSEPVRIERGIFQGDSLSPLWFCLALNPLSTLLENSGLGYRLKRGGQVISHLLYMDDLKLFAPNNLQLMELLKVMETFSSAIRMEFGVDKCAVMHIKRGEIVESVGIQLSDSIHLRSLSPTETYKYLGMSEALGINATDMKQSLKERFFGRLKKVLNSLLSGGNKVRAFNGWVMPVLMYAFGVLKWTQTELDALDRRVRTLLTAYRMHHPRSSVMRLYIPRKCGGRGFLNAKSLHNREVCSLREYFLAADGGMHRGVVAVDKGLTPLSLANETWRKPVVLDTNVRREVWQSKELHGRFFRALHGPDVDQLASVAWLRVGDLFGETEGFVCAIMDEVIMTNNYRRFIVKDGTVDICRACHRPGESIRHIISGCSRLAINGEYLHRHNLVARIIHQQLALKYSLVESEVPYYRYVPDPVLDSGDITLYWDRSIITDRTIVANKPDIVVVDRSERRAMIVDISVPHDENLAKAEKDKQIKYIDLAREVVDMWEVDSAIIVPIVVSANGLIAKSLDQHLRRLSLGDWIKGLIQKAVLLDTARIVRRFLSLEP

SEQ ID NO: 11062 - protein, 868 aa, Mythimna ferrago
MRFVRRAFSGTDINPRDYMSRVTERIDFLKQKVYAWANRIRRYKRRVERYTQNSTFRSNERWVYRAWERPDQGVTDTRLPDDDAMCLFWRNIWSVPVSHTEGGWTREVERACESITEMGAITISPQDVARAVRPLPNWKSPGPDGLHNFWIKWLQRSHARLASQYQAALESGSLPEFLTTGVTHLLHKSGSTAEPKNYRPITCLPTVYKVLTSILRAKINHHVDNNAIMSASQNGCRNGSRGTKELLLIDMAISQQVRRSRKDLSTCWIDYKKAYDSVPHTWLMRVLELYKVDATLRTFLMSCMRQWRTVLRYPGCRNIQRNSEPVRIERGIFQGDSLSPLWFCLALNPLSTLLENSGLGYRLKRGGQAISHLLYMDDLKLFAPNNLQLMELLKVTETFSSAIRMEFGVDKCAIMHIKRGEIVESVGIQLSDSIHLRSLSPTETYKYLGMSEALGINATDMKQSLKERFFGRLKKVLNSLLSGGNKVRAFNGWVMPVLMYAFGVLKWTQTELDALDRRVRTLLTAYRTHHPRSSVMRLYIPRKCGGRGFLNAKTLHNREVCSLREYFLAADGGMHRAVVAVDKGLTPLSLANENWRKPVVLDTNVRKEVWQSKELHGRFFRALHGPDVDQLASVAWLRVGDLFGETEGFVCAIMDEVIMTNNYRRFIVKDGTVDICRACHRPGESIRHIISGCSRLANGEYLHRHNLVARIIHQQLALKYSLVESEVPYYRYVPDPVLDSGDITLYWDRSIITDRTIVANKPDIVVVDRRERRAMIVDISVPHDENLVKAEKDKQIKYIDLAREVVDMWNVDSAIIVPIVVSANGLIAKSLDQHLRRLSLSGWIKGLIQKAVLLDTAHIVRRFLSLEP

SEQ ID NO: 11063 - protein, 1200 aa, Mythimna ferrago
MLTRAAARRARPPPPASSLSSASPPPDPSPTVSAVTPAVAAASSSSDEYYSPPTTPPPARRRGGRRPPACFEPQGPPASDRVPATGGSVPRMRWTQSTNENVMRAYYGATEGGNNLTAYRVRMLSLFQVLESAVNVSAQRLSDQVRVIQRNHMLDDTVLDRLRTEMSNHVIAPSSQPVVPVMVPPSNHVANPADVESTDMVIQVSTQCTNELRSALECAIREYRNMPSVLRPRLPRLPMHNKNKALVAALDMQLSNYFDNCKDLTDAHSIMYCAAVAVCRVAHVKFPNSDVATRPKPAVPAWQCRIERRIGGARALIGKLICFREGNTRPRVMRFVRRAFSGTDICPRDYMSRVTERIDFLKQKVYAWANRIRRYKRRVERYTQNRAFQSNERWVYRAWERPDQGVTDTRLPDDDAMCSFWRNIWSVPVSHTEGGWTREVEQTCEPITEMGAITISPQDVARAVRPLPNWKSPGPDGLHNFWIKWLQRSHACLASQYQAALESSSLPEFLTTGVTHLLHKSGSTAEPKKYRPITCLPTVYKVLTSILRDKINNHIDNNSIMSASQNGCRKGSRGTKELLLIDMAISQQVRRSRKDLSTCWIDCKKAYDSVPHTWLMRVLELYKIDATLRTFLMSCMRQWRTVLRYPGCRNIQRSSEPVRIERGIFQGDSLSPLWFCLALNPLSTLLENSGLGYQLKRGGQVTSHLLYMDDLKLFAPNKLQLMELLKVTETFSSAIRMEFGVDKCAVMHVKRGEIVESVSTQLSDSISLRSLSATETYKYLGMSEALGINATDMKQSLRERFFGRLKKVFNSLLSGGNKVRAFNGWVMPVLMYSFGVLKWTQTELDALDRRVRSLLTANRMHHPRSSVMRLYIPRKCGGRGFLNAKTLHNREVCSLREYFLAADVGMHRDVVAVDKGLTPLSLANENWRKPVVLDTNDRKEVWQSKELHGRFFRALNGPDVDQLASVAWLRVGDLFGETEGFVCAIMDEVIMTKNYRRFIVKDGTVDICRACHRPGESIRHIISGCSRLANGEYLHRHNLVARIIHQQLALKYSLVESEVPYYRYVPDPVLDNGDITMYWDRSIITDRTIVANKPDIVVVDRSERRAMIVDISVPHDENLVKAEKDKQIKYIDLAREVVDMWDVDSAIIVPIVVSGNGLIAKSLDQHLRRLALGSWIKGLIQNTVLLDTARIVRRFLSLEP

SEQ ID NO: 11064 - protein, 1076 aa, Mythimna ferrago
MLSLFQVLEPAVNVSAQRLSDQVRVIQRNRMLDDAVLDRLRLESRNGRVTPISPPAAVQRQPSVSPRPDHVGEDDDDGAISVSTQCNARLRSALEDAFREYRSIPPELRPRLPRLPMHRKNRALVCALDSQLSNCFDSSKDLTDTHSILYCAAAAACRVAHVKIPNSDRATRPAKPAWQCRIERRIGEARALIGKLICFREGNTRPRVMRFVRRAFSGTDISPRDYLPRITERIDFLRQKVYAWANRIRRYKRRVERYTQNRAFQSNKRWVYRAWERPDQSVIDTRLPDDDAMYSFWRSIWSVPVSHTEGDWTREVERECELIPEMGAITISPQDVARAVRPLPNWKSPGPDGLHNFWLKWFKSSHARLAFQFQSALESGSLPQFLTTGITHLLHKSGSTAEPKNYRPITCLPTVYKVLTSILRAKINSHIETNSIMSASQNGCRNGSRGTKELLLIDVAISQQVRRSRRDLSTCWINYKKAYDSVPHTWLMRVLELYKIDVTLRAFLMSCMGQWRTVLHYPGCRRVSENSEPLRIERGIFQGDSLSPLWFCLALNPLSTLLEGSGLGYRLRREGQVISHLLYMDDLKLFASNNLQLMELLKVTETFSSAIRMEFGLDKCAVMHVKRGEIMESVGTQLSDSIHFISLSSTETYKYLGMSEALGINAADVKQSLRERFFGRLNKVLKSLLSGGNKVRAFNGWVMPVLMYSFGILKWTQTELDALARRVRTLLTANRMHHPRSSVMRLYIPRKCGGRGFLNAKTLHNREVCSLREYFLETDVGMHRDVVAVDKGLTPLSLANENWRKPIVMDTNERKEVWKGKELHGRFYRALHGPDVDLLASVSWLRFGDLFEETEGFVFAIMDEVMMTNNYRKYIVKDGTVDICRACHRPGESIRHIISGCSHLANRDYLHRHNLVARIIHQQLALKYNLVESEVPYYRYVPEPVLENGSVTLYWHRSIITDRTIVANKPDIVVIDRLERRTMIVDIAVPHDENLVKAEKDKQTKYLDLAREVVDMWEVDRAIIVPIVVTANGLIAKSLDQHLRRLSLGSWIKGLIQKAVLLDTARIVRRFLSQEP

SEQ ID NO: 11065 - protein, 1199 aa, Acronicta aceris
MLTRARARYIEHHTRLTTPDSSPSSALQQPQHGRTSPNAAATASSSSDEYYSPPTSPPPVRRRGGRRPPDRLGPRGPLASGGIPASGGSVQRMRWTRSLNENVMRAYYGATEGGTNLTAYRGRMLSLFQALEPTIDVSTQRLSDQVRVIQRNHMLDDSVLDQLRSEVQSSRAIAHPSQSMAPSATLPQTNLAEVGSDDRVTNVSTQYNEKLRSALEGAFREYRSSPPELRPRLPRLPMNNKNLALVCALDSLLSDYFDSSEDLADTHSILYCAAIAACRVAHVKFPESDRATRPKPMIPAWQSRIEQRIGEARALIGKLICFREGNTRPRVMRFVRRAFSGTNIDPRDYASCVTERIDFLKQKVYAWANRIRRYKRRAERYSLNRTFQGDQRWVYRTWDRPDNGVSDVCRPNDDAMSSFWRNIWSVPVNHTEDDWICDVERACESLPAMDEINISPQDVACAVHSVPNWKAPGPDGLHNFWIKWLRSSHARLASQFQSSLESGTLPQFLTTGITHLLHKSGDTADPKNYRPITCLPTVYKLLTSILRAKICYHIDESSIMSASQNGCRNGSRGTKELLLIDMTISQQVRRLRKNLSTCWIDYKKAYDSVPHTWLMRVLELYKVDVSLRTFLRSCMGQWRTVLHYPGCRQIQRISEPIRIERGIFQGDSLSPLWFCLALNPLSTLLEESRLGYRLRRGGQVISHLLYMDDLKLFASSDLHLMELLKITENFSNSIRMEFGVEKCAVMHVKRGGIVESVGIQLSDSTQLRSLASTETYKYLGMAEALGINVADMKQSLQVRFFGRLTKVLKSLLSGGNKVRAFNGWVMPVLMYSFGVLKWTQTELETLDRKVRTLLTAYRMHHPRSSVMRLYIPRKCGGRGFLNAKNLHNREVCSLREHFLKTEMGMHRDVVAVDNGLTPLSMAKENWRKPVVLSTNDRRNVWQGKELHGRYYRALHEPGVDTLASVSWLRFGDLFGETEGFVCAIMDEVMMTNNYRKFIVKDGTVDICRACHRPGESIRHIISGCSRLANGEYLHRHNLVARIIHQQLALKYNLVESEVPYYKYVPDPVLENGHATLYWDRSIITDRTIIANKPDIVVIDRLERRAMIVDITVPHDENLFKAEKEKEIKYLDLAHEVVDMWGVDAAIIVPIVVSANGLIAKSLDRHLKRLSLGGWIKGLIQKVVLLDTARIVRRFLSLGP

SEQ ID NO: 11066 - protein, 1191 aa, Eilema sororculum
MLTRAQARNRNAQTTSPDSSLSSAAQPPAMEPAASSSSSSDEFFSPPTSPTPVRRPGRGRPPTCLGPRRPPASNRAPAAGGNVHRMRWTNSINENVMRAYFAATEGGTNLSAYRTRMLPLFQALEPSINTSAQRLSDQVRVIQCNRMLNETVLETLRQECLRNICVTPAPAPAPASTAEINNDTYVAPDDTPIPVSIQYNEEIKEALECALREYRSVPVHVRPRLPRMPIHRRNIALVSALDSLLPRYLENSENLGDTHSILYCTAVAACRMAGAKFPIKDPAIRPKSAIPAWQCRIERRVAEARVLIGKLICFRSGNTRPRVMRYVTRAFAGTDISPQDYTSRVTERIDFLKQKVYAWANRIRRYKRRVDRYTVNHMFQRDQRWVYRSWERTDESVDDVRRPDAEATNAFWRSIWSVPVSHTEGDWMREVERACETIPEMEEIYIDATDVDCAVRSLSNWKSPGPDGLHNFWLKWLRSSHVVLASQFQSAIESGTLPAFMTTGVTHLLHKTGSTLEPNNYRPITCLPTVYKLLTSILRAKINNHINNNSIMCASQNGCRNGARGTKELLLIDMAISQQARRNRKDLTACWIDYKKAFDSVPHTWLLRVLELYKVNTTLCTFLRLCMGQWRTVLFYPGCRQALGGGVPITIERGIFQGDSLSPLWFCLALNPLSTLLVNSGLGYRLRREGQMVSHLFYMDDLKLFAHTNPQLIALLKVTETFSNSIKMAFGVDKCAVIHVKRGRVVESEGIQLSDSTNLRSLLVTETYKYLGMSQALCINEVDMKQMLQERFFGRLKKVLNSLLSGGNKVRACNSWVMPLLMYSFGILRWTQTELDTIDRKVRAQLTAFRMHHPRSSVMRLYIPRKCGGRGFLNAKTLHNREVCNLRDYFLKSNVDMHRDVVNVDTGLTPLGLAKENWRRPTIVSTDSRREVWQSKELHGRFYRALHRPEVDLLASVSWLRFSDLFGETEGFVCAIADEVIKTNNYRRYIMRDGTIDICRACHQPGESLRHITSGCSRLANGEYLHRHNQVARIIHQRLALKYNLVEVEVPYYRYVPDPVLENSHITLYWDRSIITDRTVVANKPDIVVIDRSERRALIVDVTIPHDENLVKAEKDKQVKYLDLAHEVVDMWNVDSAIIVPIVVSVNGLIAKSLDQHLKRLGLDGWVKGQMQKAVLLDTARIVRKFLSLEP

SEQ ID NO: 11067 - protein, 1192 aa, Eilema sororculum
MLTRAQAKRNGSAPITSPDSSLSSAAQPPTVESAASSSSSSDEFFSPPTSPTPVRRPGRGRPPTCLGPRRPPASNGAPATGGDVHRMRWTNSINENVMRAYFAATEGGTNLSAYRTRMLPLFQALEPSINVSAQRLSDQVRVIQRNRMLNETVLETLRLECLRNICVTPAPVPVPASTVELNDDTCVAPDDTPIPVSIQYNEEIKEALECALREYRSMPVHVRPRLPRLPIHRRNIALVSALDSLLPRYLENSENLGDTHSILYCTAVAACRMAGAKFPIKDPAIRPKSAIPAWQCRIERRVTEARVLIGKLICFRSGNTRPRVMRYVTRAFAGTDISPQDYTSRVTERIDFLKQKVYAWANRIRRYKKRVDRYTVNRMFQRDQRWVYRSWERTEESVDDVRRPDAEVTNAFWRSIWSVPVSHTEGDWMHEVKRACETIPEMEEINIDAIDVDCAVRSLSNWKSPGPDGLHNFWLKWLRSSHVVLASQFQSAVESGTLPAFMTTGVTHLLHKTGSTLEPNNYRPITCLPTVYKLLTSILRAKINNHINNNSIMCASQNGCRNGARGTKELLLIDMAISQQARRNRKDLTACWIDYKKAFDSVPHTWLLRVLELYKVNTTLCTFLRSCMGQWRTVLFYPGCRQALGGGVPITIERGIFQGDSLSPLWFCLALNPLSTLLVNSGLGYRLRREGQMVSHLFYMDDLKLFAHTNPQLITLLKITETFSNSIKMAFGVDKCAVIHVKRGRVVESEGIQLSDSTNLRSLLVTETYKYLGMSQALCINEVDMKQMLQERFFGRLKKVLNSLLSGGNKVRACNSWVMPLLMYSFGILKWTQTELDTIDRKVRTQLTAFRMHHPRSSVMRLYIPRKCGGRGFLNAKTLHNREVCNLRDYFLKSNVDMHRDVVNVDTGLTPLGLAKENWRRPTIVSTDSRREVWQSKELHGRFYRALHRPEVDLLASVSWLRFSDLFGETEGFVCAIADEVIKTNNYRKYIMRDGTIDICRACHQPGESLRHITSGCSRLANGEYLHRHNQVARIIHQRLALKYNLVEFEVPYYRYVPEPVLENTHITLYWDRSIITDRTVVANKPDIVVIDRSERRALIVDVTIPHDENLVKAEKDKQVKYLDLAHEVVDMWNVDSAIIVPIVVSVNGLIAKSLDQHLKRLGLDGWVKGQMQKAVLLDTARIVRKFLSLEP

SEQ ID NO: 11068 - protein, 964 aa, Eilema sororculum
MPIHRRNIALVSALDSLLPKYLENSENLGDTHSILYCTAVAACRMAGAKFPIKDPAIRSKPAIPAWQCRIERRVAEARVLIGKLICFRSGNTRPRVMRYVTRAFAGTNISPQDYTSRVTERIDFLKQKVCAWANRIRRYKKRVDRYTVNRMFQRDQRWVYRSWERTDESVDDMRRPDAEATNAFWRSIWSVPVSHTEGDWMREVERACETIPEMEEIYIDATDVDCAVRSLSNWKSPGPDGLHNFWLKWLRSSHVVLASQFQSAIESGTLPAFMTTGVTHLLHKTGSTLEPNNYRPITCLPTVYKLLTSILRAKINNHININSIMCASQNGCRNGARGTKELLLIDMTINQQARRNHKDLVACWIDYKKAFDSVLHTWLLRVLELYKVNTTLCTFLRSCMGQWRTVLLYPGCRQALGSGEPITIERGIFQGDSLSPLWFCLALNPLSTLLVNSGLGYRLRREGQMVSHLFYMDDLKLFAHTNPQLIALLKVTETFSNSIKMAFGVDKCAVIHVKRGRVVESEGIQLSDSTNLRSLLVTETYKYLGMSQALCINEVGMKQMLQERFFGRLKKVLKSLLSGGNKVRACNSWVMPLLMYSFGILKWTQTELDTIDRKVRTQLTAFRMHHPRSSVMRLYIPRKCGGRGFLNAKTLHNREVYNLRDYFLKSNVDMHRDVVNVDTGLTPLGLAKENWRRPTIVGTDSRREAWQSKELHGRFYRALHRPEVDLLASVSWLRFSDLFGETEGFVCAIADEVIKTNNYRKYIMRDGTIDICRACHQPGESLRHITSGCSRLANGEYLHRHNQVARIIHQRLALKYNLVEVEVPYYRYVPEPVLENSHITLYWDRSIITDRTVVANKPDIVVIDRSERRALIVDVTIPHDENLVKAEKDKQVKYLDLAHEVVDMWNVDSAIIVPIVVSVNGLIAKSLDQHLKRLGLDSWVKGQMQKAVLLDTARIVRKFLSLEP

SEQ ID NO: 11069 - protein, 1192 aa, Eilema sororculum
MLTRAQASRNRSAPTTSPDSSLSSAAQPPAVEPAASSSSSSDEFFSPPTSPTPVRRPGRGRPPTCLGPRRPPASNRAPAAGGNVHRMRWTNSINENVMRAYFAATEGGTNLSAYRTRMLPLFQALEPSINVSAQRLSDQVRVIQRNRLLNETVLETLRLEWLRNICVTPAPAPAPASTVEINDDTCVAPDDTPIPVSIQYNEEIKEALECALREYRSMPVHVRPRLPRLPIHRRNIALVSALDSLLPRYLENSENLGDTHSILYCTAVAACRMAGANFPKKDPAIRLKSAIPAWQCRIERRVAEARVLIGKLICFRSGNTRPRVMRYVTRAFDGTDISPQDYTSRVTERIDFLKQKVYAWANRIRRYKKRVDRYTVNRMFQRDQRWVYRSWERTEESVDDVRRPDAETTNAFWRSIWSVPVNHTEGDWMREVERACETIPEMEKINIDAIDVDCAVRSLSNWKSPGPDGLHNFWLKWLRSSHVVLASQFQSAVESGTLPAFMTTGVTHLLHKTGSTLEPNNYRPITCLPTVYKLLTSILRAKINNHINNNSIMCASQNGCRNGARGTKELLLIDMAISQQARRNRKDLTACWIDYKKAFDSVPHTWLLRVLELYKVNTTLCTFLRSCMGQWRTVLFYPGCRQALGSGEPITIERGIFQGDSLSPLWFCLALNPLSTLLVNSGLGYRLRREGQMVSHLFYMDDLKLFAHTNPQLIALLKVTETFSNSIKMAFGVDKCAVIHVKRGRVVESEGIQLSDSTNLRSLLVTETYKYLGMSQALCINEVDMKQMLQERFFGRLKKVLNSLLSGGNKVRACNSWVMPLLMYSFGILKWTQTELDTIDRKVRTQLTAFRMHHPRSSVMRLYIPRKCGGRGFLNAKTLHNREVCNLRDYFLKSNVDMHRDVVNVDTGLTPLGLAKENWRRPTIVGTDSRREVWQSKELHGRFYRALHRPEVDLLASVSWLRFSDLFGETEGFVCAIADEVIKTNNYRKYIMRDGTIDICRACHQPGESLRHITSGCSRLANGEYLHRHNQVARIIHQRLALKYNLVEVEVPYYRYVPEPVLENSHITLYWDRSIITDRTVVANKPDIVVIDRSERRALIVDVTIPHDENLVKAEKDKQVKYLDLAHEVVDMWNVDSAIIVPIVVSVNGLIAKSLDQHLKRLGLDGWVKGQMQKAVLLDTARIVRKFLSLET

SEQ ID NO: 11070 - protein, 1196 aa, Eilema sororculum
MLTRAKTKIIIQDAHLTPTDSSCSSASQAPGITSPRSTPVEASSSDEYFSPPTSPTPVRRPGRGRPLSCLGPRRPPASNRAPAAGGNVHRMRWTNSINENVMRAYFAATEGGTNLSAYRSRMLPLFQALEPSVNTSAQRLSDQVRVIQRNHMLNETVLETLRQECLRNICVTPALAPAPASTTALNEDSHVTRDDTPIPVSIQYNEEIKEALEYALREYRSMPIHVRPRLPRLPIHRRNIALVSALDSLLPKYLENSENLGDTHSILYCTAVAACRMAGAKFPIKDPAIRPKPAIPAWQCRIERRVAEARVLIGKLICFRSGNTRPRVMRYVTRAFAGTNISPQDYTSRVTERIDFLKQKVCAWANRIRRYKKRVDRYTVNRMFQRDQRWVYRSWERTDESVDDLRRPDAEATNAFWRSIWSVPVSHTEGDWVREVERACETIPEMEEIYIDATDVDCAVRSLSNWKSPGPDGLHNFWLKWLRSSHVVLASQFQSAIESGTLPAFMTTGVTHLLHKTGSTLEPNNYRPITCLPTVYKLLTSILRAKINNHINNNSIMCTSQNGCRNGARGTKELLLIDMTISQQARRNRKDLVACWIDYKKAFDSVPHTWLLRVLELYKVNTTLCTFLRSCMGQWRTVLLYPGCRQALGSGEPITIERGIFQGDSLSPLWFCLALNPLSTLLVNSGLGYRLRREGQMVSHLFYMDDLKLFAHTNPQLIALLKVTETFSNSIKMAFGVDKCAVIHVKRGRVVESEGIQLSDSTNLRSLLVTETYKYLGMSQALCINEVNMKQMLQERFFGRLKKVLNSLLSGGNKVRACNSWVMPLLMYSFGILKWTQTELDTIDRKVRTQLTAFRMHHPRSSVMRLYIPRKCGGRGFLNAKTLHNREVCNLRDYFLKSNVDMHRDVVNVDTGLTPLGLAKENWRRPTIVGTDSRREVWQSKELHGRFYRALHRPEVDLLASVSWLRFSDLFGETEGFVCAIADEVIKTNNYRKYIMRDGTIDICRACHQPGESLRHITSGCSRLANGEYLHRHNQVARIIHQRLALKYNLVEVEVPYYRYVPQPVLENSHITLYWDRSIITDRTVVANKPDIVVIDRSERRALIVDVTIPHDENLVKAEKDKQVKYLDLAHEVVDMWNVDSAIIVPIVVSVNGLIAKSLDQHLKRLGLDGWVKGQMQKAVLLDTARIVRKFLSLEP

SEQ ID NO: 11071 - protein, 1045 aa, Eilema sororculum
MLNETVLETLRLECLRNICVTPAPAPAPASTVEINDDTCVAPDDTPIPVSIQYNEEIKEALECALREYRSMPVHVRPRLPRLPIHRRNIALVSALDSLLPRYLENSENLGDTHSILYCTAVAACRMAGAKFPNKDPAIRLKSAIPAWQCRIERRVAEARVLIGKLICFRSGNTRPRVMRYVTRAFAGTDISPQDYTSRVTERIDFLKQKVYAWANRIRRYKKRVDRYTVNRMFQRDQRWVYRSWERTEESVDDVRRPDAETTNAFWRSIWSVPVNHTEGDWMREVERACETIPEMEKINIDAIDVDCAVRSLSNWKSPGPDGLHNFWLKWLRSSHVVLASQFQSVVESGTLPAFMTTGVTHLLHKTGSTLEPNNYRPITCLPTVYKLLTSILRAKINNHINNNSIMCASQNGCRNGARGTKELLLIDMAISQQARRNRKDLTACWIDYKKAFDSVPHTWLLRVLELYKVNTTLCTFLRSCMGQWRTVLFYPGCRQALGSGEPITIERGIFQGDSLSPLWFCLALNPLSTLLVNSGLGYRLRREGQMVSHLFYMDDLKLFAHTNPQLIALLKVTETFSNSIKMAFGVDKCAVIHVKRGRVVESEGIQLSDSTNLRSLLVTETYKYLGMSQALCINEVDMKQMLQERFFGRLKKVLNSLLSGGNKVRACNSWVMPLLMYSFGILKWTQTELDTIDRKVRTQLTAFRMHHPRSSVMRLYIPRKCGGRGFLNAKTLHNREVCNLRDYFLKSNVDMHRDVVNVDTGLTPLGLAKENWRRPTIVGTDSRREVWQSKELHGRFYRALHRPEVDLLASVSWLRFSDLFGETEGFVCAIADEVIKTNNYRKYIMRDGTIDICRACHQPGESLRHITSGCSRLANGEYLHRHNQVARIIHQRLALKYNLVEVEVPYYRYVPEPVLENSHITLYWDRSIITDRTVVANKPDIVVIDRSERRALIVDVTIPHDENLVKAEKDKQVKYLDLAHEVVDMWNVDSAIIVPIVVSVNGLIAKSLDQHLKRLGLDGWVKGQMQKAVLLDTARIVRKFLSLEP

SEQ ID NO: 11072 - protein, 1212 aa, Ptilodon capucinus
MTDAPRRNPRRLCRQRTVNEPNAQSTPPDPSPRSASPSPASIIRTSVTAVASSESDEYFSPPTSPPPVRQQRGRPPGHLGLLGQPAPNRVLVPSGVVRRMRWTSSINENVMRAYYEATEGGTNLTAYRNRMLPLFQSLEPAVNVSAQRLSDQVRVIQRGNMLADTVLDRLRSEMQSRRVVPVASSQPAAQPVASATVTSRLAADSDVDRDNAPINVSNQYNELLRSTLEDVVRVYRSMPNHLRPRIPRLPLHKGNRALVGALDSLLSIYFDSSDNLADTHSILYCAAITVCRVARVKVFNTDTATRPKPAVPAWQCRIERRISEARALIGKLSCFREGNTRPRVMRFVKRAFAGTDVSPREYISHVTERIDFLKQKIYAWANRIRRYKVRVDRYSQNSMFQRDQRWVYRSWERPSEPVSELQRPDDNATTTFWRDIWSVPVTHYEGDWIGDVERMCEPIKEMEAISIGPLDVTNAVRSLPNWKAPGPDGLHNFWLKWLRSSHVRLASQFQSALQSGSLPEFITTGVTHLLHKTGSTTDPKNYRPITCLPTIYKTLTSILRAKIARHVEDNSIMSASQNGCRSGSRGTKELLLIDMTICQQARRNRKDLSTCWIDYKKAYDSVPHTWLVRVLELYKIDTTLRTFLESCMRQWKTVLLCPGSRQILGNGEPIRIERGIFQGDSLSPLWFCLALNPLSTLLEESGFGFRLRRGGQVISHLLYMDDLKLFAPTALQLTGLLKVTETFSNSIRMEFGVDKCAVMHAKQGRLVESEGIQLSDSIQLRTLAATETYKYLGMSQGLGISETDMKQLLRDRFLGRLKKVLKSLLSGGNKVRAYNGWVMPVLMYSFGILKWTQTELDTLDRTVRTTLTAYRMHHPRSSVMRLYIPRKCGGRGFLNVKTLHNREICSLREYFLRADGEMHVDVVAVDNGLTPLSLAKENWRKPVVLTTDDRRLVWQGKELHGRYYRALHGADVDLAASVAWLRFGDLFGETEGFVCAIMDEVVMTNNYRKYILRDGTIDICRACHRPGESLRHIISGCSRLANGQYLHRHNQVARIIHQQLALKYRLVTSEVPYYRYEPQPVLEEGHISLYWDRSIITDRTIVANKPDIVLIDRQERRAIIVDITVPHDENLVKAEKDKESKYLDLAHEVVDMWDIDAAIIVPIVVSAHGLLAKSLDKHLKRLALGGWIKGQIQKAVLLETARIVRKFLSLEP

SEQ ID NO: 11073 - protein, 1202 aa, Ptilodon capucinus
MDPEIVGREEFAEFIAGRKLPYGALPVAHRRVKNTLIIIVASSESDEYFSPPTSPPPVRRQRGRPPGHLGLLGQPAPNRVLVPSGVVRRMRWTSSMNENVMRAYYEATEGGTNLTAYRDRMLPLFQSLEPAVNVSAQRLSDQVRVIQRGNMLADTVLDRLRSEVQSRRVVPVASSQPAAQPVASATVTSRLVADSDVDRDNAPIDVSTQYNDLLRSTLEDVVREYRSMPNHLRPRIPRLPMHKGNRALVGALDSLLSIYFDSSDDLVDTHSILYCAAITVCRVARVKVFNTDTATRPKPAVPAWQCRIERRISEARALIGKLSCFREGNTRPRVMRFVKRAFAGTDVSPREYISRVTERIDFLKQKIYAWANRIRRYKARVDRYSQNSMFQRDQRWVYRSWERPNEPVSELQRPDDNAMTTFWRDIWSVPVTHYEGNWIGDVERMCEPIKGMEAISIGPLDVANAVRSLPNWKAPGPDGLHNFWLKWLRSSHVRLASQFQSALQSGSLPEFITTGVTHLLHKTGSTTDPKNYRPITCLPTIYKTLTSILRAKIARHVEDNSIMSASQNGCRSGSRGTKELLLIDMTICQQARRNRKDLSTCWIDYKKAYDSVPHTWLVRVLELYKIDTTLRTFLESCMRQWKTVLLCPGSRQILGNGEPIRIERGIFQGDSLSPLWFCLALNPLSALLEESGFGFRLRRGGQVISHLLYMDDLKLFAPTALQLSGLLKVTETFSNSIRMEFGVDKCAVMHAKQGRMVESEGIQLSDSIQLRSLAATETYKYLGMSQGLGISETDMKQLLRDRFLGRLKKVLKSLLSGGNKVRAYNGWVMPVLMYSFGILKWTQTELDTLDRTVRTTLTAYRMHHPRSSVMRLYIPRKCGGRGFLNVKTLHNREICSLREYFLRADGEMHVDVVAVDNGLTPLSLAKENWRKPVVLTTDDRRVVWQGKELHGRYYRALHGPDVDLAASVAWLRFGDLFGETEGFVCAIMDEVVMTNNYRRYILRDGTIDICRACHRPGESLRHIISGCSRLANGQYLHRHNQVARIVHQQLALKYRLVTSEVPYYRYEPQPVLEEGHITLYWDRSIITDRTIVANKPDIVLIDRQERRAMIIDITVPHDENLVKAEKDKESKYLDLAHEVVDMWDIDAAIIVPIVVSAHGLLAKSLDKHLKRLALGSWIKGQIQKAVLLETARIVRKFLSLEP

SEQ ID NO: 11074 - protein, 966 aa, Agrochola circellaris
MFYIFFLLIIIIISTLDSLLSNYFDGSKDLADTHSILYCAAVAACRVAHVKFPSSDRAPRPKPAVPAWQCRIERRIGEARVLIGKLICFREGNTRPRVMRFVKRAFSGTDTSSRDYLARVTERIDFLKQKICAWANRIRRYRRRVERYTQNRTFQSDERWVYRAWERLDQGVIDTRLPDDDAMCSFWRSIWSAPVNHTEGDWTGKIERACERIPEMGAITISPQDVACAVRPLPNWKSPGPDGLHNFWIKWFQRSHARLASQFQSALESGSLPQFLTTGITHLLHKSGSTAEPKNYRPITCLPTVYKVFTSILRTKINKHIDTNSIMSASQNGCKNGSRGTKELLLIDMAISQQVRRSRRDLSTCWIDYKKAYDSVPHTWLMRVLELYKVDATLRTFLISCMGQWRTVLRYPGCRQIQRNSEPIRIERGIFQGDSLSPLWFCLALNPLSTLLEDSGLGYRLRRGGQVISHLLYMDDLKLFAPNNLQLVELLKVTETFSSAIRMEFGVDKCAVMHVKRGGIVESGGTQLSDSIHLRSLSSIETYKYLGMSEALGINTADMKQSLRERFFNRLNKVLNSLLSGGNKVRAFNGWVMPVLMYSFGILKWTQTELDALDRRVRTLLTVNRMHHPRSSVMRLYIPRKCGGRGFLNAKTLHNREVCSLREYFLEADVGMHRDVVSVDKGLTPLSLANENWRKPIVLDTKDRREVWQSKELHGRFYRALHGPDVDLLASVSWLRFGDLFGETEGFVFAIMDEVMMTNNYRKYIVKDGTVDICRACHRPGESIRHIISGCSRLANGDYLHRHNLVARIIHQQLALKYSLVESEVPYYRYMPDPVLENGNITLYWDRSIITDRTIVANKPDIVVIDRLERRTMIIDIAVPHDENLVKAEKDKQIKYLDLAREVVDMWDVDTAVIVPIVVTANGIIAKSLDQHLRRLSLGSWIKGLIQKAVLLDTARIVRRFLSQGP

SEQ ID NO: 11075 - protein, 1201 aa, Hydraecia micacea
MLTRSAAARRARLPPPDSSLSSASPPAPLVSSPTVSAVTAPAAAVASSSSDEYFSPPTTPPPARRRGGRRPPDSLGPRGPPASDRVPAPGGSVQRMRWTRSINENVMRSYYGATEGGSNLTAYRVRMLSLFQVLEPAVNVSAQRLSDQVRVIQRNHMLDDTVLDRLRNEIQSSHAIAPQSQTAVILPQSNTSHADEGSNDRATNVSTQCNEELRSALEDAIQEYRFMSPELRPRLPRLPMHNKNRALVAVLNSQLSKFFDDCEDLTDTHSILYCAAVAACRVAHVKFTNDSRATRPKPAVPAWQCRIERRIGGARALIGKLICFREGNTRPRVMRFVRRAFLGTDISPQDYTSCVTERIDFLKQKVYAWANRIRRYKRRVERYTQNRTFQSDERWVYRDWERPDQSVADTCLPDDDAMCSFWRSIWSVPVSHTEGDWARDVERACDPIPEMEAITICPQDVARAVRPLPNWKSPGPDGLHNFWIKWFSRSHARLASQFQTALESGSLPQFLTTGITHLLHKSGSTAEPKNYRPITCLPTVYKVLTSILRAKINKHIDTNFIMSASQNGCRNGSRGTKELLIIDMTISQQVRRFRKDLSTCWIDYKKAYDSVPHTWLMRVLELYKVDTTLRTFLMSCMGQWRTVLRYPGCRNIQRNSEPIRIERGIFQGDSLSPLWFCLALNPLSTLLEDSGLGYRLRRGGQVISHLLYMDDLKLFAPNNLQLMELLKVTQTFSNAIRMEFGVDKCAVMHVKRGEIVESVGNQLSDSTNLRALSASETYKYLGMSEALGINVTDMKQSLKERFFGRLKKVLNSLLSGGNKVRAFNGWVMPVLMYSFGILKWTQTELDALDRRVRTLLTANRMHHPRSSVMRLYIPRKCGGRGFLNSKTLHNREICSLREYFLETDVGMHRDVVMVDKGLTPLSLAKENWRKPVVLDTNDRMEVWQSKELHGRFFRALHGPDVDLLASVAWLRFGDLFGETEGFVCAIMDEVMMTNNYRRFIVKDGTVDICRACHRPGESIRHIISGCSRLANGEYLHRHNLVARIIHQQLALKYSLVESEVPYYRYVPDPVLENGNITLYWDRSIITDRTIVANKPDIVVVDRSERRAMIVDITVPHDENLVKAEKDKQIKYLDLAREVVDMWDVDSAIIVPIVVTANGLIAKSLDQHLRRLSLASWIKGLIQKAVLLDTARIVRRFLSLEP

SEQ ID NO: 11076 - protein, 1079 aa, Amphipyra tragopoginis
MLTLFQELEPAINVSAQRLSDQVRVIQRNHRLDDAALDRLRLEVQNSRVTPFPSQTAVHEVNINIVPPRSDYVDGDMDDRAVTVSSQYNDQLRSALEDAIREYRANPELRPRLPRLPMHNKNRALVCALDSLLSSYFESSEDLGDTHSILYCAAVAACRVANVKFNNSERATRPKPAVPAWQCRIERRIDGARALIGKLICFREGNTRPRVMRFVRRAFSGTGISPREYMSQVTERIDFLKQKVCAWASRIRRYKRRVERYTQNRMFQCDQRWVYRAWERPDQGVSDGRLPDDDAMNSFWRSIWSVPVIHTEGDWMRDIERACEPIEEMGEILISPQDVASAARPLPNWKSPGPDGLHNFWIKWLRSSHARLAIQFQSSLESGSLPQFFTTGVTHLLHKSGSTAEPKNYRPITCLPTVYKLLTSILRSKINTHIENNSVMSSAQNGCRNGSRGTKELLLIDMAISQQVRRSRKNLSTCWIDYKKAYDSVPHAWLMRVLELYKINATLRTFLMSCMGQWRTVLRYPGCRPIRESGEPIRIERGIFQGDSLSPLWFCLALNPLSTLLEGSGLGYPLRRGGQVVSHLLYMDDLKLFAPTKLQLVELLKVTETFSNSIRMEFGVDKCAVMHVRRGGIMESEGLQLSDSIHLRPLSANDTYKYLGMSEGLGISEADMKQSLRERFFGRLKKVLKSLLSGGNKVRAFNGWVMPVLMYSFGILKWTQTELDALDRRVRSLLTANRMHHPRSSVMRLYIPRKCGGRGLLNAKTLHNREVCSLREYFLHADAGMHRDVVAVDKGLTPLNLAKENWRKPVVLSTNDRKEIWQSKELHGRFYRALHGPDVDFQASVSWLLFGDLFGETEGFVCAIMDEVIMTNNYRKYIVKDGTVDICRACHCPGESLRHIISGCSRLANGEYLHRHNQVARIIHQQLALKYNLVESEVPYYKYVPDPVLENGHITLYWDRSIITDRTIVANKPDIVVIDRSERRTMIVDVTIPHDENLVKAEKDKQIKYLDLAHEVVNMWDVDSATIVPIVVTANGLMAKSLDQHLKRLSLGGWIKGLIQKAVLLDTARIVRRFLSLEP

SEQ ID NO: 11077 - protein, 1207 aa, Amphipyra tragopoginis
MLTRSRAKTLQRTHPTPSASSLSSASQPPEPASIVSDVTPAAAVASSSSDEYFSPATSPSPPPARRRGRGRPPTCLGPRGPPASDRVPAPGGSVQRMRWTQSMNENCMRAYFGATEGGTNLTAYRGRMLSLFRTLEPAVNVSAQRLSDQVRVIQRDHRLDDAALGRLRDEMQNSHATPPPSQIRTQPLVPPAVPLQPNHADEEEQDRAISAGTQYSEIMRSALEDALREFRSTPPELRPRLPRLPMHNKNRALVCALDSLLSNVLESSKDIGDAHSILYCAAVAACRVAHVKFPNDNRATRPKSTVPAWQCRIERRIDEARVLIGKLTCFREGNIRPRVMRFVRRAFSGTDVSPGEYVSRVTERIDFLKQKVYAWANRIRRYRRRVDRYTQNCIFQSDQRWVYRTWERPDQGVSDTHLPDNDVMNAFWRNIWSVPVTHTEGDWMQEVQRACEPIQEMGAVTIGPQDVTSAVRPMPNWKSPGPDGLHNFWIKWLRSSHARLASQFQSSLESGSLPSFLTTGVTHLLFKSGSTAEPKNYRPITCLPTVYKLLTSILRAKINNHIDNNAIMSDSQNGCRNGSRGTKELLLIDMAISQQVRRSRKDLSTCWIDYKKAYDSVPHTWLMRVLELYKINATLRTFLMSCMGQWRTVLHYPGCRQIQGNGELIRIERGIFQGDSLSPLWFCLALNPLSTLLEGSGLGYRLRRGGQVISHLLYMDDLKLFAPNNLQLVELLKVTETFSNSIRMEFGVDKCAVMHVKRGRIMESVGTQLSDAIHLRSLSSTETYKYLGMSEALGINEADMKQSLKERFFGRLIKVLKSLLSGGNKVRAFNGWVMPVLMYSFGILRWTQTELDALDRRVRTLLTAYRMHHPRSSVMRLYIPRKCGGRGFLNAKTLHNREVCSLREYFSQADVGMHRDVVAVDKGLTPLSLAKENWRKPVVLDTNGRREVWRSKELHGRFYRALHGPDVDFLASVAWLRFGDLFGETEGFVCAIMDEVMMTNNYRKYIVKDGTVDICRACHCPGESIRHIVSGCSRLANGEYLHRHNLVARIIHQQLALKYNLVDTEVPYYKYVPDPVLENGHVTLYWDRSIITDRTIVANKPDIVVIDRLERRTVIVDIAVPHDENLVKAENDKKIKYLDLAHEVVDMWDVDSAVIVPIVVTANGLIAKSLDQHLMRLSLGGWIKGLIQKAVLLDTARIVRKFLSLEP

SEQ ID NO: 11078 - protein, 868 aa, Amphipyra tragopoginis
MRFVRRAFSGTGISPREYMSQVTERIDFLKQKVCAWASRIRRYKRRVERYTQNRMFQCDQRWVYRAWERPDQGVSDGRLPDDDATNSFWRSIWSVPVIHTEGDWMRDIERACDSIEEMGEILISPQDVASAARPLPNWKSPGPDGLHNFWIKWLRSSHARLATQFQSSLESGSLPQFFTTGVTHLLHKSGSTAEPKNYRPITCLPTVYKLLTSILRSKINTHIENNSVMSSSQNGCRNGSRGTKELLLIDMAISQQVRRSRKNLSTCWIDYKKAYDSVPHTWLMRVLELYKINATLRTFLMSCMGQWRTVLRYPGCRPIRESGEPIRIERGIFQGDSLSPLWFCLALNPLSTLLEGSRLGYPLRRGGQVVSHLLYMDDLKLFAPTKLQLVELLKVTETFSNSIRMEFGVDKCAVMHVRRGGIMESEGLQLSDSIHLRPLSANDTYKYLGMSEGLGISEADMKQSLRKRFFGRLKKVLKSLLSGGNKVRAFNGWVMPVLMYSFGILKWTQTELDALDRRVRSLLTANRMHHPRSSVMRLYIPRKCGGRGLLNAKTLHNREVCSLREYFLHADAGMHRDVVAVDKGLTPLNLAKENWRKPVVLSTNDRREVWQSKELHGRFYRALHGPDVDFLASVSWLRFGDLFGETEGFVCAIMDEVIMTNNYRKYILKDGTVDICRACHCPGESLRHIISGCSRLANGEYLHRHTQVARIIHQQLALKYNLVESEVPYYKYVPDPVLENGHITLYWDRSIITDRTIVANKPDIVVIDRSERRAMIVDITVPHDENLVKAEKDKQIKYLDLAHEVVNMWDVDSATIVPIVVTANGLMAKSLDQHLKRLSLGGWIKGLIQKAVLLDTARIVRRFLSLEP

SEQ ID NO: 11079 - protein, 1204 aa, Amphipyra tragopoginis
MITRSRAKTQSTQPPPSASSLSSASQPPEPASIVSDVTPAAAVASSSSDEYYSPPTSPPPARRRGRGRPPACLGPRGPPASDRVPASGGSVQRMRWTQSMNENCMRAYFGATEGGTNLTAYRGRMLSLFQALEPAVNVSAQRLSDQVRVIQRDHRLDDAALDRLRSEMQSSHVVPLQSQTAVQSQVPSVVAPRSIPADEESDDRVTNVSTQSNEQLRSALELAFREYRSTLPDLRPRLPRLPMNNKNKALMCALDSLLSSYFDGSEDLADTHSILYCAAVAACRVAHVKVDNNDRATRPKPAVPAWQCRIERRIGEARALIGKLICFREGNTRPRVMRFVRRAFSGTDTSPRDYMSRVAERIDFLKQKVYAWANRIRRFKRRVERYTQNRMFQRDQRWVYRAWERPDQGVRDVHLPDDDAMNSFWRSIWSVPVSHAEGDWMRDVERVCEPILDMGAISISPQDVASAVRPLPNWKSPGPDGLHNFWLKWLRSSHARLASQFQSSLETGTLPQFLTTGVTHLLHKSGSTAEPKNYRPITCLPTVYKLLTSILRCKISSHIENNSIMSASQNGCRNGSRGTKELLLIDMAISQQVRRSRKDLSTCWIDYKKAYDSVPHTWLLRVLELYKVNTTLCAFLTSCMGQWRTVLRYPGCRQIQGRGEPIRIERGIFQGDSLSPLWFCLALNPLSTLLEGSGLGYRLRRGGQVISHLLYMDDLKLFAPNNLQLMELLKVTETFSNSIRMEFGVDKCAVMHVKRGRIMESVGTQLSDSIQLRSLSSTETYKYLGMSEALGINEADMRQSLKERFYGRLKKVLKSLLSGGNKVRAFNGWVMPALMYSFGILKWTQTELDTLDRRVRTLLTAYRMHHPRSSVMRLYISRKCGGRGFLNAKTLHNREVCSLREYFSQADVGMHRDVVAVDKGLTPLSLAKENWRMPVVLDTNGRKDVWRSKEHHGRFYRALHGPDVDFQASVAWLRFGDLFGETEGFVCAIMDEVMMTNNYRKYVVKDGTVDICRACHCPGESIRHIVSGCSRLANGEYLHRHNYVARIIHQQLALRYNLVDAEVPYYKYVPDPVLENGHVTLYWDRSIITDRTIVANKPDIVVIDRSERRAMIVDITVPHDENLVKAENDKKIKYLDLAHEVVDMWNVDSAVIVPIVVSANGLIAKSLNQYLMRLSLGSWIRGLIQKAVLLDTARIVRKFLSLEP

SEQ ID NO: 11080 - protein, 1207 aa, Amphipyra tragopoginis
MLTRSRAKTLQRTHPTPSASSLSSASQPPEPASIVSDVTPAAAVASSSSDEYFSPATSPSPPPARRRGRGRPPTCLGPRGPPASDRVPAPGGSVQRMRWTQSMNENCMRAYFGATEGGTNLTAYRGRMLSLFQTLEPAVNVSAQRLSDQVRVIQRDHRLDDAALGRLRDEMQNSHATPPPSQIRTQPLVPPAVPLQPNHADEEEQDRAISAGTQYSEIMRSALEDALREFRSTPPELRPRLPRLPMHNKNRALVCALDSLLSNVLESSKDIGDTHSILYCAAVAACRVAHVKFPNDNRATRPKSTVPAWQCRIERRIDEARVLIGKLTCFREGNIRPRVMRFVRRAFSGTDVSPGEYVSRVTERIDFLKQKVYAWANRIRRYRRRVDRYTQNRIFQSDQRWVYRTWERPDQGVSDTHLPDNDVMNAFWRNIWSVPVTRTEGDWMQEVQRACEPIQEMGAVTIGPQDVASAVRPMPNWKSPGPDGLHNFWIKWLRSSHARLASQFQSSLESGSLPSFLTTGVTHLLFKSGSTAEPKNYRPITCLPTVYKLLTSILRAKINNHIDNNAIMSDSQNGCRNGSRGTKELLLIDIAISQQVRRSRKDLSTCWIDYKKAYDSVPHAWLMRVLELYKINATLRTFLMSCMGQWRTVLHYPGCRQIQGNGELIRIERGIFQGDSLSPLWFCLALNPLSTLLEGSGLGYRLRRGGQVISHLLYMDDLKLFAPNNLQLVELLKVTETFSNSIRMEFGVDKCAVMHVKRGRIMEPVGTQLSDAIHLRSLSSTETYKYLGMPEALGINEADMKQSLKERFFGRLIKVLKSLLSGGNKVRAFNGWVMPVLMYSFGILRWTQTELDALDRRVRTLLTAYRMHHPRSSVMRLYIPRKCGGRGFLNAKTLHNREVCSLREYFSQADVGMHRDVVAVDKGLTPLSLAKENWRKPVVLDTNGRREVWRSKELHGRFYRALHGPDVDFLASVAWLRFGDLFGETEGFVCAIMDEVMMTSNYRKYIVKDGTVDICRACHCPGESIRHIVSGCSRLANGEYLHRHNLVARIIHQQLALKYNLVDTEVPYYKYVPDPVLENGHVTLYWDRSIITDRTIVANKPDIVVIDRLERRTVIVDIAVPHDENLVKAENDKKIKYLDLAHEVVDMWDVDTAVIVPIVVTANGLIAKSLDQHLMRLSLGSWIKGLIQKAVLLDTARIVRKFLSLEP

SEQ ID NO: 11081 - protein, 1203 aa, Amphipyra tragopoginis
MLTRARARQKDARPRSPDSSLCSASQPPESSPPVSAVTPAAAVASSSSDEYFSPPSSPPPVRRRGGARPPACLGPRSQPASNGVPAAGGNVSRMRWTQSINENVMRAYYGATDGGINLTAYRDRMLSLFQVLEPAINVSTQRLSDQVRVIQRNRRLDDTVLERLRSETQNNRTVTSPAQSAVQPQLPAVPPRPSHADGEGDGEVIEVSNQCSDELRSALEGAILEYRTTPPELRPRLPRLPMHKKNRALVCALDSLLSNYFDGSEDLADAHSILYCAAIAACRVAHVKFTESDRATRPKPVVPAWQCRIERRIGGARALIGKLICFREGNTRPRVMRFVRRAFSGTDISPRDYMSRITERIDFLKQKVYAWANRIRRYKRRVERYTRNRTFQSDQRRVFRTWERPDPSGNDVRLPDDEAMGSFWRSIWSVPIAHTEGDWMRDIERACEPIPEMGAIIISPQDVAGAARPLPNWKSPGPDGLHNFWLKWLRSSHACLASQFQSSLESGSLPQFLTTGATHLLYKSGSTAEPKNYRPITCLPTVYKLLTSILRVKISNHIDNNSILSPSQNGCRSGSRGTKELLLIDMTISQQVRRSRKDLSTCWIDYKKAYDSVPHTWLMRVLELYKINTTLRTFLMSCMRQWRTVLRYPGCREIRGRGEPIRIERGIFQGDSLSPLWFCLALNPLSTLLEGTRLGYRLRREGQVISHLLYMDDLKLFAPTDLRLMELLKVTENFSSSIRMEFGVDKCAVMHVKRGGIVESEGIQISNPIQLRSLSPTETYKYLGMSEALGISEADMRQSLRERFFGRLNKVLRSLLSGGNKVRAFNGWVMPVLMYSFGILKWTQTDLEALDRRVRALLTVHRMHHPRSSVMRLYIPRKCGGRGFLNAKTLHNREVCSLREYFLQAEGEMHRDVVAVDKGLTPLALAKENWRKPAVLSTNDREEVWQSKELHGRFYRALHGPDVDFPASVSWLRFGDLFGETEGFVCAIMDEVMMTNNYRKYIVKDGTVDICRACHRPGESIRHIISGCSRLANGEYLHRHNLVARIIHQQLALKYNLVESEVPYYRYVPDPVLENGHATLYWDRSIITDRTIVANKPDIVVIDRSERRTMIVDITVPHDENLVKAEKDKQIKYLDLAHEVVGMWDVDSAVVVPIVVTANGLIAKSLDQHLKRLSLGGWIKGLLQKAVLLDTARIVRRFLSLEP

SEQ ID NO: 11082 - protein, 1106 aa, Noctua pronuba
MRWTQSINENVMRSYYGATEGGNNRTAYRVRMLSLFQVLEPAVNVSAQRLSDQVRVIQRNRMLDDTVLDRLRTEMQSSHVITPSAQAVVLPQSNTIPNRANDESNDMVTNVSTQCNEEIRSALEGAIREYRSMQPDLRPRIPRLPMHNKNRALVAVLDSQLSNYFDNCEDLTDAHSILYCAAVAACRVAHVKFSDDRATRPKPAVPAWQYRIERRIGGARALIGKLICFREGNTRPRVMRFVRRAFSGTDISPRDYMSRVTERIDFLKQKVYAWANRIRRYKRRVDRYTQNRTFQRDERWVYRAWERPDQGVADTRLPDDDAMCSFWRSIWSVPVSHTEDEWTREVERACDPVQEMGAITISPQDVVCAVRPLPNWKSPGPDGLHNFWIKWFTRSHARLATLFQSALESGSLPEFLTTGITHLLHKSGSTAEPKNYRPITCLPTVYKVLTSILRTKISKHINDNSIMSPSQNGCRNGSRGTKELLLIDMAISQQVRRFRRDLSTCWIDYKKAYDSVPHTWLMRVLELYKVDTTLRTFLMSCMGQWRTVLRYPGCRQIQRDSEPIRIERGIFQGDSLSPLWFCLALNPLSTLLEDSGLGYRLRRGGQVISHLLYMDDLKLFAPNDLQLMELLKVTETFSSAIRMEFGVDKCAVMHVKRGEIVESVRTQLSDSIYLRSLSATETYKYLGMSEALGINVADMKQSLKERFFGRLKKVFNSLLSGGNKVRAFNGWVMPVLMYSFGILKWTQTELDALDRRVRTLLTAYRMHHPRSSVMRLYIPRRCGGRGFLNAKTLHNREICSLREYFLETDVGMHRDVVAVDKGLTPLSLAKENWRKPVVLDTNDRREVWQSKELHGRFFRALHGPDVDLSASVAWLRSGDLFGETEGFVCAIMDEVMMTNNYRRFIVKDGTVDICRACHRPGESIRHIISGCSRLANGEYLHRHNLVARIIHQQLALKYNLVESEVPYYKYVPDPVLENGCVTLYWDRSIITDRTIVANKPDIVVVDRSERRAMIVDITVPHDENLVKAEKDKQIKYLDLAHEVVDLWDVDSAIIVPIVVSAHGLIAKSFDQHLRRLSLGSWIKGLIQKAVLLDTARIVRRFLSLEP

SEQ ID NO: 11083 - protein, 1200 aa, Tinea trinotella
MLTRSRARNQSAQLTSSGSSLSSASQPPRSTPTVSPVISVAAVASSSSDECFSPPMTPPSARRRGGGRPPASLEPRGPSASGGVPATSGRVQRMRWTQSINENVMRSYFGATEGGSSLTAYRGRMLTLFQVLEPAVNVSAQRLSDQVRVIQRNRMLDDVVLDRLRLESRSSHVSPVSPPVAVQLQPSALPRPNNIEENDDDVTISVSNQYNEQLRSALEDAFREYRFTPPGLRPRIPRLPMHKKNRALVCALDSQLVNHFKSSKDLADTHSILYCAAVAVCRVAHVKFPNNDRAARLTVPAWQCRIERRIGEARALIGKLISFREGNTRPRVMRFVRRAFSGTDISSRDYQTRVTERIDFLKQKIYAWANRIRRYKRRVERYTQNRTFQSNERWVYRAWERPDQDVSDMCLPDDDAMSLFWRNIWSVPVGHTESEWTLEVERACDLIPEMGAIIISPQDVACAVRPLSNWKSPGLDGLHNFWIKYFQRSHARLAAQFQSALELGSLPQFLTTGITHLLHKSGSTAEPKNYRPITCLPTVYKVLTSILRAKIDKHIDTNCIMSASQNGCRSGSRGTKELLLIDVAISQQVRRSRRDLSTCWIDYKKAYDSVPHTWLMRVLELYKVDAALRTFLVSCMGQWRTVLHYPGCRRILGNGEPIKIERGIFQGDSLSPLWFCLALNPLSTLLDGSGQGYRLRRDGQVISHLLYMDDLKLFAPNNLQLMKLLKVTETFSSAISMEFGVDKCAIMHVKRGEIMESVGTQLSDSIHLRSLCSTETYKYLGMSEALGINAVDVKQSLRDRFFGRLNKVLNSLLSGGNKVRAFNGWVMPVLMYSFGILKWTQTELDALDRRVRTLLTANRMHHPRSSVMRLYIPRKCGGRGFLNAKTLHNREVCSLREYFLKTDVGMHRDVVAVDKGLTSLSLANENWRKPVVLDANDRREVWQSKELHGRFYRALHGPDVDFLASVSWLRFGDLFGETEGFVCAIMDEVMMTNNYRKYIVKDGTVDICRACHRPGESIRHIISGCSRLANGDYLHRHNLVARIIHQQLALKYNLVESEVPYYRYVPDPVLENGNITLYWDRSIITDRTIVANKPDIVVIDRLERRTIIVDVAVPHDENLVKAEKDKQIKYLDLAREVVDMWEVDTAIIVPIVVTANGLIAKSLDEHLKRLSLGSWIKRLIQKAVLLDTARIVRRFLSQEP

SEQ ID NO: 11084 - protein, 1200 aa, Tinea trinotella
MLTRSRARHQRTQLPSSGSSLSSASQPPESMPTVSPVISVAAVASSSSDECFSPPTISPSARRRGGGRPPASLEPRGPSASGGVPATSGRVQRMRWTQSINENVMRSYFGATEGGISLTAYRGRMLTLFQVLEPAVNVSAQRLSDQVRVIQRNRMLDDVVLDRLRLESRSSHVSPVSPPVAVQLQPSALPRPNNIEENDDDVTISVNNQYNEQLRSALENAFWEYRSTPPGLRPRIPRLPMHKKNRALVCALDSQLANQFESSKDLADTHSILYCAAVAVCRVAHVKFPNNDRAARLAVPAWQCRIERRISDARALIGKLISFREGNTRPRVMRFVRRAFSGTDISSRDYQTRVTERIDFLKQKIYAWANRIRRYKRRVERYTQNRTFENNERWVYRAWERPDQDVSDTCLPDDDAMSLFWRNIWSVPVGHTEGEWTREVERACDLIPEMGAINISPQDVACAVRPLPNWKSPGLDGLHNFWIKYFQRSHACLAAQFQSALELGSLPQFLTTGITHLLHKSGSTAEPKNYRPITCLPTVYKVLTSILRAKINNHIDANCIMSASQNGCRSGSRGTKELLLIDVAISQQVRRSRRDLSTCWIDYKKAYDSVPHTWLMRVLELYKVDAALRTFLVSCMGQWRTVLHYPGCRRILGNGEPIKIERGIFQGDSLSPLWFCLALNPLSTLLDGSGQGYRLRRDGQVISHLLYMDDLKLFAPNNLQLMKLLKVTETFSSAISMEFGVDKCAIMHVKRGEIMESVGIQFSDSIHLRSLCSTETYKYLGMSETLGINAVDVKQSLRDRFFGRLNKVLNSLLSGGNKVRAFNGWVMPVLMYSFGILKWTQTELDALDRRVRTLLTANRMHHPRSSVMRLYIPRKCGGRGFLNAKTLHNREVCSLREYFLKTDVGMHRDVVAVDKGLTSLSLANENWRKPVVLDANDRREVWQSKELHGRFYRALHGPDVDFLASVSWLRFGDLFGETEGFVCAIMDEVMMTNNYRKYIVKDGTVDICRACHRPGESIRHIISGCSRLANGDYLHRHNLVARIIHQQLALKYNLVESEVPYYRYVPDPVLENGNITLYWDRSIITDRTIVANKPDIVVIDRLERRTIIVDVAVPHDENLVKAEKDKQIKYLDLAREVVDMWEVDAAIIVPIVVTANGLIAKSLDKHLKRLSLGSWIKRLIQKAVLLDTARIVRRFLSQEP

SEQ ID NO: 11085 - protein, 999 aa, Spilosoma lubricipeda
MTVSTQCNDRIRRALEDAIQEYRHVDYKNRPRLPRLPIHKRNLALVSALNSLLPDYFGNSEDLSDTHSILYCAAIAVCRVAGVKFVEQITTTRPKNEVPAWQCRIERRITETRTLIGKLITFQSGNTRPRVMRFVKQAFLGTTISPQQYMSSVTERIDFLKQKVYAWANRIRRYRKRVDRFIQNRMFQRNEKWVYRKWEEPSPRVGEGRFPDENVTNTFWRNIWSVPVTHTEGDWYRDVERSCESITSMEPITISKDDIGCAVRSLPNWKSPGPDGLHNFWLKWFRNSHACLASQYQAAVDSGSLPQFLTTGITHLLYKSGSAMDPKNFRPITCLPTMYKLLTSILRLKISTHINNNLIMSISQNGCRSGSRGTKELLIIDMTISQQVRRNRKSLATCWIDYKKAYDSVPHTWLLRVLELYKIDTTLCTFLKSCMGQWRTVLRYPGCRQTAVNDVLINIERGIFQGDSLSPLWFCLALNPLSALLEDSGLGYRLQKDDQVISHLFYMDDLKLLAPTKLQLTALLKVTENFSNSIKMEFGVDKCAVMYVKKGVIVESEGTELSDSTRLRSLSATETYKYLGFSQSLGIPESDMKQSLRERFFGRLKKVLKSLLSGGNKVRAYNGWVMPVLMYSFGILRWTQTELDALDRRVRTLLTAFRMHHPRSSVMRLYIPRKFGGRSLLNAKTLHNREIYNLREYFLHTDVGVHRSVVTVDTGLTPLALAKENWRKPVVLSTNDRREVWKGKELHGRFYRALNGPDIDFKASTSWLRYGDLFGESEGFVCAIMDEVIMTNNYRKYILKDGTVDICRACHRPGESIRHIISGCSRLANGEYLHRHNRVARIVHQQLALKYHLVSSEVPDYRYVPDPVLENGRATLYWDRSIITDRTIVANKPDIVVIDRLERRAMIVDIAVRHDENLVKVEKEKQIKYLDLSHEIVDMWNVDSAIIVPIVVSAHGLIAKSLDQHLKRLTLEGWIKGLMQKAVLLDTARIVRRFLSLEP

SEQ ID NO: 11086 - protein, 1198 aa, Spilosoma lubricipeda
MLTRAKLRAQLSPPDSSLCSALPPREATVEVSAVAEASSSSSSDEFFSPPTSPTPVRRQGRGRPPTSLGSRGPLTSNRAPATGGDVRRMKWTRSINENVMRAYFRATELGTNLTAYRVRLVSLFQELEPAVNVSAQRLSDQVRAIQRCHLLDDVVLERIRSDVRNTLTVPSSSHAVDVVGNTQQLPYNEDVDEQVESEIISVSTQYNDRIRSALEDAIQDYRYVNYNNRPWLPRLPIHKRNLALVSALNSLLPDYFGNSEDLSDTHSILYCAAIAVCRVAGIKFNVEQITTRPKNTVPAWQYRIERRIAETRTLIGKLIAFKFGNTRPRVTRFVKQAFLGTTISPQQYMSSVTERIDFLKQKVYAWANRIRRYKKRGDRFNQNRMFQRNEKWVYRKWEAPNPCESDGDLPDENTTNSFWRNIWSVPVTHTDGDWMRDVSRSCESITSMEPVIINEDDISCAVRSLPNWKSPGPDGLHNFWLKWFRSSHACLASQLQAALDSGSLPQFLTTGITHLLYKSGSAMDPKNFRPITCLPTLYKLLTSILRLKITKHINNNSIISVSQNGCRSGTRGTKELLITDMTISQQVRRNRKSLATCWIDYKKAFDSVPHTWLLKVLELYKIDTTLCTFLKSCMRQWRTVLRYPGCRQTAVNDVPIKIERGIFQGDSLSPLWFCLALNPLSTLLEGSGLGYRLQKEAPVISHLFYMDDLKLFAPTKLQLTALLRVTENFSNSIKMEFGIDKCAVMHVKKGVIVESEGIELSDSTRLRSLSATETYKYLGFSQSLGIPESDMKQSLRERFFGRLKKVLKSLLSGGNKVRAYNGWVMPVLMYSFGILRWTQTELDALDRRVRTLLTAFRMHHPRSSVMRLYIPRKFGGRGLLNVKTLHNREIYNLREYFLHTDVGVHRSVVAVDTGLTPLALAKENWRKPVVLGTNERREVWKGKELHGRFYRALNGSDIDFKASTSWLRYGDLFGETEGFVCAIMDEVIMTNNYRKYILKDGTVDICRACHRPGESIRHIISGCSRLANGEYLHRHNQVARIVHQQLALKYKLVSSEVPYYRYVPDPVLENGRATLYWDRSVITDRTIVANKPDIVVIDRSERRAMIVDIAVPHDENLVKVEKEKQIKYLDLSHEIVEMWDVDSVIIVPIVVSVHGLIAKSLDQHLKRLTLDGWIKGLMQKAVLLDTARIVRRFLSLEP

SEQ ID NO: 11087 - protein, 962 aa, Autographa pulchrina
MHNRNKAIMGVLDSLLLVYFGSSEDLSDTHSILYCAALTACRVSNVKINNINLDTRPKPAVPAWQCRIERRVAEARALIGKLIAFKDGNSRPRVMRFVRRAFTGTNISPSEYTARVTERIDFFKQKVCAWASRIRRYKCRVDRFHQNRMFQRDQRWVFRTWERPVLGMDDRRLPDEDATNSFWRNIWSVPVSHSEGDWMRDVEKSCEPIQEMGAITISPQDVANAIGPMSNWKTPGPDGLQNFWLKWFRSSHGCLASQFQYAIESDALPQFFTTGSTHLLHKTGSTTDPKNYRPITCLPTIYKLLTSILRVKINEHIDSHSIMSASQNGCRNRSRGTKELLLIDMTICQQVRRSKKNVSTCWIDYKKAYDSVPHSWLMRVLELYKINTTLRAFLSSCMRRWTTVLRYPGCRDIQQSGEPIRIERGIFQGDSLSPLWFCLALNPLSTLLENSRLGYSLRRGSQVISHLLYMDDLKLFASNELQLMGLLKITESFSNSIRMEFGVDKCAVMHVKQGGIVESQGIQLSDSINLRSLSAADTYKYLGMSEALGINVADMKQSLLTRFFGRLNKVLKSLLSGGNRVRAFNGWVMPVLMYSFGILKWTQTELDALDRRVRTLLTANRMHHPRSSVMRLYIPRKCGGRGFLNAKTPHNREVCNLREYFLQVDVGMHRDVVAVDKGFTPLSLGKENWHKPVVLSVKDRRDVWQSKELHGRFYRSLNGPDVDFLASVAWLRFGDLFGETEGFVCAIMDEVIMTNNYRKYIIKDGTVDICRACHCPGESIRHIISGCSRLANGEYLHRHNQVARIIHQQLALRYKLVEAEVPYYRYVPDPVLDNGHVTLYWDRSIITDRTIVANKPDIVVIDRSERRAMIVDVTVPHDENLVKAEKEKQMKYLDLAHEVVDMWEVDSAIIVPIVITANGIIAKSLDQHLKRLSLDIWVKGLIQKAVLLDTARIVRRFLSLEP

SEQ ID NO: 11088 - protein, 1095 aa, Ochropleura plecta
MRSYYGATEGGNNLTAYRVRMLSLFQVLEPAVNVSAQRLSDQVRVIQRNRMLDDTVLDRLRTEMQSSQVITSSSQAVVPPQPHQLINRVNEVSNDVATNVSTQCSEEMRSTLEGAIREYRYMSPELRPRLPRLPMHNKNRALVAALDSQLSSYFDNCENLTDAHSILYCAAVTVCRVAHVKFPDDRATRPKPAIPFWQCRIERRIGAARALIGKLTCFREGNTRPRVMRFVRRAFAGTDISPPDYISRIAERIDFLKQKVYAWANRIRRYKRRVERYTQNRTFQSDERWVYRAWERPDQGVSDTHLPDDNAMCLFWRSIWSVPVSHTEGEWTREVERACDPIPEMGALTISPQDVACAVRPLPNWKSPGPDGLHNFWIKWIQRSHVRLAALFQKALESGSLPKFLTTGITHLLHKSGSTAEPKNYRPITCLPTLYKVLTSILRAKITKHIDDNSIMSASQNGCRNGSRGTKELLLIDMAISQQVRRSRRHLSTCWIDYKKAYDSVPHTWLMRVLELYKIDATLRTFLISCMRQWSTVLRYPGCRQIQRNSEPIRIERGIFQGDSLSPLWFCLALNPLSTLLENSGLGYRLRRGGQVISHLLYMDDLKLFAPNDLQLMELLKVTETFSSSIRMEFGVDKCAVMHVKRGEIVESVGTQLSDSINLRSLSATETYKYLGMSEALGINVADMKQSLKERFFGRLRKVFNSLLSGGNKVRAFNGWVMPVLMYSFGILKWTQTELDALDRKVRTLLTTFRMHHPRSSVMRLYIPRSCGGRGFLNAKTLHNREICSLREYFLETDVGMHRDVVAVDKGFTPLSLAKENWRKPVVLDTNDRREVWQSKELHGRFFRALHGPDVDQPASVAWLRSGDLFGETEGFVCAIMDEVMMTNNYRRFIVKDGTVDICRACHRPGESIRHIISGCSRLANGEYLHRHNLVARIIHQQLALKYSLVESEVPYYRYEPDPVLEHGNITLYWDRSIITDRTIVANKPDIVVVDRSERRAMIVDITVPHDENLVKAEKDKQIKYIDLAREVVDMWDVDSAIIVPIVVSANGLIAKSLDQHLRRLSLGSWIKGLIQKAVLLDTARIVRRFLSLEP

SEQ ID NO: 11089 - protein, 1198 aa, Ochropleura plecta
MLTRAAQARNARHPPPGSSLSSASPPPEPSLVVSAVTPAVAVASSSSDEYFSPPTTPPPVRRRGRHRPPDGLGPRGPPASDRVPAPGGSVQRMRWTQSINENVMRSYYGATEGGNNLTAYRVRMLSLFQVLEPAVNVSAQRLSDQVRVIQRNRMLDDTVLDRLRTEMQSSQVITSSSQAVGPPQPHQLINRVNEVSNDVATNVSTQCSEEMRSTLEGAIREYRYISPELRPRLPRLPMHNKNRALVAALDSQLSSYFDNCENITDAHSILYCAAVTVCRVAHVKFPDDRATRPKPAIPFWQCRIERRIGAARALIGKLTCFREGNTRPRVMRFVRRAFAGTDISPPDYISRIAERIDFLKQKVYAWANRIRRYKRRVERYTQNRTFQSDERWVYRAWERPDQGVSDTRLPDDDAMSLFWRSIWSVPVSHTEGEWTREVERACDPIPEMGALTISPQDVACAVRPLPNWKSPGPDGLHNFWIKWIQRSHVRLAALFQSALESGSLPKFLTTGITHLLHKSGSTAEPKNYRPITCLPTLYKVLTSILRAKITKHIDDNSIMSASQNGCRNGSRGTKELLLIDMAISQQVRRSRRHLSTCWIDYKKAYDSVPHTWLMRVLDLYKIDATLRTFLISCMRQWSTVLRYPGCRQIQRNSEPIRIERGIFQGDSLSPLWFCLALNPLSTLLENSGLGYRLKRGGQVISHLLYMDDLKLFAPNDLQLMELLKVTETFSSAIRMEFGVDKCAVMHVKRGEIVESVGTQLSDSINLRSLSATETYKYLGMSEALGINVADMKQLLKERFFGRLRKVFNSLLSGGNKVRAFNGWVMPVLMYSFGILKWTQTELDALDRKVRTLLTAFRMHHPRSSVMRLYIPRSCGGRGFLNAKTLHNREICSLREYFLETDVGMHRDVVAVDKGLTPLSLAKENWRKPVVLDTNDRREVWQSKELHGRFFRALHGPDVDQSASVAWLRSGDLFGETEGFVCAIMDEVMMTNNYRRFIVKDGTVDICRACHRPGESIRHIISGCSRLANGEYLHRHNLVARIIHQQLALKYNLVESEVPYYRYEPDPVLEHGYITLYWDRSIITDRTVVANKPDIVVVDRSERRAMIVDITVPHNENLVKAEKDKQIKYIDLAREVVDMWDVDSAIIVPIVVSANGLIAKSLDQYLRRLSLGSWIKGLIQKAVLLDTARIVRRFLSLEP

SEQ ID NO: 11090 - protein, 974 aa, Ochropleura plecta
MSPELRPRLPRLPMHNKNRALVAALDSQLSSYFDNCENLTDAHSILYCAAVAVCRVAHVKFPDDRATRPKPAVPFWQCRIERRIGAARALIGKLICFREGNTRPRVMRFVRRAFSGTDITPPDYMSRIAERIDFLKQKVYAWANRIRRYKRRVERYTQNRTFQSDERWVYRAWERPDQGVSDTHLPDDNAMCLFWRSIWSVPVRHTEGEWTREVERACDPIPEMGALTISPQDVACAVRPLPNWKSPGPDGLHNFWIKWIQRSHVRLAALFQTALESGSLPKFLTTGITHLLHKSGSTAEPKNYRPITCLPTLYKVLTSILRAKITKHIDDNSIMSASQNGCRNGSRGTKELLLIDMAISQQVRRSRRHLSTCWIDYKKAYDSVPHTWLMRVLELYKIDATLRTFLISCMRQWSTVLRYPGCRQIQRNSEPIRIERGIFQGDSLSPLWFCLALNPLSTLLENSGLGYRLRRGGQVISHLLYMDDLKLFAPNDLQLMELLKVTETFSSSIRMEFGVDKCAVMHVKRGEIVESVGTQLSDSINLRSLSATETYKYLGMSEALGINVADMKQSLKERFFGRLRKVFNSLLSGGNKVRAFNGWVMPVLMYSFGILKWTQTELDALDRKVRTLLTTFRMHHPRSSVMRLYIPRSCGGRGFLNAKTLHNREICSLREYFLETDVGMHRDVVAVDKGFTPLSLAKENWRKPVVLDTNDRREVWQSKELHGRFFRALHGPDVDQPASVAWLRSGDLFGETEGFVCAIMDEVMMTNNYRRFIVKDGTVDICRACHRPGESIRHIISGCSRLANGEYLHRHNLVARIIHQQLALKYSLVESEVPYYRYEPDPVLEHGNITLYWDRSIITDRTIVANKPDIVVVDRSERRAMIVDITVPHDENLVKAEKDKQIKYIDLAREVVDMWDVDSAIIVPIVVSANGLIAKSLDQHLRRLSLGSWIKGLIQKAVLLDTARIVRRFLSLEP

SEQ ID NO: 11091 - protein, 1200 aa, Hecatera dysodea
MLTRSRAQAQTAQATSSGSSLSSASQPPGPAPPVSPEIPVAAVASSSSDEYFSPPTTPPPARRRGRGRPPTSLGPRGPPASDRVPAIGGSVQRMRWTQSINVNVMRSYFGATEGGTNLTAYRGRMLSLFQVLEPAVNVSAQRLSDQVRVIQRNNMLDDAVLDRLRLESRSSCVSTASPPVTAQQRTSVLPRPDHDGEEDEDRAISVSSQCNEQLRSALEDAFREYRSTPPELRPRLPRLPMHNKNRALVCALDSQLSIYFDSSENLTDTHSILYCGAAAACRVAHVKLPNSDRVARPAVPAWQCRIERRIAEARALIGKLICFREGNTRRRVMRFVRRAFSGTDISPRDYLTRVTERIDFLKQKVYAWANRIRRYKRRVERYTQNRIFQRNERWVYRAWERPDQGVTDTRLPDDEAMLSFWRNIWSVPVSHTEGDWTREVERACDPIPEMGAINISPQDVARAVRPLPNWKSPGPDGLHNFWIKWFKGSHARLAAQFQTALESGSLPKFLTTGITYLLHKSGSTSEPKNYRPITCLPTVYKVLTSILRAKINNHIDSNSIMSASQNGCRNGSRGTKELLLIDVAISQQVRRSRRDLSTCWIDYKKAYDSVPHTWLMRVLELYKVDAVLRTFLMSCMGQWRTVLHYPGCRQTQANSEPIRIERGIFQGDSLSPLWFCLALNPLSTLLEGSGQGYRLRRGGQVISHLLYMDDLKLFAPNNLQLMKLLKVTETFSSDISMEFGVDKCAVMHVKRGEIMESVGTQLSDSIHLRSLCSTETYKYLGMSEALGINATGVKQSLKERFFGRLNKVLNSLLSGGNKVRAFNGWVMPVLMYSFGILKWTQTELDALDRRVRSLLTANRMHHPRSSVMRLYIPRKCGGRGFLNAKTLHNREVCSLREYFLEADVGMHRDVVAVDKGLTPLSLANENWRKPVVLDTNVRREVWKSKELHGRFYRVLHGPDVDFLASVAWLRFGDLFGETEGFICAITDEVMMTNNYRKYIVKDGTVDICRACHRPGESIRHIISGCSSLANGDYLHRHNLVARIIHQQLALKYNLVESEVPYYRYAPDPVLENGNCTLYWDRSIITDRTIVANKPDIVVIDRLERRAMIVDIAVPHDENLVKAEKDKQSKYLDLAHEVVDMWNVNTAVIVPIVVTANGIIAKSLDQHLKRLSLGSWIKGLIQKAVLLDTARIVRRFLSREP

SEQ ID NO: 11092 - protein, 868 aa, Hecatera dysodea
MRFVRRAFSGTDISPRDYLTRVTERIDFLKQKVYAWANRIRRYKRRVDRYTQNRIFQNNERWVYRAWERPDQGVTDTRLPDDEAMLSFWRNIWSVPVSHTEGDWTREVERACDSIPEMGAINISPQDVARAVRPLPNWKSPGPDGLHNFWIKWLTRSHARLASQFQSALESRSLPQFFTTGITHLLHKSGSTADPKNYRPITCLPTVYKVLTSILRAKINDHIESNSIMSTSQNGCRSGARGTKELLLIDVAISQQVRRSRKDLSTCWIDYKKAYDSVPHTWLMRVLELYKVDAVLRAFLMSCMGQWRTVLHYPGCRQTQANSEPIRIERGIFQGDSLSPLWFCLSLNPLSTLLEGSGQGYRLRRGGQVISHLLYMDDLKLFAPNNLQLMKLLKVTETFSSDISMEFGVDKCAVMHVKRGEIMESVGTQLSDSIHLRSLCSTETYKYLGMSEALGINATGVKQSLKERFFGRLNKVLNSLLSGGNKVRAFNGWVMPVLMYSFGILKWTQTELDALDRRVRSLLTANRMHHPRSSVMRLYIPRKCGGRGFLNAKTLHNREVCSLREYFLEADVGMHRDVVAVDKGFTPLSLANENWRKPVVLDTNDRREVWQSKELHGRFYRVLHGPDVDFLASVAWLRFGDLFGETEGFICAITDEVMMTNNYRKYIVKDGTVDICRACHRPGESIRYIISGCSSLANGDYLHRHNLVARIIHQQLALKYNLVESEVPYNRYAPDPVLENGNCTLYWDRSIITDRTIVANKPDIVVIDRLERRAMIVDIAVPHDENLVKAEKDKQSKYLDLAREVVDIWDVNTAVIVPIVVTANGIIAKSLDQHLKRLSLGSWIKGLIQKAVLLDTARIVRRFLSREP

SEQ ID NO: 11093 - protein, 1200 aa, Hecatera dysodea
MLTRSRTRAQTTQSTSSGSSLSSASQPPGPTPAVSPEIPVAAVASSSSDEYFSPPTTPPPARRRGRGRPPTSLGPRGPPASDRVPAIGGSVQRMRWTQSINENVMRSYFGATEGGTNLTAYRGRMLSLFQVLEPAVNVSAQRLSDQVRVIQRNRMLDDAVLDRLRLESRSSRVSPASPPAAVQIQPSISPRPDHVSEDVDDGAITVSTQCNERLRSALEDAFREYRSTPPGLRPRLPRLPMHNKNRALVCALDSQLENCFNSSKDLADTHSILYCAAAAACRVAHVKFPNSDRAARPAVPAWQCRIERRIGEARALIGKLICFREGNTRRRVMRFVRRAFSGTDISPRDYLTRVTERIDFLKQKVYAWASRIRRYKRRVERYTQNRTFQSNERWVYRAWERPDQVVTDTHLPDDDAMCSFWRSIWSVPVSHTEGDWTREVERTCDPIPEMGAITISPQDVARAVRPLLNWKSPGPDGLHNFWIKWFTRSHARLASQFQSALESRSLPQFLTTGITHLLHKSGSTAEPKNYRPITCLPTVYKVLTSILRAKINDHIESNSIMSTSQNGCRNGARGTKELLLIDVAISQQVRRSRKDLSTCWIDYKKAYDSVPHTWLMRVLELYKVNTVLRTFLMSCMGQWRTVLHYPGCRQTQANSEPIRIERGIFQGDSLSPLWFCLALNPLSTLLEGSGQGYRLRRGGQVISHLLYMDDLKLFAPNNLQLMKLLKVTETFSSDISMEFGVDKCAVMHVKRGEIMESVGTQLSDSIYLRSLCSTETYKYLGMSEALGINATSVKQSLKERFFGRLNKVLNSLLSGGNKVRAFNGWVMPVLMYSFGILKWTQTELDALDRRVRSLLTANRMHHPRSSVMRLYIPRKCGGRGFLNAKTLHNREVCSLREYFLEADVGMHRDVVAVDKGFTPLSLANENWRKPVVLDTNDRREVWQSKELHGRFYRVLHGPDVDFLASVAWLRFGDLFGETEGFICAITDEVMMTNNYRKYIVKDGTVDICRACHRPGESIRHIISGCSSLANGDYLHRHNLVARIIHQQLALKYNLVESEVPYYRYVPDPVLENGNCTLYWDRSIITDRTIVANKPDIVVIDRLERRAMIVDIAVPHDENLVKAEKDKQSKYLDLAREVVDMWNVNTAVIVPIIVTANGIIAKSLDQHLKRLSLGSWIKGLIQKAVLLDTARIVRRFLSREP

SEQ ID NO: 11094 - protein, 1107 aa, Mythimna impura
MRWTSSINENVMRSYFGATEGGINLTAYRGRMLSLFQVLEPAVNVSVQRLSDQVRVIQRNRMLDDAVLDRLRLESQSSRVSPATTPAAVQRLPTASPRPVQVGDADDDAAISVSTQCNDRLRGALEDAFREYRSTPPGLRPRLPRLPMHKRNRALVCALDSQLSNCFDSSKDLTDTHSILYCAAVAACRVAHVKFPNCDRATRPAVPAWQCRIEHRIGEARALIGKLICFREGNTRPRVMRFVRRAFSGTDISPRDYLPCVTERIDFLKQKIYAWANRIRRYKRRVERYTRNRTFQSNERWVYRDWERSDQGVTDTRLPDDDAMCSFWRSIWSAPVSHTEGDWIREVERACDLLPEMGAITISPQDVARAVRPLPNWKSPGPDGLHNFWVKWFQRSHARLASQFQSALESGSLPQFLTTGITHLLHKSGSTAKPKNYRPITCLPTVYKVLTSILRAKINSHIETNSIMSASQNGCRNGSRGTKELLLIDIAISQQVRRSRKNLSACWIDYKKAYDSVPHTWLMRVLELYKVDATLRTFLMSCMGQWRTVLHYPGCRQIQENNEPIRIERGIFQGDSLSPLWFCLALNPLSTLLEGSGLGYRLKRGGQVISHLLYMDDLKLFAPNNLQLVKLLKVTKTFSSAIRMEFGVDKCAVIHVKRGEIMESVGIQLSDSIHLRSLCSTETYKYLGMSESLGINTDDVKQSLKERFFGRLNKVLNSLLSGGNKVRAFNGWVMPVLMYSFGILKWTQTELDALDRRVRTQLTANRMHHPRSSVMRLYIPRKCGGRGFLNAKTLHNREVCSLREYFLKTDVGMHRDVVAVDKGLTPLSLANENWRKPIVLDTNDRREVWQSKELHGRFYRALHGPDVDLLASVSWLRFGDLFGETEGFVFAIMDEVMMTNNYRKYIVKDGTVDICRACHRPGESIRHIISGCSHLANGDYLHRHNLVARIIHQQLALKYNLVESEVPYYRYVPDPVLDNGNITLYWDRSIITDRTIVANKPDIVVIDRLERRTMIVDIAVPHDENLVKAEKDKQTKYLDLAREVVDMWEVDRAIIVPIVVTANGLIAKSLEQHLRRLSLGSWIKGLIQKAVLLDTARIVRRFLSQEP

SEQ ID NO: 11095 - protein, 1035 aa, Mythimna impura
MSNHAIAPSSQPVVPVMVPPSYHLSDHADEEITDMVTHVSTQCNNELRSALECAIREYRNMPLELRPRLPRLPMHNKNKALVAALDLQLSNYFDDCEDLTDTHSIMYCAAVAACRVAHVKFPSCDVSTRPKPAVPAWQCRIERRIGGARALIGKLICFREGNTRPRVMRFVRRAFSGTDISPRDYMSRVTERIDFLKQKVYAWANRIRRYKRRVERYTQNRTFRSNERWVYRAWERPDQGVTDTRLPDDNAMSSFWRSIWSVPVSHTEGDWTREVERACDPIPQMGAIDISPQDVARAVRPLPNWKSPGPDGLHNFWIKWFTRSHARLAYQFQSALESGSLPQFLTTGITHLLHKSGSTAEPKNYRPITCLPTVYKVLTSILRSKINSHIDKNLIMSPSQNGCRNGSRGTKELLLIDMTISQQVRRFRKDLSTCWIDYKKAYDSVPHTWLMRVLELYKIDTTLRTFLMSCMRQWSTVLRYPGCRHIQRNSEPVRIERGIFQGDSLSPLWFCLALNPLSTLLENSGLGYRLKRGGQVISHLLYMDDLKLFAPNNLQLMELLKVTETFSSAIRMEFGVEKCAVMHVKRGEVVESVGTQLTDSINLRSLSPTETYKYLGMSEALGINITDMKQSLKERFFGRLKKVFNSLLSGGNKVRAFNGWVMPVLMYSFGVLKWTQTELDALDRRVRTLLTAYRMHHPRSSVMRLYIPRKCGGRGFLNAKTLHNREVCSLREYFLATDVGMHRDVVAVDKGLTPLSLANENWRKPVVLDTNDRREVWQSKELHGRFFRAFHGPDVDQLASVAWLRFGDLFGETEGFVCAIMDEVIMTNNYRRFIVKDGTVDICRACHRPGESIRHIISGCSRLANGEYLHRHNLVARIIHQQLALKYSLVESEVPYYRYEPDPVLDNGHITLYWDRSIITDRTIVANKPDIVVVDRSERRAMIVDISVPHDENLVKAEKDKQIKYIDLAREVVDMWDVDSAIIVPIVVSANGLIAKSLDQHLRRLALGGWIKALIQKAVLLDTARIVRRFLSLEP

SEQ ID NO: 11096 - protein, 1198 aa, Mythimna impura
MLTRAAARRARLPPPASSLSSASPPPEPSLSAVTPAVAVASSSSDEYFSPPTSPPPARRRRGCRPPSGLGPRGPPASDRVPAPGGSVQRMRWTQSINENVMRAYYGATEGGNNLTAYRVRMLSLFQVLEPAVNVSAQRLSDQVRVIQRNHMLDDTVLDRLRTEMSNHAIAPSSQSVVPVMVPPSYHLSDHVDEEITDMVTHVSTQCNNELRSALECAIREYRNMPLELRPRLPRLPMHNKNKALVAALDLQLSNYFDDCKDLTDTHSIMYCAAVAACRLAHVKFPNCDVATRPKPAVPAWQCRIERRIGGARALIGKLICFREGNTRPRVMRFVRRAFSGTDISPRDYMSRVTERIDFLKQKVYAWANRIRRYKRRVDRYTQNRTFRSNEKWVYRAWERPDQGVTDACLPDDDAMSSFWRSIWSVPVSHTEGDWTREVERACDPIPQMGAIDISPQDVARAVRPLPNWKSPGPDGLHNFWIKWFTRSHARLAYQFQSALESGSLPQFLTTGITHLLHKSGSTAEPKNYRPITCLPTVYKVLTSILRSKINSHIDKNLIMSPSQNGCRNGSRGTKELLLIDMTISQQVRRSRKDLSTCWIDYKKAYDSVPHTWLMRVLELYKIDTTLRTFLMSCMRQWSTVLRYPGCRHTQRNSEPVRIERGIFQGDSLSPLWFCLALNPLSTLLENSGLGYRLKRGGQVISHLLYMDDLKLFAPNNLQLMELLKVTETFSSAIRMEFGVDKCAVMHVKRGEVVESVGTQLTDFINLRSLSPTETYKYLGMSEALGINITDMKQSLKERFFGRLKKVFNSLLSGGNKVRAFNGWVMPVLMYSFGVLKWTQTELEALDRKVRTLLTAYRMHHPRSSVMRLYIPRKCGGRGFLNAKTLHNHEVCSLREYFLAADVGMHRDVVTVDKGLTPLSLANENWRKPVVLDTNDRREVWQSKELHGRFFRALHGPDVDQLASVAWLRSGDLFGETEGFVCAIMDEVIMTNNYRRFIVKDGTVDICRACHRPGESIRHIISGCSRLANGEYLHRHNLVARIIHQQLALKYSLVESEVPYYRYEPDPVLDNGHITLYWDRSIITDRTIVANKPDIVVVDRSERRAMIVDISVPHDENLVKAEKDKQIKYIDLAREVVDMWDVDSAIIVPIVVSGNGLIAKSLDQHLRRLALGDWIKGLIQKAVLLDTARIVRRFLSLEP

SEQ ID NO: 11097 - protein, 1200 aa, Mythimna impura
MLTRAAARRARHPPPGSPLSSASPPPDLGSPVSPVAAVASSSSDEYFSPPTSPTPVRRPGRGRPPKSLGPGGQPAPSRVPAAGGCVQRMRWTQSMNENVMRAYYGSTEGGTSLTAYRDRMLSLFQDLEPTVNVSAQRLSDQVRFIQRNHRLDDAALDRLRSEVLSNQIVSTSIQTQTAATPTTNAISPRSILNNDDADERVVTVSSQCNDELRSALEDALREYRLTPTELRPRLPRLPMHKKNRALVCTLDSLLKNIFESSENLVDTHSILYCGAVAACRLANIKFPNTDGTIRPKPAVPAWQYRIERRIDGARVLIGKLHSFREGNTRPRVMRFVRRAFLGTSISPQEYMSRVTERIDFLKQKVCAWASRIRRYKRRVDRYSQNRIFQSDERWVYRAWERPEQNVIDGLRPDDFATITFWRNIWSVPVSHTEGGWIREVERVCEAIPEMEKITISPADVAKAVRPLPNWKSPGPDGLQNFWLKWYRNSHAPLASQFQSTLESGSLPEYLTTGVTHLLHKTGNPAEPKNYRPITCLSTVYKLLTSILREKINRHIENNSIMSASQNGCRNGSRGTKELLLIDMAVSQQARRSRKDLSTCWIDYKKAYDSVPHTWLMRVLELYKIDTILRTFLESCMRQWKTVLRYPGCRPIQGDDEPIRIKRGIFQGDSLSPLWFCLALNPLSTLLEDSGLGYRLRRGGQAISHLLYMDDLKLFAPSNLQLMELLKVTETFSSAIRMEFGVDKCAAMHVKQGEIMESEGIQLPDSIHLKSLSSTETYRYLGMSEALGINNADMKQSLKERFFGRLKKVLNSLLSGGNKVRAFNGWVMPVLMYSFGILKWTQTELDALDRRVRTLLTANRMHHPRSSVMRLYISRKCGGRGFLNAKTLHNREVCSLREYFLKTDVGMHRDVVAVDKGLTPLSMAKEDWRKPVVLTTDDRKEVWKGKELHGRFYRALHEPDVDFLASVAWLRFSDLFGETEGFVCAIMDEVILTNNYRKYIMKDGTVDVCRACHRPGESIRHIISGCSRLANGEYLHRHNQVARIIHQQLALKYNLVDSEVPYYKYVPDPVLENDHVTLYWDRSIITDRTIVANKPDIVVIDRLARRAIIVDVTIPHDENLVKAEKEKQIKYLDLAHEVVGMWNMDSAVIVPIVVTANGLIAKSFDDHLSKLSLRGWIKGLIQKAVLLDTARIVRRFLSLEP

SEQ ID NO: 11098 - protein, 1200 aa, Mythimna impura
MLTRAAARRARLPPPASSLSSASPPPESSPTVSAVTPAVAVASSSSDEYFSPPTSPPPARRRRGRRPPSGLGPRGPPASDRVPAPGGSVQRMRWTQSINENVMRAYYGATEGGNNLTAYRVRMLSLFQVLEPAVNVSAQRLSDQVRVIQRNHMLDDTVLDRLRTEMSNHAIAPSSQPVVPVMVPPSYHLSDHADEEITDMVTHVSTQCNNELRSALECAIREYRNMPLELRPRLPRLPMHNKNKALVAALDLQLSNYFDDCEDLTDTHSIMYCAAVAACRVAHVKFPSCDVSTRPKPAVPAWQCRIERRIGGARALIGKLICFREGNTRPRVMRFVRRAFSGTDISPRDYMSRVTERIDFLKQKVYAWANRIRRYKRRVERYTQNRTFRSNERWVYRAWERPDQGVTDTRLPDDDAMSSFWRSIWSVPVSHTEGDWTREVERACDPIPQMGAIDISPQDVARAVRPLPNWKSPGPDGLHNFWIKWFTRSHARLAYQFQSALELGSLPQFLTTGITHLLHKSGSTAEPKNYRPITCLPTVYKVLTSILRSKINSHIDKNLIMSPSQNGCRNGSRGTKELLLIDMTISQQVRRFRKDLSTCWIDYKKAYDSVPHTWLMRVLELYKIDTTLRTFLMSCMKQWSTVLRYPGCRHIQRNSEPVRIERGIFQGDSLSPLWFCLALNPLSTLLENSGLGYRLKRGGQVISHLLYMDDLKLFAPNNLQLMELLKVTETFSSAIRMEFGVEKCAVMHVKRGEVVESVGTQLTDSINLRSLSPTETYKYLGMSEALGINITDMKQSLKERFFGRLKKVFNSLLSGGNKVRAFNGWVMPVLMYSFGVLKWTQTELDALDRRVRTLLTAYRMHHPRSSVMRLYIPRKCGGRGFLNAKTLHNREVCSLREYFLATDVGMHGDVVAVDKGLTPLSLANENWRKPVVLDTNDRREIWQSKELHGRFFRAFHGPDVDQLASVAWLRFGDLFGETEGFVCAIMDEVIMTNNYRRFIVKDGTVDICRACHRPGESIRHIISGCSRLANGEYLHRHNLVARIIHQQLALKYSLVESEVPYYRYEPDPVLDNGHITLYWDRSIITDRTIVANKPDIVVVDRSERRAMIVDISVPHDENLVKAEKDKQIKYIDLAREVVDMWDVDSAIIVPIVVSANGLIAKSLDQHLRRLALGGWIKALIQKAVLLDTARIVRRFLSLEP

SEQ ID NO: 11099 - protein, 1200 aa, Mythimna impura
MLTRSRAQKLHTHPTSSGSSLSSASQPPGPAPTVSPEIPVAAVASSSSDEYFSPPTTPPPARRRGRGRPPASLGPRGPPASDRVPAAGGSVQRMRWTSSINENVMRSYFGATEGGINLTAYRSRMLSLFQVLEPAVNVSVQRLSDQVRVIQRNRMLDDAVLDRLRLESQSSRVSPATTPAAVQRLPTASPRPVQVGDADDDAAISVSTQCNDRLRGALEDAFREYRSTPPGLRPRLPRLPMHKRNRALVCALDSQLSNCFDSSKDLTDTHSILYCAAVAACRVAHVKFPNCDRATRPAVPAWQCRIEHRIGEARALIGKLICFREGNTRPRVMRFVRRAFSGTDISPRDYLPCVTERIDFLKQKIYAWANRIRRYKRRVERYTRNRTFQSNERWVYRDWERSDQGVTDTRLPDDDAMCSFWRSIWSAPVSHTEGDWIREVERACDLLPEMGAITISPQDVARAVRPLPNWKSPGPDGLHNFWVKWFQRSHARLASQFQSALESGSLPQFLTTGITHLLHKSGSTAEPKNYRPITCLPTVYKVLTSILRAKINSHIETNSIMSASQNGCRNGSRGTKELLLIDIAISQQVRRSRKNLSACWIDYKKAYDSVPHTWLMRVLELYKVDATLRTFLMSCMGQWRTVLHYPGCRQIQENNEPIRIERGIFQGVSLSPLWFCLALNPLSTLLEGSGLGYRLKRGGQVISHLLYMDDLKLFAPNNLQLVELLKVTETFSSAIRMEFGVDKCAVIHVKRGEIMESVGIQLSDSIHLRSLCSTETYKYLGMSESLGINTDDVKQSLKERFFGRLNKVLNSLLSGGNKVRAFNGWVMPVLMYSFGILKWTQTELDALDRRVRTLLTANRMHHPRSSVMRLYIPRKCGGRGFLNAKTLHNREVCSLREYFLKTDVGMHRDVVAVDKGLTPLSLANENWRKPIVLDTNDRREVWKSKELHGRFYRALHGPDVDLLASVSWLRFGDLFGETEGFVFAIMDEVMMTNNYRKYIVKDGTVDICRACHRPGESIRHIISGCSHLANGDYLHRHNLVARIIHQQLALKYNLVESEVPYYRYVPDPVLDNGNITLYWDRSIITDRTIVANKPDIVVIDRLERRTMIVDIAVPHDENLVKAEKDKQTKYLDLAREVVDMWEVDKAIIVPIVVTANGLIAKSLEQHLRRLSLGSWIKGLIQKAVLLDTARIVRRFLSQEP

SEQ ID NO: 11100 - protein, 1200 aa, Mythimna impura
MLTRSRAQKLHTHPTSSGSSLSSASQPPGPAPTVSPEIPVAAVASSSSDEYFSPPTTPPPARRRGRGRPPASLGPRGPPASDRVPAAGGSVQRMRWTSSINENVMRSYFGATEGGINLTAYRSRMLSLFQVLEPAVNVSVQRLSDQVRVIQRNRMLDDAVLDRLRLESQSSRVSPATTPAAVQRLPTASPRPVQVGDADDDAAISVSTQCNDRLRGALEDAFREYRSTPPGLRPHLPRLPMHKRNRALVCALDSQLSNCFDSSKDLTDTHSILYCAAVAACRVAHVKFPNCDRATRPAVPAWQCRIEHRIGEARALIGKLICFREGNTRPRVMRFVRRAFSGTDISPRDYLPCVTERIDFLKQKIYAWANRIRRYKRRVERYTRNRTFQSNERWVYRDWERSDQGVTDTRLPDDDAMCSFWRSIWSAPVSHTEGDWIREVERACDLLPEMGAITISPQDVARAVRPLPNWKSPGPDGLHNFWVKWFQRSHARLASQFQSALESGSLPQFLTTGITHLLHKSGSTAEPKNYRPITCLPTVYKVLTSILRAKINSHIETNSIMSASQNGCRNGSRGTKELLLIDIAISQQVRRSRKNLSACWIDYKKAYDSVPHTWLMRVLELYKVDATLRTFLMSCMGQWRTVLHYPGCRQIQENNEPIRIERGIFQGDSLSPLWFCLALNPLSTLLEGSGLGYRLKRGGQVISHLLYMDDLKLFAPNNLQLVELLKVTETFSSAIRMEFGVDKCAVIHVKRGEIMESVGIQLSDSIHLRSLCSTETYKYLGMSESLGINTDDVKQSLKERFFGRLNKVLNSLLSGGNKVRAFNGWVMPVLMYSFGILKWTQTELDALDRRVRTLLTANRMHHPRSSVMRLYIPRKCGGRGFLNAKTLHNREVCSLREYFLKTDVGMHRDVVAVDKGLTPLSLANENWRKPIVLDTNDRREVWQSKELHGRFYRALHGPDVDLLASVSWLRFGDLFGETEGFVFAIMDEVMMTNNYRKYIVKDGTVDICRACHRPGESIRHIISGCSHLANGDYLHRHNLVARIIHQQLALKYNLVESEVPYYRYVPDPVLDNGNITLYWDRSIITDRTIVANKPDIVVIDRLERRTMIVDIAVPHDENLVKAEKDKQTKYLDLAREVVDMWEVDKAIIVPIVVTANGLIAKSLEQHLRRLSLGSWIKGLIQKAVLLDTARIVRRFLSQEP

SEQ ID NO: 11101 - protein, 1200 aa, Mythimna impura
MLTRSRALKLNTHPTSSGSSLSSASQPPGPAPTVSPEIPVAAVASSSSDEYFSPPTTPPPARRRGRGRPPASLGPRGPPASDRVPAAGGSVQRMRWTSSINENVMRSYFGATEGGINLTAYRGRMLSLFQVLEPAVNVSVQRLSDQVRVIQRNRMLDDAVLDRLRLESQSSRVSPATTPAAVQRLPTASPRPVQVGDADDDAAISVSTQCNDRLRGALEDAFREYRSTPPGLRPRLPRLPMHKRNRALVCALDSQLSNCFDSSKDLTDTHSILYCAAVAACRVAHVKFPNCDRATRPAVPAWQCRIEHRIGEARALIGKLICFREGNTRPRVMRFVRRAFSGTDISPRDYLPCVTERIDFLKQKIYAWANRIRRYKRRVERYTRNRTFQSNERWVYRDWERPDQGVTDTRLPDDDAMCSFWHSIWSAPVSHTEGDWIREVERACDLLPEMGAITISPQDVARAVRPLPNWKSPGPDGLHNFWVKWFQRSHARLASQFQSALESGLLPQFLTTGITHLLHKSGSTAEPKNYRPITCLPTVYKVLTSILRAKINSHIETNSIMSASQNGCRNGSRGTKELLLIDIAISQQVRRSRKNLSACWIDYKKAYDSVPHTWLMRVLELYKVDATLRTFLKSCMGQWRTVLHYPGCRQIQENNEPIRIERGIFQGNSLSPLWFCLALNPLSTLLEGSGLGYRLKRGGQVISHLLYMDDLKLFAPNNLQLVELLKVTETFSSAIRMEFGVDKCAVIHVKRGEIMESVGIQLSDSIHLRSLCSTETYKYLGMSESLGINTDDVKQSLKERFYGRLNKVLNSLLSGGNKVRAFNGWVMPVLMYSFGILKWTQTELDALDRRVRTLLTANRMHHPRSSVMRLYIPRKCGGRGFLNAKTLHNREVCSLREYFLKTDVGMHRDVVAVDKGLTPLSLANENWRKPIVLDTNDRREVWQSKELHGRFYRALHGPDVDLLASVSWLRFGDLFGETEGFIFAIMDEVMMTNNYRKYIVKDGTVDICRACHRPGESIRHIISGCSHLANGDYLHRHNLVARIIHQQLALKYNLVESEVPYYRYVPDPVLDNGNITLYWDRSIITDRTIVANKPDIVVIDRLERRTMIVDIAVPHDENLVKAEKDKQTKYLDLAREVVDMWEVDRAIIVPIVVTANGLIAKSLEQHLRRLSLGSWIKGLIQKAVLLDTARIVRRFLSQEP

SEQ ID NO: 11102 - protein, 1200 aa, Mythimna impura
MLTRSRAQKLHTHPTSSGSSLSSASQPPGPAPTVSPEIPVAAVASSSSDEYFSPPTTPPPARRRGRGRPPASLGPRGPPASDRVPAAGGSVQRMRWTSSINENVMRSYFGATEGGINLTAYRSRMLSLFQVLEPAVNVSVQRLSDQVRVIQRNRMLDDAVLDRLRLESQSSRVSPATTPAAVQRLPTASPRPVQVVDADDDAAISVSTQCNDRLRGALEDAFREYRSTPPGLRPRLPRLPMHKRNRALVCALDSQLSNCFDSSKDLTDTHSILYYAAVAACRVAHVKFPNCDRATRPAVPAWQCRIEHRIGEARALIGKLICFREGNTRPRVMRFVRRAFSGTDISPRDYLPCVTERIDFLKQKIYAWANRIRRYKRRVERYTRNRTFQSNERWVYRDWERSDQGVTDTRLPDDDAMCSFWRSIWSAPVSHTEGDWIREVERACDLLPEMGAITISPQDVARAVRPLPNWKSPGPDGLHNFWVKWFQRSHARLASQFQSALESGSLPQFLTTGITHLLHKSGSTAEPKNYRPITCLPTVYKVLTSILRAKINSHIETNSIMSASQNGCRNGSRGTKELLLIDIAISQQVRRSRKNLSACWIDYKKAYDSVPHTWLMRVLELYKVDATLRTFLMSCMGQWRTVLHYPGCRQIQENNEPIRIERGIFQGDSLSPLWFCLALNPLSTLLEGSGLGYRLKRGGQVISHLLYMDDLKLFAPNNLQLVELLKVTETFSSAIRMEFGVEKCAVIHVKRGEIMESVGIQLSDSIHLRSLCSTETYKYLGMSESLGINTDDVKQSLKERFFGRLNKVLNSLLSGGNKVRAFNGWVMPVLMYSFGILKWTQTELDALDRRVRTLLTANRMHHPRSSVMRLYIPRKCGGRGFLNAKTLHNREVCSLREYFLKTDVGMHRDVVAVDKGLTPLSLANENWRKPIVLDTNDRREVWQSKELHGRFYRALHGPDVDLLASVSWLRFGDLFGETEGFVFAIMDEVMMTNNYRKYIVKDGTVDICRACHRPGESIRHIISGCSHLANGDYLHRHNLVARIIHQQLALKYNLVESEVPYYRYVPDPVLDNGNITLYWDRSIITDRTIVANKPDIVVIDRLERRTMIVDIAVPHDENLVKAEKDKQTKYLDLAREVVDMWEVDKAIIVPIVVTANGLIAKSLEQHLRRLSLGSWIKGLIQKAVLLDTARIVRRFLSQEP

SEQ ID NO: 11103 - protein, 1005 aa, Mythimna impura
MLKLSIFLYIIIIIIKIIIISVCAIREYRNMPLELRPRLPRLPMHNKNKTLVAALDLQLSNYFDDCEDLTDTHSIMYCAAVAACRVAHVKFPSCDVSTRPKPAVPAWQCRIERRIGGARALIGKLICFREGNTRPRVMRFVRRAFSGTDISPRDYMSRVTERIDFLKQKVYAWANRIRRYKRRVERYTQNRTFRSNERWVYRAWERPDQGVTDTHLPDDDAMSSFWRSIWSVPVSHTEGDWTREVERACDPIPQMGAIDISPQDVARAVRPLPNWKSPGPDGLHNFWIKWFTRSHARLAYQFQSALESGSLPQFLTTGITHLLHKSGSTAEPKNYRPITCLPTVYKVLTSILRSKINSHIDKNLIMSPSQNGCRNGSRGTKELLLIDMTISQQVRRFRKDLSTCWIDYKKAYDSVPHTWLMRVLELYKIDTTLRTFLMSCMRQWRTVLRYPGCRHIQRNSEPVRIERGIFQGDSLSPLWFCLALNPLSTLLENSGLGYRLKRGGQVISHLLYMDDLKLFAPNNLQLMELLKVTETFSSAIRMEFGVDKCAVMHVKRGEVVESVGTQLTDSINLRSLSPTETYKYLGMSEALGINITDMKQSLKERFFGRLKKVFNSLLSGGNKVRAFNGWVMPVLMYSFGVLKWTQTELDALDRRVRTLLTAYRMHHPRSSVMRLYIPRKCGGRGFLNAKTLHNREVCSLREYFLATDVDMHRDVVAVDKGLTPLSLANENWRKPVVLDTNDRREVWQSKELHGRFCRAFHGPDVDQLASVAWLRFGDLFGETEGFVCAIMDEVIMTNNYRRFIVKDGTVDICRACHRPGESIRHIISGCSRLANGEYLHRHNLVARIIHQQLALKYSLVESEVPYYRYEPDPVLDNGHITLYWDRSIITDRTIVANKPDIVVVDRSERRAMIVDISVPHDENLVKAEKDKQIKYIDLAREVVDMWDVDSAIIVPIVVSANGLIAKSLDQHLRRLALGGWIKALIQKAVLLDTARIVRRFLSLEP

SEQ ID NO: 11104 - protein, 1107 aa, Mythimna impura
MRWTQSINENVMRSYFGATEGGSNLTAYRGRMLSLFQVLEPAVNVSAQRLSDQVRVIQRNRMLDDAVLDRLRLESRSSRVSPASPQAAVQLQSNVSLRPDHVGEDDDDGAISVSNQCNVRLRSALEDAFREYRFTPAELRPRLPRLPMHKKNRALVCALDSQLSNCFDSSEDLTDTHSILYCAAVAACRVARVKFPNSDRVTRPAVPAWQCRIERRIGEARALIGKLICFREGNTRPRVMRFVRRAFSGTDISPRDYLTHITERIDFLKQKVYAWANRIRRYKRRVERYTQNRTFQRNERWVYRAWERPDQGVIDTRLPDDDAMCSFWRSIWSVPVSHTEGDWIREIERTCDLIPEMGAITISPQDVARAVRPLPNWKCPGPDGLHNFWLKWFQRSHARLASQFQSALESGSLPQFLTTGITHLLHKSGSTAEPKNYRPITCLPTVYKVLTSILRAKIKSHIETNSIMSASQNGCRNGSRGTKELLLIDVAISQQVRRSRRDLSTCWIDYKKAYDSVPHTWLMRVLELYKVDATLRTFLMSCMRQWRTALHYPGCRQIRESSEPIRIERGIFQGDSLSPLWFCLALNPLSTLLEGSGLGYRLRRGGHVISHLLYMDDLKLFASNNLQLMELLKVTETFSSAIRMEFGLDKCAVMHVKRGEIMESVGTQLSDSIYIRSLCSTETYKYLGMSEALGINAADMKQLLRERFFGRLNKVLNSLLSGGNKVRAFNGWVMPVLMYSFGILKWTQTELDALDRRVRLLLTANRMHHPRSSVMRLYIPRKCGGRGFLNAKTLHNREICSLREYFLKTDVGMHRDVVAVDKGLTPLSLVNENWRKPTVMDTNERRAVWQGKELHGRFYRALHGPDVDLLASVSWLRFGDLFGETEGFVFAIMDEVMMTNNYRKYIVKDGTVDICRACHRPGESIRHIISGCSHLANGDYLHRHNLVARIIHQQLALKYNLVESEVPYYRYVPDPVLENGGVTLYWDRSIITDRTIVANKPDIVVIDRLERRTMIVDIAVPHDENLVKAEKDKQTKYLDLAREVVDMWEVDRAIIVPIVVTANGLIAKSLEQHLRRLSLGSWIKGLIQKAVLLDTARIVRRFLSQEP

SEQ ID NO: 11105 - protein, 1107 aa, Mythimna impura
MRWTQSINENVMRSYFGATEGGSNLTAYRGRMLSLFQVLEPTVNVSAQRLSDQVRVIQRNPMLDDAVLDRLRLESQKSRASSATPPAAVQLQPSALPRPDHVGDADDDAAISVSTQCNERLRSALEDAFREYRSTPPGLRPRLPRLPMHKRNRALVCALDSQLSNCFDSSKDLADTHSILYCAAAAACRVAHVKSPNCDRATRPAVPAWQCRIEHRIGEARALIGKLICFREGNTRPRVMRFVRRAFSGTDISPRDYLPCVTERIDFLKQKIYAWANRIRRYKRRVERYTRNRTFQSNERWVYRDWERPDQGVTDTCLPDDDAMCSFWRSIWSAPVSHTEGDWIREVERACDLLPEMGAITISPQDVTRAVRPLPNWKSPGPDGLQNFWLKWFQRSHARLASQFQSALESGSLPQFLTTGITHLLYKSGSTAEPKNYRPITCLPTVYKVLTSILRAKINSHIETNSIMSASQNGCRNGSRGTKELLLIDAAISQQVRRSRKNLYICWIDYKKDFDSVPHTWLMRVLELYKVDATLRTFLMSCMGQWRTVLHYPGCRQIQENSEPIRIERGIFQGDSRSPLWFCLALNPLSTLLEGSGLGYRLKRGGQVISHLLCMDDLKLFAPNNLQLVELLKVTETFSSAIRMEFGVDKCAVIHVKRGEIMESVGIQLSDSIHLRSLCSTETYKYLGMSESLGINTDDVKQSLKERFFGRLNKVLNSLLSGGNKVRAFNGWVMPVLMYSFGILKWTQTELDALDRRVRTLLTANRMHHPRSSVMRLYIPRKCGGRGFLNAKTLHNREVYRLREYFLKTDVGMHRHVAAVDKGLTPLSLANENWRKPIVLDTNDRREVWQSKELHGRFYRALHGPDVDLLASLSWLRFGDLFGETEGFVFAIMDEVMMTNNYRKYIVKDGTVDICRACHRPGESIRHIISGCSHLANGDYLHRHNLVARIIHQQLALKYNLVESEVPYYRYVPDPVLDNGNITLYWDRSIITDRTIVAIKPDIVVIDRLERRTMIVDIAVPHDENLVKAEKDKQTKYLDLAREVVDMWEVDRAIIVPIVVTANGLIAKSLEQHLRRLSLGSWIKGLIQKAVLLDMARIVMRFLSQET

SEQ ID NO: 11106 - protein, 1200 aa, Mythimna impura
MLTRSRAQKLHTHPTSSGSSLSSASQPPGPAPTVSPEIPVAAVASSSSDEYFSPPTTPPPARRRGRGRPPASLGPRGPPASDRVPAAGGSVQRMRWTSSINENVMRSYFGATEGEINLTAYRSRMLSLFQVLEPAVNVSVQRLSDQVRVIQRNRMLDDAVLDRLRLESQSSRVSPATTPAAVQRLPTASPRPVQVGDADDDAAISVSTQCNDRLRGALEDAFREYRSTPPGLRPRLPRLPMHKRNRALVCALDSQLSNCFDSSKDLTDTHSILYCAAVAACRVAHVKFPNCDRATRPAVPAWQCRIEHRIGEARALIGKLICFREGNTRPRVMRFVRRAFSGTDISPRDYLPCVTERIDFLKQKIYAWANRIRRYKRRVERYTRNRTFQSNERWVYRDWERSDQGVTDTRLPDDDAMCSFWRSIWSAPVSHTEGDWIREVERACDLLPEMGAITISPQDVARAVRPLPNWKSPGPDGLHNFWVKWFQRSHARLASQFQSALESGSLPQFLTTGITHLLHKSGSTAEPKNYRPITCLPTVYKVLTSILRAKINSHIETNSIMSASQNGCRNGSRGTKELLLIDIAISQQVRRSRKNLSACWIDYKKAYDSVPHTWLMRVLELYKVDATLRTFLMSCMGQWRTVLHYPGCRQIQENNEPIRIERGIFQGDSLSPLWFCLALNPLSTLLEGSGLGYRLKRGGQVISHLLYMDDLKLFAPNNLQLVELLKVTETFSSAIRMEFGVDKCAVIHVKRGEIMESVGIQLSDSIHLRSLYSTETYKYLGMSESLGINTDDVKQSLKERFFGRLNKVLNSLLSGGNKVRAFNGWVMPVLMYSFGILKWTQTELDALDRRVRTLLTANRMHHPRSSVMRLYIPRKCGGRGFLNAKTLHNREVCSLREYFLKTDVGMHRDVVAVDKGLTPLSLANENWRKPIVLDTNDRREVWQSKELHGRFYRALHGPDVDLLASVSWLRFGDLFGETEGFVFAIMDEVMMTNNYRKYIVKDGTVDICRACHRPGESIRHIISGCSHLANGDYLHRHNLVARIIHQQLALKYNLVESEVPYYRYVPDPVLDNGNITLYWDRSIITDRTIVANKPDIVVIDRLERRTMIVDIAVPHDENLVKAEKDKQTKYLDLAREVVDMWEVDNAIIVPIVVTANGLIAKSLEQHLRRLSLGSWIKGLIQKAVLLDTARIVRRFLSQEP

SEQ ID NO: 11107 - protein, 868 aa, Mythimna impura
MRFVRRAFLGTDISPQNYLPCVTERIDFLKQKVYAWASRIRRYKRRVERYTQNRTFQSNERWVYRTWERPDQDVTDTRLPDDDAMCSFWRRIWSVPVSHIEGDWIREVERTCDLLPEMGAITISPQDVARAVRPLPNWKSPGPDGLHNFWIKWFQGSHARLASQFQSALESGSLPEFLTTGITHLLHKSGSTADPKNYRPITCLPTVYKVLTSILRAKINTHIETNSIMSASQNGCRNGSRGTKELLLIDMAISQQVRRSRKDLSTCWIDYKKAYDSVPHTWLMRVLELYKVDTTLRTFLMSCMRQWRTVLHYPGCRQIRENSEPIRIERGIFQGDSLSPLWFCLALNPLSTLLEGSGLGYRLKRGGQVISHLLYMDDLKLFAPNNLHLMELLKVTETFSNAIRMEFGVDKCAVMHVKRGEIMESVGTQLSDSIYLRSLCSTETYKYLGMSEALGINAADVKQSLKERFFGRLNRVLKSLLSGGNKVRAFNGWVMPVLMYSFGILKWTQTELDALDRRVRTLLTANRMHHPRSSVMRLYIPRKCGGRGFLNAKTLHNREVCSLREYFLETDVGMHRDVVAVDKGLTPLSLANGNWRKPIILDTNDRREVWQSKELHGRFYRALHGPDVDLLASVSWLRFGDLFGETEGFVCAIMDEVVMTNNYRKYIVKDGTADICRACHRPGESIRHIISGCSHLANGDYLHRHNLVARIIHQQLALKYNLVESEVPYYKYVPDPVLDNGSITLYWDRSIITDRTIVANKPDIVVIDRLERRTVIVDIAVPHDDNLVKAEKDKQTKYLDLAREVVDMWEVDTAVIVPIVVTANGLISKSLDQHLRRLSLGSWIKGLIQKAVLLDTARIVRRFLSQEP

SEQ ID NO: 11108 - protein, 1198 aa, Phlogophora meticulosa
MLTRSAARRARPPPPASSLSSASSPPAPSPIVSTVKPAVPVASSSSDEYFSPPTSPPPARRRRGRRPPDGLGPRGPPASDRVPAPGGSVQRMRWTQSINENVMRSYYGATEGGSNLTAYRVRMLSLFQVLEPAVNVSAQRLSDQVRVIQRNHMLDDVVLDRLRTEMQSSRVITSPSHTVVPPQYNIVLSSFADGEGSDKVTNVSTQYNEELRSALEGAIREYRFMLPALRPRLPRLPMHNKNRALVAALDSQLSNYFDNCDDLTDAHSILYCAAVAACRVAHVKFPYDIATRPKPAVPAWQCRIERRIAGARALIGKLVCYREGNTRPRVMRYVRRAFLGTDISPRDYMSRVTERIDFLKQKVYAWASRIRRYKRRVERYTQNRTFQSNERWVYRAWERPVQGVTDTHLPDDDVMCSFWRNIWSVPVSHTEGDWTREVERACDPIPQMGAITISPQDVARAVRPLPNWKSPGPDGLHNFWIKWLQKSHARLASQFQSALETGSLPQFLTTGITHLLHKSGSTAEPKNYRPITCLPTVYKVLTSILRVKINNHIDSNSIMSASQNGCRNGSRGTKELLLIDTAISQQVRRSRKDLSTCWIDYKKAYDSVPHTWLKRVLELYKVDATLRTFLTSCMGQWRTVLRYPGCRQIQRNSEPIRIERGIFQGDSLSPLWFCLALNPLSTLLEDSGLGYRLKRGGQVVSHLLYMDDLKLFAPSDLQLMELLTVTKTFSSAIRMEFGVDKCAVMHVKRGKIVESVGTQLPDFINFRALSPIETYKYLGMSEALGINAADMKQSLKERFFGRLKKVCNSLLSGGNKVRAFNGWVMPVLMYSFGILKWTQTELDALDRRVRTFLTASRMHHPRSSVMRLYIPRKCGGRGFLNAKTLHNREICSLRDYFLETDVGMHRDVVAVDQGLTPLSLAKENWRKPVVLDTNDRKEVWQSKELHGRFFQALHGPDVDQLASVSWLRFGDLFGETEGFVCAIMDEVIMTNNYRRFIVKDGTVDICRACHRPGESIRHIISGCSRLANEEYLHRHNLVARIIHQQLALKYSLVESEVPYYKYVPDPVLENGSVTLYWDRSIITDRTIVANKPDIVVMDRIERRATIIDVTVPHDGNLVKAEKDKQIKYLDLAREVVDMWDVDSAIVVPIVVSANGLIAKSLDQHLRRLALGSWIKGLIQKAVLLDTARIVRRFLSLEP

SEQ ID NO: 11109 - protein, 868 aa, Phlogophora meticulosa
MRFVRRAFSGTDISSRDYLTRVTERIDFLKQKICAWANRIRRYKRRVERYTQNRTFRSDERWVYRTWERPDQGVTDTFLPDDEAMCLFWRSIWSVPVSHTEGDWTREVEQTCEPLPEMGAINISPQDVACAVRPLPNWKSPGPDGLHNFWIKWLKSSHGRLASQFQSALESGSLPQFLTTGITHLLHKSGSTAEPKNYRPITCLPTVYKDLTSILRSKINNHIDSTSIMSVSQNGCKNGSRGTKELLLIDMAISQQVRRSRKDLSTCWIDYKKAYDSVPHTWLMRVLELYKIDATLRTFLKSCMGQWRTVLHYPGCRQFQENSEPIRIERGIFQGDSLSPLWFCLALNPLSTLLEGSGLGYRLRRGGQVISHLLYMDDLKLFARNNLQLMKLLKVTETFSSAIRMDFGVDKCAVMHVKRGGIVESAGTQLSDSIYLRSLSSTETYKYLGMSEALGINTADMKQSLKERFFGRLNKVLNSLLSGGNKVRAFNSWVMPVLMYSFGILKWTQTELDALDRRVRTLLTANRMHHPRSTVMRLYISRKCGGRGFLNAKTLHNREVCSLREYFLEADVGIHRDVVAMDKALTPLSLANENWRKPIVLDTTDRMEIWKSKELHGRFYRVLHGPDVDLSASVSWLRFGDLFGETEGFVCAIMDEVIMTNNYRKYIVKDGTVDICRACHRPGESIRHIISGCSRLANGDYLHRHNLVAKIIHQQLALKYNLVESEVPYYKYVPDPVLENGNITLYWDRSIITDRTIVANKPDIVVIDRSDRRTMIVDITVPHDENLVKAEKEKQIKYLDLAREVVDMWDVNTAVIVPIVVTANGIIAKSLDQHLRRLSLGSWIKGLIQKAILLDTARIVRRFLSQEP

SEQ ID NO: 11110 - protein, 1109 aa, Phlogophora meticulosa
MRWTQSINENVMRSYYGATEGGTNLTAYRGRMLSLFQMLEPAVNVSAQRLSDQVRVIQRNHMLDDVVLDRLRLNSRIYHVTPALPPVAVQLQSLPSVSPRPDYVGEEDDDAAISVSSQCNVRLRSALEDAFREYRSTPPELRSRLPRLPMHKKNKALMTALDSLLTKSFDNSKDLTDTHSILYCAAAAACRVANVKFPNTERATRPTVPAWQCRIQRRIDEARALIGKLICFREGNTRPRVMRFVRRAFSGTDISSRDYLTRVTERIDFLKQKICAWANRIRRYKRRVERYTQNRTFRSDERWVYRAWERSDQGVTDTCLPDDEAMCSFWRSIWSVPVSHTEGNWTREIERACEPLPEMGAINISPQDVASAVRPLPNWKSPGPDGLHNFWIKWLQSSHARLACQFQSALESGSLPKFLTTGITHLLHKSGSTAEPRNYRPITCLPTVYKVLTSILRSKINNHIDSNLIMSFSQNGCRNGSRGTKELLLIDTAISQQVRRSRKDLSTCWVDYKKAYDSVPHTWLMRVLELYKVDATLRTFLMSCMGQWRTVLRYPGCQQTRENSEPIRIERGIFQGDSLSPLWFCLALNPLSTLLEGSGLGYRLRTGGQVISHLLYMDDLKLFAPNNLQLMELLKVTETFSSAIRMDFGVDKCAVMHVKRGEIVESVGTQLSDSIYLRSLSSTETYKYLGMSEALGINATDMKQSLKERFFGRLNKVLNSLLSGGNKVRAFNGWVMPVLMYSFGILKWTQTELDALDRRVRTLLTANRMHHPRSSVMRLYIPRKCGGRGFLNAKTLHNREICSLREYFLKADVGMHRDVVAVDKTFTPLSLANKNWRKPIVLDTADRMEIWKSKELHGRFYRVLHGPDVDLVASISWLRFGDLFGETEGFVCAIMDEVIMTNNYRKYIVKDGTVDICRACHRPGESIRHIISGCSRLANGDYLHRHNLVARIIHQQLALKYNLVDLEVPYYKYVPDPVLENGSITLYWDRSIITDRTIVANKPDIVVIDRSERRTMIIDITVPHDENLVKAEKEKQMKYLDLAREVVDMWDVNTAVIVPIVVTANGIIAKSLDQHLKRLSLGSWIKGLIQKAVLLDTARIVRRFLSQEP

SEQ ID NO: 11111 - protein, 1198 aa, Xestia xanthographa
MLTRSAAARRARLPPPDSSLSSASPPPEPSPIVSAVTPAVAVASSSSDEYFSPPTTPPPARRRGGRRPPDGLGPRGPPASDRVPAPGGSVQRMRWTQSINANVMRAYYGATEGGNNLTAYRVRMLSLFQVLEPAVNVSAQRLSDQVRVIQRNRMLDDTVLDRLRTEIQSNHVIATPSQAVVPPQSSIIPNCDNDVSNDMVTNVSTQCNVEMRSALEGAIREYRFMQPDLRPRIPRLPMHNKNRALVAVLDSQLSNYFDNCEDLTDVHSILYCAAVATCRVAHVKFPSDRATRPKPAVPAWQYRIERRIGGARALIGKLVCFREGNTRPRVMRFVRQAFSGTDISPRDYMSRVTERIDFLKQKVYAWANRIRRYKRRVDRYTQNRTFQKDERWVYRAWERPDQGVADTHLPDDDAMCSFWRSIWSVPVSHAEGEWTRVIERACDPISEMGAITISPQDVARAVRPLPNWKSPGPDGLHNFWIKWFTRSHARLATLFQSALESGSLPEFLTTGITHLLHKSGSTAEPKNYRPITCLPTVYKVLTSILRTKISKHIDDNSVMSASQNGCRNGSRGTKELLLIDMAISHQVRRSRKDLSTCWIDYKKAYDSVPHTWLMRVLQLYKVDATLRTFLMSCMGQWRTVLHYPGCRQIQRNSEPIRIERGIFQGDSLSPLWFCLALNPLSTLLEDSGLGYRLRKDGQVISHLLYMDDLKLFAPNDLRLMELLKVTETFSNAIRMEFGVDKCAVMHVKRGEIVESVGTQLSDSITLRSLSATETYKYLGMSEALGVNVADMKQSLKERFFGRLKKVLNSLLSGGNKVRAFNGWVMPVLMYSFGILKWTQTELDALDTKVRKLLTAYRMHHPRSSVMRLYIPRKCGGRGFLNAKTLHNREICSLREYFLGTDVGMHQDVVTMDKGLTPLSLAKENWRKPPVLDTNDRREVWQSKELHGRFFRALHGPDVDLSASVAWLRSGDLFGETEGFVCAIMDEVMMTNNYRRFIVKDGTVDICRACHRPGESIRHIISGCSRLANGEYLHRHNLVARIIHQQLALKYNLVESEVPYYRYVPDPVLDNGCITLYWDQSIITDRTIVANKPDIVVVDRSERRAMIVDITVPHDENLVKAEKDKQIKYLDLAREVVDMWEVDSAIIVPIVVSAHGLIAKSLDQYLRRLSLGSWIKGLIQKAVLLDTARIVRRFLSLEP

SEQ ID NO: 11112 - protein, 1198 aa, Xestia xanthographa
MLTRSAAARRARLPPPDSSLSSASPPPEPSPIVSAVTPAVAVASSSSDEYFSPPTTPPPARRRGGRRPPDGLGPRGPPASDRVPAPGGSVQRMRWTQSINANVMRAYYGATEGGNNLTAYRVRMLSLFQVLEPAVNVSAQRLSDQVRVIQRNRMLDDTVLDRLRTEIQSNHVIATPSQAVVPPQSSIIPNCDNDVSNDMVTNVSTQCNVEMRSALEGAIREYRFMQPDLRPRIPRLPMHNKNRALVAVLDSQLSNYFDNCEDLTDVHSILYCAAVATCRVAHVKFPSDRATRPKPAVPAWQYRIERRIGGARALIGKLVCFREGNTRPRVMRFVRQAFSGTDISPRDYMSRVTERIDFLKQKVYAWANRIRRYKRRVDRYTQNRTFQKDERWVYRAWERPDQGVADTHLPDDDAMCSFWRSIWSVPVSHAEGEWTRVIERACDPISEMGAITISPQDVARAVRPLPNWKSPGPDGLHNFWIKWFTRSHARLATLFQSALESGSLPEFLTTGITHLLHKSGSTAEPKNYRPITCLPTVYKVLTSILRTKISKHIDDNSVMSASQNGCRNGSRGTKELLLIDMAISHQVRRSRKDLSTCWIDYKKAYDSVPHTWLMRVLQLYKVDATLRTFLMSCMGQWRTVLHYPGCRQIQRNSEPIRIERGIFQGDSLSPLWFCLALNPLSTLLEDSGLGYRLRKDGQVISHLLYMDDLKLFAPNDLRLMELLKVTETFSNAIRMEFGVDKCAVMHVKRGEIVESVGTQLSDSITLRSLSATETYKYLGMSEALGVNVADMKQSLKERFFGRLKKVLNSLLSGGNKVRAFNGWVMPVLMYSFGILKWTQTELDALDTKVRKLLTAYRMHHPRSSVMRLYIPRKCGGRGFLNAKTLHNREICSLREYFLGTDVGMHRDVVTMDKGLTPLSLAKENWRKPPVLDTNDRREVWQSKELHGRFFRALHGPDVDLSASVAWLRSGDLFGETEGFVCAIMDEVMMTNNYRRFIVKDGTVDICRACHRPGESIRHIISGCSRLANGEYLHRHNLVARIIHQQLALKYNLVESEVPYYRYVPDPVLDNGCITLYWDQSIITDRTIVANKPDIVVVDRSERRAMIVDITVPHDENLVKAEKDKQIKYLDLAREVVDMWEVDSAIIVPIVVSAHGLIAKSLDQYLRRLSLGSWIKGLIQKAVLLDTARIVRRFLSLEP

SEQ ID NO: 11113 - protein, 1208 aa, Xestia xanthographa
MITRSRAKQHQKAHPPSPDSSLSSASQRPGHATPVSTVSPVAAVASSSSDEFFSPPSTPPPPPRGRRRGRGRPPAGLGPRGQRAPSRVPAAGGNVSRMRWTQSINENVMRAYYGATEGGSNLTAYRGRMLSLFQVLEPAVSVEAQRLSDQVRVIQRNHMLDDTVLDRLRSESRSNLVTPASPMIAVQVQNVSSAPPRSDRDGEEDDDEVISVSTQCNAQLRSALESAFREFRSTPPELRPRLPRLPMHNKNKALMCALDSQLSNSFDSSKDLADTHSILYCGAVAACRVAHVKFPNNDRATRPKLAVSAWQCRIERRIGEARALIGKLICFREGNTRPRVMRFVRRAFSGTDISFRDYLARVTERIDSLKQKICAWASRIRRYKRRVERYTQNRTFQSDERWVYRAWERPDQGVTDTRLPDDNAMCSFWRNIWSVPVSHTEGDWTREVEQACDPIPEMGAIIISPQDVARAVRPLPNWKSPGPDGLHNFWIKWFQRSHACLASQFQSALESRSLPQFLTTGITHLLHKSGSTAEPKNYRPITCLPTVYKVLTSILKAKINQHIDSNSIMSASQNGCRNGSRGTKELLLIDMAISQQVRRSRKNLSTCWIDYKKAYDSVPHTWLMRVLELYKVDATLRTFLMSCMGQWRTVLRYPGCRQIQGNSEPIRIERGIFQGDSLSPLWFCLALNPLSTLLERSGLGYLLRRDGQVISHLLYMDDLKLFAPNNLQLMKLLKVTETFSSAIRMEFGVDKCAVMHVKRGEIMESVGTQLSDSIHLRSLSSTETYKYLGMSEALGINTADVKQSLRERFFGHLNKVLGSLLSGGNKVRAFNGWVMPVLMYSFGILKWTQTELDALDRRVRTLLTANRMHHPRSSVMRLYIPRKCGGRGFLNAKTLHNREVCSLREYFLEADGEMHRDVVSVDKGLTPLSLANENWRKPKVLNTNDRKEEWHGKELHGRFYRALHGPDVDSLASVSWLRFGDLFGETEGFVCAIMDEVMMTNNYRKYIVKDGTVDICRACHRPGESIRHIISGCSSLANGEYLHRHNLVARIMHQQLALKYNLVESEVPYYRYAPDPVLDNGNITLYWDRPITTDRTVVANRPDIVVIDRLERRTMIVDIAVPHDENLVKAEKDKQFKYLDLAREVVDMWDVNTAVIVPIVVSANGLIAKSLDQHLRRLSLGGWIKGLIQKAVLLDTARIVRRFLSQEP

SEQ ID NO: 11114 - protein, 868 aa, Xestia xanthographa
MRFVRQAFSGTDISPRDYMSRVTERIDFLKQKVYAWANRIRRYKRRVDRYTQNRTFQKDERWVYRAWERPDHGVADPHLPDDDAMCSFWQSIWSVPVSHAEGEWTRVIERACDPISEMGAITISPQDVARAVRPLPNWKSPGPDGLHNFWIKWFTRSHARLATLFQSALESGSLPEFLTTGITHLLHKSGSTAEPKNYRPITCLPTVYKVLTSILITKISKHIDDNSVMSASQNGCRNGSRGTKELLLIDIAISHQVRRSRKDLSTCWIDYKKAYDSVPHTWLMRVLELYKVDATLRTFLMSCMGQWRTVLRYPGCRHIQRNSEPIRIERGIFQGDSLSPLWFCLALNPLSTLLEDSGLGYRLRKDGQVISHLLYMDDLKLFAPNDLRLMELLKVTETFSNAIRMEFGVDKCAVMHVKRGEIVESVGTQLSDSITLRSLSATETYKYLGMSEALGVNVADMKQSLKERFFGRLKKVLHSLLSGGNKVRAFNGWVMPVLMYSFGILKWTQTELDALDTKVRKLLTAYRMHHPRSSVMRLYIPRKCGGRGFLNAKTLHNREICSLREYFLGTDVGMHRDVVTMDKGLTPLSLAKDNWRKPPVLDTNDRREVWQSKELHGRFFRALHGPDVDLSASVAWLRSGDLFGETEGFVCAIMDEVMMTNNYRRFIVKDGTVDICRACHRPGESIRHIISGCSRLANGEYLHRHNLVARIIHQQLALKYNLVESEVPYYRYVPDPVLDNGCFTLYWDQSIITDRTIVANKPDIVVVDRSERRAMIVDITVPHDENLVKAEKDKQIKYLDLAREVVDMWEVDSAIIVPIVVSAHGLIAKSLDQYLRRLSLGSWIKGLIQKAVLLDTARIVRRFLSLEP

SEQ ID NO: 11115 - protein, 1198 aa, Xestia xanthographa
MLTRSAAARRARLPPPDSSLSSASPPPEPSPIVSAVTPAVAVASSSSDEYFSPPTTPPPARRRGGRRPPDGLGPRGPPASDRVPAPGGSVQRMRWTQSINENVMRAYYGATEGGNNLTAYRVRMLSLFQVLEPAVNVSAQRLSDQVRVIQRNRMLDDTVLDRLRTEIQSNHVIATPSQAVVPPQSSVIPNCDNDVSNDMVTNVSTQCNVEMRSALEGAIREYRFMQPDLRPRIPRLPMHNKNRALVAVLDSQLSNYFDNCEDLTDVHSILYCAAVAACRVAHVKFPSDRATRPKPAVPAWQYRIERRIGGARALIGKLVCFREGNTRPRVMRFVRQAFSGTDISPRDYMSRVTERIDFLKQKVYAWANRIRRYKRRVDRYTQNRTFQKDERWVYRAWERPDQGVADTHLPDDDAMCSFWRSIWSVPVSHAEGEWTRVIERACDPISEMGAINISPQDVARAVRPLPNWKSPGPDGLHNFWIKWFTRSHARLATLFQSALESGSLPEFLTTGITHLLHKSGSTAEPKNYRPITCLPTVYKVLTSILRTKISKHIDDNSVMSASQNGCRNGSRGTKELLLIDMAISHQVRRSRKDLSTCWIDYKKAYDSVPHTWLMRVLELYKVDATLRTFLMSCMGQWRTVLRYPGCRQIQRNSEPIRIERGIFQGDSLSPLWFCLALNPLSTLLEDSGLGYRLRKDGQVISHLLYMDDLKLFAPNDLRLMELLKVTETFSNAIRMEFGVDKCAVMHVKRGEIVESVGTQLSDSITLRSLSATETYKYLGMSEALGVNVADMKQSLKERFFGRLKKVLNSLLSGGNKVRAFNGWVMPVLMYSFGILKWTQTELDALDTKVRKLLTAYRMHHPRSSVMRLYIPRKCGGRGFLNAKTLHNREICSLREYFLGTDVGMHRDVVTMDKGFTPLSLAKENWRKPPVLDTNDRREVWQSKELHGRFFRALHGPDVDLSASVAWLRSGDLFGETEGFVCAIMDEVMMTNNYRRFIVKDGTVDICRACHRPGESIRHIISGCSRLANGEYLHRHNLVARIIHQQLALKYNLVESEVPYYRYVPDPVLDNGCITLYWDQSIITDRTIVANKPDIVVVDRSERRAMIVDITVPHDENLVKAEKDKQIKYLDLAREVVDMWEVDSAIIVPIVVSAHGLIAKSLDQYLRRLSLGSWIKGLIQKAVLLDTARIVRRFLSLEP

SEQ ID NO: 11116 - protein, 1198 aa, Xestia xanthographa
MLTRSAAARRARLPPPDSSLSSASPPPEPSPIVTAVTPAVAVASSSSDEYFSPPTTPPPARRRGGRRPPDGLGPRGPPASDRVPAPGGSVQRMRWTQSINENVMRAYYGATEGGNNLTAYRVRMLSLFQVLEPAVNVSAQRLSDQVRVIQRNRMLDDAVLDRLRTEIQSNHVIATPSQTVVPPQSSIIPNCDNDVSNDMVTNVSTQCNVEMRSALEGAIREYRFMQPDLRPRIPRLPMHNKNRALVAVLDSQLSNYFDNCEDLTDVHSILYCAAVAACRVAHVKFPSDRATRPKPAVPAWQYRIERRIGGARALIGKLVCFREGNTRPRVMRFVRQAFSGTDINPRDYMSRVTERIDFLKQKVYAWANRIRRYKRRVDRYTQNRTFQKDERWVYRAWERPDQGVADTHLPDDDAMCSFWRSIWSVPVSHAEGEWTRVIERACDPISEMGAITISPQDVARAVRPLPNWKSPGPDGLHNFWIKWFTRSHARLATLFQSALESGSLPEFLTTGITHLLHKSGSTAEPKNYRPITCLPTVYKVLTSILRTKISKHIDDNSVMSASQNGCRNGSRGTKELLLIDMAISHQVRRSRKDLSTCWIDYKKAYDSVPHTWLMRVLELYKVDATLRTFLMSCMGQWRTVLRYPGCRQIQRNSEPIRIERGIFQGDSLSPLWFCLALNPLSTLLEDSGLGYRLRKDGQVISHLLYMDDLKLFAPNDLRLMELLKVTETFSNAIRMEFGVDKCAVMHVKRGEIVESVGTQLSDSITLRSLSATETYKYLGMSEALGVNVADMKQSLKERFFGRLKKVLNSLLSGGNKVRAFNGWVMPVLMYSFGILKWTQTELDALDTKVRKLLTAYRMHHPRSSVMRLYIPRKCGGRGFLNAKTLHNREICSLREYFLGTDVGMHRDVVTMDKGLTPLSLAKENWRKPPVLDTNDRREIWQSKELHGRFFRALHGPDIDLSASVAWLRSGDLFGETEGFVCAIMDEVMMTNNYRRFIVKDGTVDICRACHRPGESIRHIISGCSRLANGEYLHRHNLVARIIHQQLALKYNLVESEVPYYRYVPDPVLDNGCITLYWDQSIITDRTIVANKPDIVVVDRSERRAMIVDITVPHDENLVKAEKDKQIKYLDLAREVVDMWEVDSAIIVPIVVSAHGLIAKSLDQYLRRLSLGSWIKGLIQKAVLLDTARIVRRFLSLEP

SEQ ID NO: 11117 - protein, 1200 aa, Cosmia trapezina
MLTRSATRKARLPPPDSSLSSASPPPVPSLTVSAVSTPAAVVASSSSDEYFSPPTTPPPARRRGGRRPPDGLGPRGPPASDRVPAPGGSVQRMRWTRAINENVMRSYYGATEGGNNLTAYRVRMHSLFQVLEPALNVSAQRLSDQVRVIQRNHMLDDTVLDRLRNEMQSSRVIAPLSQTIVAPPPPQCNTTQADEGSDGTAANVSTQCNEELRSALEGAIQEYRFVSPELRPRLPRLPMHNKNRALVAALDSQLSNYFDDCEDLTDTHSILYCAAVAACRVAHVKFANDSRATRPKPAVPAWQCRIERRIGGARALIGKLICFREGNTRPRVMRFVRRAFSGTDVSPQDYMSRVTERIDFLRQKVYAWANRIRRYKRRVDRYTQNRTFQSDERWVYRGWERPDQGVTDTRLPDDDAMCSFWRSIWSVPVSHTEGDWAREVRRACDPIPEMGAITICPQDVARAVRPLPNWKSPGPDGLHNFWIKWFLGSHARLAAQYQSALQSGSLPQFLTTGITHLLHKSGSTTDPKNYRPITCLPTVYKVLTSILRAKINEHIDTNSIMSASQNGSRNGSRGTKELLLIDMAISQQVRRSRRDLSTCWIDYKKAYDSVPHTWLMRVLELYKVDATLRTFLMSCMGQWRTVLRYPGCRNIQRNSEPIRIERGIFQGDSLSPLWFCLALNPLSTLLEDSGLGYRLRRGGQVISHLLYMDDLKLFAPSSLQLMELLKVTETFSSAIRMEFGVDKCAVMHVKRGEIVESVGTQLPDSINLRTLSAAETYKYLGMSEALGINVADMKQSLKERFFGRLKKVFNSLLSGGNRVRAFNGWVMPVLMYSFGILKWTQTELDALDRRVRTLLTAYRMHHPRSSVMRLYIPRKCGGRGFLNAKTLHNREICSLREYFLETDVGMHRDVVAVDKGLTRLSLAKENWRKPVVLDANDRMEVWQSKELHGRFFRALHGPDVNLLASVAWLRSGDLFGETEGFVCAIMDEVIMTNNYRRFIVKDGTVDICRACHRPGESIRHIISGCSRLANEEYLHRHNLVARIIHQQLALKYSLVESEVPYYRYVPDPVLENGHITLYWDRSIITDRTIVANKPDIVVVDRTERRAMIVDITVPHDGNLVKAEKDKQIKYIDLAREVVDMWDVDSAVIVPIVVSANGLIAKSLDQHLRRLSLGSWIKGLIQKAVLLDTARIVRRFLSLEP

SEQ ID NO: 11118 - protein, 1205 aa, Cosmia trapezina
MLTRSRAQHLRNTHPTSSGSSLSSASQLPEPAPDVSQVIPAAAVASSSSDEYFSPPTTPPPVRRRGRGRPPASLGPRGPPASDRVPAPGGSVQRMRWTQTVNENVMRAYFGATEGGSNLTAYRGRMLSLFQVLEPAVNVSAQRLSDQVRVIQRNHMLDDVVLDRLRLESRNSRVTSDSPMVAVQLQNLPSASPRPDRVGEEDDSGAISVSSQCNVQLRSALEDAFREYRSAPPGLRPRLPRLPMHKKNKALVCALDSQLSNCFDGSKDLADTHSILYCAAVAACRVAHVKFHNNDRVTRPKPAVPTWQCRIERRIGEARALIGKLICFREGNTRPRVMRFVRRAFSGMDISPRDYLTCVTERIDFLKQKICAWANRIRRYRRRVERYTQNRTFQSDERWVYRAWERPDQGVADTRLPDDDAMCSFWRSIWSVPVSHTEGDWTREVERACDHIPQMGALTISPQDVARAVRPLPNWKSPGPDGLHNFWIKWFQRSHACLASQFQSALQSGSLPQFLTTGITHLLHKSGSTAEPRNYRPITCLPTVYKVLTSILRAKINKHIDTNSIMSASQNGCGNGSRGTKELLLIDMTINQQVRRSRKDLSTCWIDYKKAYDSVPHTWLMRVLELYKIDATLRTFLMSCMGQWRTVLRYPGCRNIQRNSEPIKIERGIFQGDSLSPLWFCLALNPLSTLLEDSGLGYRLRRGGQVISHLLYMDDLKLFAPNNLQLMELLKVTETFSSAIRMEFCVDKCAVMHVKRGEIVESVRTQLSDSIHLRSLSSLETYKYLGMSEALGINAADMKQSLRERFFGRLNKVLNSLLSGGNKVRAFNGWVMPVLMYSFGILKWTQTELDALDRRVRTLLTANRMHHPRSSVMRLYIPRKCGGRGFLNAKTLHNREVCSLREYFLEADVGMHREVVSVDKGLTPLSLANENWRKPIVLDTNDRREVWQSKELHGRFYRVLHGPDVDFLASVSWLRFGDLFGETEGFVFAIMDEVMMTNNYRKYIVKDGTVDICRACHRPGESIRHIISGCSRLANGDYLHRHNLVARIIHQQLALKYSLVESEVPYYRYVPDPVLENGNITLYWDRSIITDRTIVANKPDIVVIDRLERRTVIVDIAVPHDENLVKAEKDKQIKYLDLAREVVDMWDVDTAIIVPIVVTANGIIAKSLDQHLRRLSLGGWIKGLIQKAVLLDTARIVRRFLSQQP

SEQ ID NO: 11119 - protein, 1205 aa, Cosmia trapezina
MLTRSRAQHLRNTHPTSSGSSLSSASQLPEPAPDVSQVIPAAAVASSSSDEYFSPPTTPPPVRRRGRGRPPASLGPRGPPASDRVPAPGGSVQRMRWTQTVNENVMRAYFGATEGGSNLTAYRGRMLSLFQVLEPAVNVSAQRLSDQVRVIQRNHMLDDVVLDRLRLESRNSRVTSDSPMVAVQLQNLPSASPRPDRVGEEDDSGAISVSSQCNVQLRSALEDAFREYRSAPPGLRPRLPRLPMHKKNKALVCALDSQLSNCFDGSKDLADTHSILYCAAVAACRVAHVKFHNNDRVTRPKPAVPTWQCRIERRIGEARALIGKLICFREGNTRPRVMRFVRRAFSGMDISPRDYLTCVTERIDFLKQKICAWANRIRRYRRRVERYTQNRTFQSDERWVYRAWERPDQGVADTRLPDDDAMCSFWRSIWSVPVSHTEGDWTREVERACDHIPQMGALTISPQDGARAVRPLPNWKSPGPDGLHNFWIKWFQRSHARLASQFQSALQSGSLPQFLTTGITHLLHKSGSTAEPRNYRPITCLPTVYKVLTSILRAKINKHIDTNSIMSASQNGCGNGSRGTKELLLIDMTISQQVRRSRKDLSTCWIDYKKAYDSVPHTWLMRVLELYKIDATLRTFLMSCMGQWRTVLRYPGCRNIQRNSEPIRIERGIFQGDSLSPLWFCLALNPLSTLLEDSGLGYRLRRGGQVISHLLYMDDLKLFAPNNLQLMELLKVTETFSSAIRMEFGVDKCAVMHVKRGEIVESVRTQLSDSIHLRSLSSLETYKYLGMSEALGINAADMKQSLRERFFGRLNKVLNSLLSGGNKVRAFNGWVMPVLMYSFGILKWTQTELDALDRRVRTLLTANRMHHPRSSVMRLYIPRKCGGRGFLNAKTLHNREVCSLREYFLEADVGMHREVVSVDKGLTPLSLANENWRKPIVLDTNDRREVWQSKELHGRFYRVLHGPDVDFLASVSWLRFGDLFGETEGFVFAIMDEVMMTNNYRKYIVKDGTVDICRACHRPGESIRHIISGCSRLANGDYLHRHNLVARIIHQQLALKYSLVESEVPYYRYVPDPVLENGNITLYWDRSIITDRTIVANKPDIVVIDRLERRTVIVDIAVPHDENLVKAEKDKQIKYLDLAREVVDMWDVDTAIIVPIVVTANGIIAKSLDQHLRRLSLGGWIKGLIQKAVLLDTARIVRRFLSQQP

SEQ ID NO: 11120 - protein, 1202 aa, Cosmia trapezina
MKMLTRSATRRARLPPPDSSLSSASPPPLPSLTVSAVSTPATVVASSSSDECFSPPTTPPPVRRRGGRRPPDGLGPRGPPASDRVPAPGGSVQRMRWTRAINENVMRSYYGATEGGNNLTAYRVRMHSLFQVLEPALNVSAQRLSDQVRVIQRNHMLDDTVLDRLRSEMQSSRVIAPLSQTIVAPPPPQCNTNQADEGSDDTAANVSTQCNEELRSALEGAIQEYRFVSPELRPRLPRLPMHNKNRALVAALDSQLSNYFDDCEDLTDTHSILYCAAVAACRVAHVKFANDSRATRPKPAVPAWQCRIERRIGGARALIGKLICFREGNTRPRVMRFVRRAFSGTDVSPQDYMSRVTERIDFLRQKVYAWANRIRRYKRRVDRYTQNRTFQSDERWVYRGWERPDQGVTDTRLPDDDAMCSFWRSIWSVPVGHTEGDWAREVERACDPIPEMGAITICPQDVARAVRPLPNWKSPGPDGLHNFWIKWFPGSHARLAAQYQSALQSGSLPQFLTTGITHLLHKSGSTAEPKNYRPITCLPTVYKVLTSILRAKINEHIDTNSIMSVSQNGSRNGSRGTKELLLIDMAISQQVRRSRKDLSTCWIDYKKAYDSVPHTWLMRVLELYKVDVTLRTFLMSCMGQWRTVLRYPGCRNIQRNSEPIRIERGIFQGDSLSPLWFCLALNPLSTLLEDSGLGYRLRRGGQVISHLLYMDDLKLFAPNNLQLMELLKVTETFSSAIRMEFGVDKCAVMHVKRGEIVESVGTQLSDSINLRTLSAAETYKYLGMSEALGINVADMKQSLKERFFGRLKKVFNSLLSGGNKVRAFNGWVMPVLMYSFGILKWTQTELDALDRRVRTLLTAYRMHHPRSSVMRLYIPRKCGGRGFLNAKTLHNREICSLREYFLEADVGMHRDVVAVDKGFTPLSLAKENWRKPVVLDTNDRMEVWQSKELHGRFFRALHGPDVDLLASVAWLRSGDLFGETEGFVCAIMDEVIMTNNYRRFIVKDGTVDICRACHRPGESIRHIISGCSRLANEEYLHRHNLVARIIHQQLALKYSLVESEVPYYRYVPDPVLENGNITLYWDRSIITDRTIVANKPDIVVVDRTERRAMVVDITVPHDGNLVKAEKDKQIKYLDLAREVVDMWDVDSAIIVPIVISANGLIAKSLDQHLRRLSLGSWIKGLIQKAVLLDTARIVRRFLSLEP

SEQ ID NO: 11121 - protein, 1205 aa, Cosmia trapezina
MLTRSRAQHLRNTHPTSSGSSLSSASQLPEPAPDVSQVIPAAAVASSSSDEYFSPPTTPPPVRRRGRGRPPASLGPRGPPASDRVPAPGGSVQRMRWTQTVNENVMRAYFGATEGGSNLTAYRGRMLSLFQVLEPAVNVSAQRLSDQVRVIQRNHMLDDVVLDRLRLESRNSRVTSDSPMVAVQLQNLPSASPRPDRVGEEDDSGAISVSSQCNVQLRSALEDAFREYRSTPPGLRPRLPRLPMHKKNKALVCALDSQLSNCFDGSKDLADTHSILYCAAVAACRVAHVKFHNNDRVTRPKPAVPTWQCRIERRIGEARALIGKLICFREGNTRPRVMRFVRRAFSGMDISPRDYLTCVTERIDFLKQKICAWANRIRRYRRRVERYTQNRTFQSDERWVYRAWERPDQDVADTQLPDDDAMCSFWRSIWSVPVSHTEGDWTREVERACDHIPQMGALTISPQDVARAVRPLPNWKSPGPDGLHNFWIKWFQRSHARLASQFQSALQSGSLPQFLTTGITHLLHKSGSTAEPRNYRPITCLPTVYKVLTSILRAKINKHIDTNSIMSASQNGCGNGSRGTKELLLIDMTISQQVRRSRKDLSTCWIDYKKAYDSVPHTWLMRVLELYKIDATLRTFLMSCMGQWRTVLRYPGCRNIQRNSEPIRIERGIFQGDSLSPLWFCLALNPLSTLLEDSGLGYRLRRGGQVISHLLYMDDLKLFAPNNLQLMELLKVTETFSSAIRMEFGVDKCAVMHVKRGEIVESVRTQLSDSIHLRSLSSLETYKYLGMSEALGINAADMKQSLRERFFGRLNKVLNSLLSGGNKVRAFNGWVMPVLMYSFGILKWTQTELDALDRRVRTLLTANRMHHPRSSVMRLYIPRKCGGRGFLNAKTLHNREVCSLREYFLEADVGMHREVVSVDKGLTPLSLANENWRKPIVLDTNDRREVWQSKELHGRFYRVLHGPDVDFLASVSWLRFGDLFGETEGFVFAIMDEVMMTNNYRKYIVKDGTVDICRACHRPGESIRHIISGCSRLANGDYLHRHNLVARIIHQQLALKYSLVESEVPYYRYVPDPVLENGNITLYWDRSIITDRTIVANKPDIVVIDRLERRTVIVDIAVPHDENLVKAEKDKQIKYLDLAREVVDMWDVDTAIIVPIVVTANGIIAKSLDQHLRRLSLGGWIKGLIQKAVLLDTARIVRRFLSQQP

SEQ ID NO: 11122 - protein, 1050 aa, Cosmia trapezina
MLDDVVLDRLRLESRNSRVTSVSPMVAVQLQNLPSASPRPDCVGEEDDSGAISVSSQCNVQLRSALEDAFREYRSAPPGLRPRLPRLPMHKKNKALVGALDSQLSNCFDGSKDLADTHSILYCAAVAACRVAHVKFPNSDRVPRPKPAVPAWQCRIERRIGEARALIGKLICFREGNTRPRVMRFVRRAFSGTDISPRDYFTCVTERIDFLKQKICAWANRIRRYRRRVERYTQNRTFQSDERWVYRAWERPDQGVADTQLPDDDAMCSFWRSIWSVPVSHTEGDWTREVERACDHIPQMGALTISPQDVARAVRPLPNWKSPGPDGLHNFWIKWFQRSHARLASQFQSALQSGSLPQFLTTGITHLLHKSGSTAEPRNYRPITCLPTVYKVLTSILRAKINKHIDTNSIMSASQNGCGNGSRGTKELLLIDMTINQQVRRSRKDLSTCWIDYKKAYDSVPHTWLMRVLELYKIDATLRTFLMSCMGQWRTVLRYPGCRNIQRNNEPIRIERGIFQGDSLSPLWFCLALNPLSTLLEDSGLGYRLRRGGQVISHLLYMDDLKLFAPNNLQLMELLKVTETFSSAIRMEFGVDKCAVMHVKRGEIVESVRTQLSDSIHLRSLSSVETYKYLGMSEALGINAADMKQSLRERFFGRLNKVLNSLLSGGNKVRAFNGWVMPVLMYSFGILKWTQTELDALDRRVRTLLTANRMHHPRSSVMRLYIPRKCGGRGFLNAKTLHNREVCSLREYFLEADVGMHRDVVSVDKGLTPLSLANENWRKPVVLDTNDRREVWQSKELHGRFYRVLHGPDVDFLASVSWLRFGDLFGETEGFVFAIMDEVMMTNNYRKYIVKDGTVDICRACHRPGESIRHIISGCSRLANGDYLHRHNLVARIIHQQLALKYSLVESEVPYYRYVPDPVLENGNITLYWDRSIITDRTIVANKPDIVVIDRLERRTMIVDIAVPHDENLVKAEKDKQIKYFDLAREVVDMWDVDTAIIVPIVVTANGIIAKSLDQHLRRLSLGGWIKGLIQKAVLLDTARIVRRFLSQQP

SEQ ID NO: 11123 - protein, 1202 aa, Cosmia trapezina
MKMLTRSATRRARLPPPDSSLSSASPPPVPSLTVSAVSTPATVVASSSSDEYFSPPTTPPPVRRRGGRRPPDGLGPRGPPASDRVPAPGESVQRMRWTRAINENVMRSYYGATEGGNNLTAYRVRMHSLFQVLEPALNVSAQRLSDQVRVIQRNHMLDDTVLDRLRSEMQSSRVVAPLSQTIVAPPPPQCNTSQADGRSDDTAANVSTQCNEELRSALEGAIQEYRFVSPELRPRLPRLPMHNKNRALVAALDSQLSNYFDDCEDLTDTHSILYCAAVAACRVAHVKFANDSRATRPKPAVPAWQCRIERRIGGARALIGKLICFREGNTRPRVMRFVRRAFSGTDVSPQDYMSRVTERIDFLRQKVYAWANRIRRYKRRVDRYTQNRTFQSDERWVYRGWERPDQGVTDTRLPDDDAMCSFWRSIWSVPVGHTEGDWAREVERACDPIPEMGAITICPQDVARAVRPLPNWKSPGPDGLHNFWIKWFPGSHARLAAQYQSALQSGSLPQFLTTGITHLLHKSGSTAEPKNYRPITCLPTVYKVLTSILRAKINEHIDTNSIMSVSQNGSRNGSRGTKELLLIDMAISQQVRRSRKDLSTCWIDYKKAYDSVPHTWLMRVLELYKVDATLRTFLMSCMGQWRTVLRYPGCRNIQRNSEPIRIERGIFQGDSLSPLWFCLALNPLSTLLEDSGLGYRLRRGGQVISHLLYMDDLKLFAPNNLQLMELLKVTETFSSAIRMEFGVDKCAVMHVKRGEIVESVGTQLSDSINLRTLSAAETYKYLGMSEALGINVADMKQSLKERFFGRLKKVFNSLLSGGNKVRAFNGWVMPVLMYSFGILKWTQTELDALDRRVRTLLTAYRMHHPRSSVMRLYIPRKCGGRGFLNAKTLHNREICSLREYFLEADVGMHRDVVAVDKGFTPLSLAKENWRKPVVLDTNDRMEVWQSKELHGRFFRALHGPDVDLLASVAWLRSGDLFGETEGFVCAIMDEVIMTNNYRRFIVKDGTVDICRACHRPGESIRHIISGCSRLANEEYLHRHNLVARIIHQQLALKYSLVESEVPYYRYVPDPVLENGNITLYWDRSIITDRTIVANKPDIVVVDRTERRAMVIDITVPHDGNLVKAEKDKQIKYLDLAREVVDMWDVDSAIIVPIVVSANGLIAKSLDQHLRRLSLGSWIKGLIQKAVLLDTARIVRRFLSLEP

SEQ ID NO: 11124 - protein, 1197 aa, Mamestra brassicae
MLTRSRARHLATHPSPSASSLSSASPPPEPSPTVSAVTPAVAVASSSSDEYFSPPTTPPPARRRRGRRPPDGLGPRGPPASDRVPAPGGSVQRMRWTQSINENVMRSYFGATEGGTNLTAYRGRMLSLFQVLEPAVNVSAQRLSDQVRVIQRNRMLDDSVLDRLRMEMCGHVITPPSQTVAPPQSQISSHADEESNDRVTNVSTQCNEELRSALECAIREYRYIPPELRPRLPRLPMHNKNRALVAALDSQLSNYFDDCEDLTDTHSIMYCAAVAACRVAHVKMTNDRVTRPKPAVPAWQCRIERRIGGARALIGKLICFREGNTRPRVMRFVRRAFSGTDISPRDYMSRVTERIDFLKQKVYAWANRIRRYRRRVKRYTQNRTFRSNERWVYRVWEQPDQGVTDTRLPDDDAMCSFWRNIWSVPVSHTEGGWIREVERACDPLPEMGAITISPQDVTRAVRPLPNWKSPGPDGLHNFWIKWLQRSHARLASQYQTALESGSLPEFLTTGVTHLLHKSGSTAEPKNYRPITCLPTVYKVLTSILRAKINNHINSNNIMSVSQNGCRNGSRGTKELLLIDMAISQQVRRSRKDLSTCWIDYKKAYDSVPHTWLMRVLELYKIDTMLRTFLMSCMGQWRTVLRYPGCRNIQRNSEPVRIERGIFQGDSLSPLWFCLALNPLSTLLENSGLGYRLKRGGQVISHLLYMDDLKLFAPSNLQLMELLKVTETFSSAIRMEFGVDKCAVMHVKRGEIMESVGTQLSDSINLRSLSSTETYKYLGMSEALGINVTDMKQSLRERFFGRLKKVFNSLLSGGNKVRAFNGWVMPVLMHSFGVLKWTQTELDALDRRVRTLLTAYRMHHPRSSVMRLYIPRKCGGRGFLNAKTLHNREICSLREYFLAVDVGMHRDVVTVDKGLTPLSLANENWRKPAVLDTNDRRAVWQSKELHGRFFRALHGPDVDQLASVAWLRFGDLFGETEGFVCAIMDEVIMTNNYRRFIVKDGTVDICRACHRPGESIRHIVSGCSRLANGEYLHRHNLVARIIHQQLALKYSLVESEVPYYRYAPDPVLDNGNITLYWDRSIITDRTIVANKPDIVVVDRIERRAMIVDITVPHDENLVKAEKDKQIKYIDLAREVVDMWDVDSAIIVPIVVSANGLIATSLDQHLRRLSLGSWIKGLIQKAVLLDTARIVRRFLSLEP

SEQ ID NO: 11125 - protein, 1073 aa, Mamestra brassicae
MLSLFQVLEPAVNVSAQRLSDQVRVIQRNRMLDDSVLDRLRMKMCGHVITPPLQTVAPPQSQISSHADEESNDRVTNVSTQCNEELRSALECAIREYRYIPPELRPRLPRLPMHNKNRALVAALDSQLSNYFDDCEDLTDTHSIMYCAAVAVCRVAHVKMTNDRVTRPKPAVPAWQCRIERRIGGARALIGKLICFREGNTRPRVMRFVRRAFSGTDISPQDYMSRVTERIDFLKQKVYAWANRIRRYRRRVERYTQNRTFRSNERWVYRVWEQPDQGVTDTRLPDDDAMCSFWRNIWSVPVSHTEGGWIREVERACDPLPEMGAITISPQDVARAVRPLPNWKSPGPDGLHNFWIKWLQRSHARLASQYQTALESGSLPEFLTTGVTHLLHKSGSTAEPKNYRPITCLPTVYKVLTSILRAKINNHINSNNIMSVSQNGCRNGSRGTKELLLIDMAISQQVRRSRKDLSTCWIDYKKAYDSVPHTWLMRVLELYKIDTMLRTFLMSCMGQWRTVLRYPGCRNIQRNSEPVRIERGIFQGDSLSPLWFCLALNPLSTLLENSGLGYRLKRGGQVISHLLYMDDLKLFAPSNLQLMELLKVTETFSSAIRMEFGVDKCAVMHVKRGEIMESVGTQLSDSINLRSLSSTETYKYLGMSEALGINVTDMKQSLRERFFGRLKKVFNSLLSGGNKVRAFNGWVMPVLMHSFGVLKWTQTELDALDRRVRTLLTAYRMHHPRSSVMRLYIPRKCGGRGFLNAKTLHNREICSLREYFLAVDVGMHRDVVTVDKGLTPLSLANENWRKPAVLDTNDRRAVWQSKELHGRFFRALHGPDVDQLASVAWLRFGDLFGETEGFVCAIMDEVIMTNNYRRFIVKDGTVDICRACHRPGESIRHIVSGCSRLANGEYLHRHNLVAKIIHQQLALKYSLVESEVPYYRYAPDPVLDNGNITLYWDRSIITDRTIVANKPDIVVVDRIERRAMIVDITVPHDENLVKAEKDKQIKYIDLAREVVDMWDVDSAIIVPIVVSANGLIATSLDQHLRRLSLGSWIKGLIQKAVLLDTARIVRRFLSLEP

SEQ ID NO: 11126 - protein, 1198 aa, Noctua fimbriata
MLTRAAAKRARLSPPDPSLSSASPPPESSPVMSAVTPAVAVASSSSDEYFSPPTTPPPVRRRGGRRPPDGLGPRGPPASDRVPAPGGSVQRMRWTQSINENVMRSYYGATEGGNNLTAYRVRMLSLFQVLEPAVNVSAQRLSDQVRVIQRNRMLDDTVLDRLRTEMQSSHVIATPPPQAVVPPQSTIIPNRDNDVSNDIVTNVSTQCNEKMRSALEGAIREYRFMQPDLRPRIPRLPMHNKNRALVAVLDSQLSNYFDNCEDLTDAHSILYCAAVAACRVAHVKFSNDRATRPKPAVPPWQYRIERRIGGARALIGKLICFREGNTRPRVMRFVRRAFSGTDISPRDYMSRITERIDFLKQKVYAWANRIRRYKRRVDRYTQNRTFQRDERWVYRAWERPDQGVADTRLPDDDAMCSFWRSIWSVPVSHTEGEWTQGVERACDLVPEMGAITISPQDVVRAVRPLPNWKSPGPDGLHNFWIKWFTRSHARLAILFQSALESGSLPEFLTTGITHLLHKSGSTAEPKNYRPITCLPTVYKVLTSILRAKINKHIDDNSIMSASQNGCRNGSRGTKELLLIDMAISQQVRRSRRDLSTCWIDYKKAYDSVPHTWLMRVLELYKVDATLRTFLMSCMGQWRTVLRYPGCRQIQRNSEPIRIERGIFQGDSLSPLWFCLALNPLSTLLEDSGLGYRLRRGGQVISHLLYMDDLKLFAPNDLQLMELLKVTETFSSAIRMEFGVDKCAVMHVKRGEIVESVGTQLSDSINLRSLSATETYKYLGMSEALGINVADMKQSLKERFFGRLKKVFNSLLSGGNKVRAFNGWVMPVLMYSFGILKWTQTELDALDRRVRTLLTAYRMHHPRSSIMRLYIPRKCGGRGFLNAKTLHNREICSLREYFLETDVGMHRDVVAVDKGLTPLSLAKENWRKPLVLDTNDRMEVWQSKELHGRFFRALHGPDVDLSASVAWLRSGDLFGETEGFVCAIMDEVMMTNNYRRFIVKDGTVDICRACHRPGESIRHIISGCSRLANGEYLHRHNLVARIIHQQLALKYNLVESEVPYYKYVPDPVLENGSITLYWDQSIITDRTIVANKPDIVVVDRSERRTMIVDITVPHDENLVKAEKDKKIKYLDLAREVVDMWDVDSAIIVPIVVSAHGLIAKSLDQYLRRLSLGSWIKGLIQKAVLLDTARIVRRFLSLEP

SEQ ID NO: 11127 - protein, 1198 aa, Noctua fimbriata
MLTRSAARRARLSPPDPSLSSASPPPESSPVVSAVTPAVAVASSSSDEYFSPPTTPPPVRRRGGRRPPDGLGPRGPPASDRVPAPGGSVQRMRWTQSINANVMRAYYGATEGGNNLTAYRVRMLSLFQVLEPAVNVSAQRLSDQVRVIQRNRMLDDTVLDRLRTEMQSSHVIATPPPQAVVPPQSTIIPNRDNDVSNDIVTNVSTQCSEEMRSALEGAIREYRFMQPDLRPRIPRLPMHNKNRALVAVLDSQLSNYFDNCEDLTDAHSILYCAAVAACRVAHVKFSDDRATRPKPAVPPWQYRIERRIGGARALIGKLICFREGNTRPRVMRFVRRAFSGTDISPRDYMSRITERIDFLKQKVYAWANRIRRYKRRVDRYTQNRTFQRDERWVYRAWERPDQGVADTRLPDDDAMCSFWRSIWSVPVSHTEGEWTQGVERACDLVPEMGAITISPQDVVRAVRPLPNWKSPGPDGLHNFWIKWFTRSHARLAILFQSALESGSLPEFLTTGITHLLHKSGSTAEPKNYRPITCLPTVYKVLTSILRAKINKHIDDNSIMSASQNGCRNGSRGTKELLLIDMAISQQVRRSRSDLSTCWIDYKKAYDSVPHTWLMRVLELYKVDATLRTFLMSCMGQWRTVLRYPGCRQIQRNSEPIRIERGIFQGDSLSPLWFCLALNPLSTLLEDSGLGYRLRRGGQVISHLLYMDDLKLFAPNDLQLMELLKVTETFSSAIRMEFGVDKCAVMHVKRGEIVESVGTQLSDSINLRSLSATETYKYLGMSEALGINVADMKQSLKERFFGRLKKVFNSLLSGGNKVRAFNGWVMPVLMYSFGILKWTQTELDALDRRVRTLLTAYRMHHPRSSVMRLYIPRKCGGRGFLNAKTLHNREICSLREYFLETDVGMHRDVVAVDKGLTPLSLAKENWRKPVVFDTNYRMEVWQSKELHGRFFRALHGPDVDLSASVAWLRSGDLFGETEGFVCAIMDEVMMTNNYRRFIVKDGTVDICRACHRPGESIRHIISGCSRLANGEYLHRHNLVARIIHQQLALKYNLVELEVPYYKYVPDPVLENGSITLYWDQSIITDRTIVANKPDIVVVDRSERRTMIVDITVPHDENLVKAEKDKKIKYLDLAREVVDMWDVDSAIIVPIVVSAHGLIAKSLDQYLRRLSLGSWIKGLIQKAVLLDTARIVRRFLSLEP

SEQ ID NO: 11128 - protein, 1197 aa, Noctua fimbriata
MLTRAAAKRARLSPPDPSLSSASPPPESSPVVSAVTPAVAVASSSSDEYFSPPTTPPPVRRRGGRRPPDGLGPRGPPASDRVPAPGGSVQRMRWTQSINENVMRSYYGATEGGNNLTAYRVRMLSLFQVLEPAVNVSAQRLSDQVRVIQRNRMLDDTVLDRLRTETQSSHVITPSAQAVVLPQSSTIPNRDNDVSNDMVTNVSTQCNEEMRSALEGAIREYRFMQPDLRPRIPRLPMHNKNRALVAVLDSQLSNYFDNCEDLTDAHSILYCAAVAACRVAHVKFSDDRATRPKPAVPPWQYRIERRIGGARALIGKLICFREGNTRPRVMRFVRRAFSGTDISPRDYMSRITERIDFLKQKVYAWASRIRRYKRRVDRYTQNRTFQRDERWVYRTWERPDQGVADTRIPDDDAMCSFWRSIWSVPVSHTEGEWTRKVERACDLVPEMGAITISPQDVVRAVRPLPNWKSPGPDGLHNFWIKWFTRSHARLAILFQSALESGSLPEFLTTGITHLLHKSGSTAEPKNYRPITCLPTVYKVLTSILRAKINKHIDDNSIMSASQNGCRNGSRGTKELLLIDMAISQQVRRSRRDLSTCWIDYKKAYDSVPHTWLMRVLELYKVDATLRTFLMSCMGQWRTVLRYPGCRQIQRNSEPIRIERGIFQGDSLSPLWFCLALNPLSTLLEDSGLGYQLRRGGQVISHLLYMDDLKLFAPNDLQLMELLKVTETFSSAIRMQFGVDKCAVMHVKRGEIVESVGIQLSDSINLRSLSATETYKYLGMSEALGINVADMKQSLKERFFGRLKKVFNSLLSGGNKVRAFNGWVMPVLMYSFGILKWTQTELDALDRRVRTLLTAYRMHHPRSSVMRLYIPRKCGGRGFLNAKTLHNREICSLREYFLETDVGMHRDVVAVDKGLTPLSLAKENWRKPLVPDTNDRMEVWQSKELHGRFFRALHGPDVDLSASVAWLRCGDLFGETEGFVCAIMDEVMMTNNYRRFIVKDGTVDICRACHRPGESIRHIISGCSRLANGEYLHRHNLVARIIHQQLALKYNFVESEVPYYKYVPDPVLENGSITLYWDQSIITDRTIVANKPDIVVVDRSERRTMIVDITVPHDENLVKAEKDKKIKYLDLAREVVDMWDVDSAIIVPIVVSAHGLIAKSLDQYLRRLSLGSWIKGLIQKAVLLDTARIVRRFLSLEP

SEQ ID NO: 11129 - protein, 1198 aa, Noctua fimbriata
MLTRSAARRARLLPPDPSLSSASPPPESSPVVSAVTPAVAVASSSSDEYFSPPTTPPPVRRRGGRRPPDGLGPRGPPASDRVPAPGGSVQRMRWTQSINANVMRAYYGATEGGNNLTAYRVRMLSLFQVLEPAVNVSAQRLSDQVRVIQRNRMLDDTVLDRLRTEMQSSHVIATPPPQAVVPPQSTIIPNRDNDVSNDIVTNVSTQCNEEMRSALEGAIREYRFTQPDLRPRIPRLPMHNKNRALVAVLDSQLSNYFDNCEDLTDAHSILYCAAVAACRVAHVKFSDDRATRPKPAVPPWQYRIERRIGGARALIGKLICFREGNTRPRVMRFVRRAFSGTDISPRDYMSRITERIDFLKQKVYAWANRIRRYKRRVDRYTQNRTFQRDERWVYRAWERPDQGVADTRLPDDDAMCSFWRSIWSVPVSHTEGEWTQGVERACDLVPEMGAITISPQDVVRAVRPLPNWKSAGPDGLHNFWIKWFTRSHARLAILFQSALESGSLPEFLTTGITHLLHKSGSTAEPKNYRPITCLPTVYKVLTSILRAKINKHIDDNSIMSASQNGCRNGSRGTKELLLIDMAISQQVRRSRSDLSTCWIDYKKAYDSVPHTWLMRVLELYKVDATLRTFLMSCMGQWRTVLRYPGCRQIQRNSEPIRIERGIFQGDSLSPLWFCLALNPLSTLLEDSGLGYRLRRGGQVISHLLYMDDLKLFAPNDLQLMELLKVTETFSSAIRMEFGVDKCAVMHVKRGEIVESVGTQLSDSINLRSLSATETYKYLGMSEALGINVADMKQSLKERFFGRLKKVFNSLLSGGNKVRAFNGWVMPVLMYSFGILKWTQTELDALDRRVRTLLTAYRMHHPRSSVMRLYIPRKCGGRGFLNAKTLHNREICSLREYFLETDVGMHRDVVAVDKGLTPLSLAKENWRKPLVPDTNDRMEVWQSKELHGRFFRALHGPDVDLSASVAWLRCGDLFGETEGFVCAIMDEVMMTNNYRRFIVKDGTVDICRACHRPGESIRHIISGCSRLANGEYLHRHNLVARIIHQQLALKYNLVESEVPYYKYVPDPVLENGSITLYWDQSIITDRTIVANKPDIVVVDRSERRTMIVDITVPHDENLVKAEKDKKIKYLDLAREVVDMWDVDSAIIVPIVVSAHGLIAKSLDQYLRRLSLGSWIKGLIQKAVLLDTARIVRRFLSLEP

SEQ ID NO: 11130 - protein, 1198 aa, Noctua fimbriata
MLTRSAARRARLSPPDPSLSSASPPPESSPVVSAVTPAVAVASSSSDEYFSPPTTPPPVRRRGGRRPPDGLGPRGPPASDRVPAPGGSVQRMRWTQSINANVMRAYYGATEGGNNLTAYRVRMLSLFQVLEPAVNVSAQRLSDQVRVIQRNRMLDDTVLDRLRTEMQSSHVIATPPPQAVVPPQSTIIPNRDNDVSNDIVTNVSTQCNEEMRSALEGAIREYRFMQPDLRPRVPRLPMHNKNRALVAVLDSQLSNYFDNCEDLTDAHSILYCAAVAACRVAHVKFYDDRATRPKPVVPPWQYRIERRIGGARALIGKLICFREGNTRPRVMRFVRRAFSGTDISPRDYMSRITERIDFLKQKVYAWASRIRRYKRRVDRYTQNRTFQRDERWVYRAWERPDQGVADTRIPDDDAMCSFWRSIWSVPVSHTEGEWTREVERACDLVPEMGAITISPQDVVRAVRPLPNWKSPGPDGLHNFWIKWFTRSHARLAILFQSALESGSLPEFLTTGITHLLHKSGSTAEPKNYRPITCLPTVYKVLTSILKAKINKHIDDNSIMSASQNGCRNGSRGTKELLLIDMAISQQVRRSRSDLSTCWIDYKKAYDSVPHTWLMRVLELYKVDATLRTFLMSCMGQWRTVLRYPGCRQIQRNSEPIRIERGIFQGDSLSPLWFCLALNPLSTLLEDSGLGYRLRRGGQVISHLLYMDDLKLFAPNDLQLMELLKVTETFSSAIRMEFGVDKCAVMHVKRGEIVESVGTQLSDSINLRSLSATETYKYLGMSEALGINVADMKQSLKERFFGRLKKVFNSLLSGGNKVRAFNGWVMPVLMYSFGILKWTQTELDALDRRVRTLLTAYRMHHPRSSIMRLYIPRKCGGRGFLNAKTLHNREICSLREYFLETDVGMHRDVVAVDKGLTPLSLAKENWRKPLVLDTNDRMEVWQSKELHGRFFRALHGPDVDLSASVAWLRCGDLFGETEGFVCAIMDEVMMTNNYRRFIVKDGTVDICRACHRPGESIRHIISGCSRLANGEYLHRHNLVARIIHQQLALKYNLVESEVPYYKYVPDPVLENGSITLYWDQSIITDRTIVANKPDIVVVDRSERRTMIVDITVPHDENLVKAEKDKKIKYLDLAREVVDMWDVDSAIIVPIVVSAHGLIAKSLDQYLRRLSLGSWIKGLIQKAVLLDTARIVRRFLSLEP

SEQ ID NO: 11131 - protein, 1081 aa, Atethmia centrago
MLSLFQVLEPAVNVSAQRLSDQVRVIQRKHMLDNVVLDRLRIESRNSHVSPASPLVAVQMQNLPGGSPRPDHADEEDDDEAISVSSQCNVRLRSALDDAFREYRSTPPGLRPRLPRLPMHKKNKALVCALDSQLSNYFDSSKDLTDTHSILHCAAVAACRVAQVKFPNSDRAPRPKPAVPAWQSRIERRIGETRALIGKLICFREGNTRPRVMRFVKRAFAGTDIRSSRDYLTRVTERIDFLKQKICAWANRIRRYRRRSERYTQNRTFQNDERWVYRTWERPDQGVADTRLPDDDAICSFWRNIWSVPVNHTEGDWTKRIERACDLIPEMGALTILPQDVAHAVRPLPNWKSPGPDGLHNFWIKWFQRSHARLASQFQSALESGSLPLFLTTGITHLLHKSGSTAEPKNYRPITCLPTVYKVLTSILRAKINKHIETNLIMSASQNGCKNGSRGTKELLLIDIAISQQVRRSRKDLSTCWIDYKKAYDSVPHTWLMRVLELYKVDATLRTFLMSCMRQWRTVLCYPGCRYIQRNSEPIRIKRGIFQGDSLSPLWFCLALNPLSTLLENSGLGYRLRRGGQVISHLLYMDDLKLFAPNNLQLMELLKVTKTFSSAIRMEFGVDKCAVMHVKRGGIVESVGTQLSDSIHLRSLSSTETYKYLGMSEALGINAADMKQSLRERFFGRLNKVLNSLLSGGNKVRAFNGWVMPVLMYSFGILKWTQTELDALDRRVRTLLTANRMHHPRSSVMRLYIPRKCGGRGFLNAKTLHNHEICSLREYFLETDVVMHRDVVSVDKGLTPLSLADENWRKPIILDTNDRREVWQSKELHGRFYRVLHGPDVDLLASVSWLRFGDLFGETEGFVFAIMDEVIMTNNYRKYIVKDGTVDICRACHRPGESIRHIISGCSRLANGDYLHRHNLVAKIIHQQLALKYSLVESEVPYYRYAPDPVLENGNITLYWDRSIITDRTIVANKPDIVVIDRLTRRTMIIDIAVPHDENLVKAEKDKQIKYLDLAHEVVDMWDVDTAIIVPIVVTANGIIPKSLDQHLKRLSLGSWIKGLIQRAVLLDTARIVRRFLSQEP

SEQ ID NO: 11132 - protein, 1207 aa, Atethmia centrago
MLTRSRARRLRQDTHPTSSVPSLSSASQLPEPAPDVSPVIPAAAVASSSSDEYFSPPTTPPPVRPRGRGRPPASLGLRGPPASDRVPAPGGSVQRMRWTQALNENVMRAYFGATEGGSNLTAYRGRMLSLFQVLEPAVNVSAQRLSDQVRVIQRKHMLDDVVLDRLRIESRNSHVSPASPLVAVQMQNLPGGSPRPDHADEEDDDEAISVSSQCNVRLRSALDDAFREYRSTPPGLRPRLPRLPMHKKNKALVCALDSQLSNYFDSSKDLTDTHSILYCAAVAACRVAQVKFPNSDRAPRPKSAVPAWQSRIERRIGETRALIGKLICFREGNTRPRVMRFVKRAFAGTDIRSSRDYLTRVTERIDFLKQKICAWANRIRRYRRRSERYTQNRTFQNDERWVYRTWERPDQGVADTRLPDDDAICSFWRNIWSVPVNHTEGDWTKRIERACDLIPEMGALTILPQDVAHAVRPLPNWKSPGPDGLHNFWIKWFQRSHARLASQFQSALESGSLPLFLTTGITHLLHKSGSTAEPKNYRPITCLPTVYKVLTSILRAKINKRIETNLIMSASQNGCKNGSRGTKELLLIDIAISQQVRRSRKDLSTCWIDYKKAYDSVPHTWLMRVLELYKVDATLRTFLMSCMRQWRTVLCYPGCRYIQRNSEPIRIKRGIFQGDSLSPLWFCLALNPLSTLLENSGLGYRLRRGGQVISHLLYMDDLKLFAPNNLQLMELLKVTKTFSSAIRMEFGVDKCAVMHVKRGGIVESVGTQLSDSIHLRSLSSTETYKYLGMSEALGINAADMKQSLRERFFGRLNKVLNSLLSGGNKVRAFNGWVMPVLMYSFGILKWTQTELDALDRRVRTLLTANRMHHPRSSVMRLYIPRKCGGRGFLNAKTLHNREICSLREYFLETDVVMHRDVVSVDKGLTPLSLADENWRKPIILDTNDRREVWQSKELHGRFYRVLHGPDVDLLASVSWLRFGDLFGETEGFVFAIMDEVIMTNNYRKYIVKDGTVDICRACHRPGESIRHIISGCSRLANGDYLHRHNLVAKIIHQQLALKYSLVESEVPYYRYAPDPVLENGNITLYWDRSIITDRTIVANKPDIVVIDRLTRRTMIIDIAVPHDENLVKAEKDKQIKYLDLAHEVVDMWDVDTAIIVPIVVTANGIIPKSLDQHLKRLSLGSWIKGLIQRAVLLDTARIVRRFLSQEP

SEQ ID NO: 11133 - protein, 975 aa, Atethmia centrago
MSPEVRPRLPRLPMHKKNRALVAVLDSQLSNYFDDCEDLTDTHSILYCAAVAVCRVAHVIFPNASRATRPKPTVPIWQCRIERRIGGARALIGKLICFREGNTRPRVMRFVRRAFSGTDISPQDYMSRVTERIDFLKQKVYAWVNRIRRYKRRVDRYTQNRTFQSDERWVYRGWEQRDQGVTGTRLPDDDVMCSFWRSIWSVPVSHTEGDWARKVERACDPLPEMGAITICPQDVARAVRPLPNWKSPGPDRLHNFWLKWFLGLHARLAAQYQTALESGSLPQFLTIGVTHLLHKSGSTAEPKNYRPITCLPTVYKVLTSILRAKINKHIDTNSIMSASQNGCRNGSRGTKELLLIDMTISQQVRRFRKDLSTCWIDYKKAYDSVPHTWLMRVLELYKVDATLRTFLMSCMGQWRTVLRYPGCRNIQRNSEPIRIERGIFQGDSLSPLWFCLALNPLSTLLEDSGLGYRLRRGGQVISHLLYMDDLKLFASNNLQLMELLKITETFSSAIRMEFGVDKCAVMHVKRGEIVESVGTQLSDSINLRALSASETYKYLGMSEALGINVTDMKQSLKQRFFDRLKKVFNSLLSGGNKVRAFNGWVMPVLMYSFGILKWTQTELDALDRRVRTLLTAYRMHHPRSSVMRLYIPRKCGGRGFLNAKTLHNREVCSLREYFLEADVGMHRDVVAVDKGLTPLSLAKENWRKLVVLDTNDRREVWQSKELHGRFFRALHEPDVDFQASVAWLRFGDLFGETEGFVCAIMDEVIMTKNYRSFIVKDGTVDMCRACHRPGESIRHIISGCSRLANEEYLHRHNLVARIIHQQLALKYSLVESEVPYYRYVPDPVLDNGNITLYWDRSIITDRTIVANKPDIVVVDRTERRAMIVDITVPHDGNLVKAEKDKQIKYLDLAREVVDMWDVDSAIIVPIVVSANGLIAKSLDQHLRRLTLDGWIKGLIQKAVLLDTARIVRRFLPLEP

SEQ ID NO: 11134 - protein, 1195 aa, Mesoligia furuncula
MLTRSALRKARLPPPDSSLSSASPPPVPSLTVSAVTTPAAAVASSSSDEYFSPPTTPPPARRRGGRRPPDGLGPRGPPASDRVPAPGGSVQGMRWTQSINENVMRSYYGATEGGNNLTAYRVRMLSLFQVLEPAVNVSAQRLSDQVRVIQRNHMLDDTVLDRLRNEMQSSHVIAPQSQTAVVLPQSNTSHADEGSNDRATNVSTQCNEELRSTLEDAIQEYRFMSPELRPRLPRLPMHNKNRALVAVLDSQLSNYFDGCEVLTDTHSILYCAAVAACRVAHVKFANDSRATRPKPAVPAWQCRIERRIGEARALIGKLTCFREGNTRPRVMRFVRLAFLGTDISPQDYMSCVTERIDFLKQKVYAWANRIRRYKRRVERYTQNRTFQSDQRWVYRDWERPDQSVTDTCLPDDDAMCSFWRSIWSVPVSHTESDWTREVERACDPIPEMGAITICPQDVARAVRPLPNWKSPGPDGLHNFWIKWFTRSHARLASQFQTALESGSLPQFLTTGITHLLHKSGSTAEPKNYRPITCLPTVYKVLTSILRVKIDKHINTNSIMSASQNGCRNGSRGTKELLLIDMTISQQVRRFRKDLSTCWIDYKKAYDSVPHTWLMRVLGLYKVDTTLRTFLMSCMGQWRTVLRYPGCRNIQRNSEPIRIERGIFQGDSLSPLWFCLALNPLSTLLKDSGLGYRLRRGGQVIFHLLYMDDLKLFAPNNLHLMELLKITETFSSAIRMEFGVEKCAVMHVKRGEIVESVGTQLSDSTNLRALSASETYKYLGMSETLGINVTDMKQSLKERFFGRLKKVFNSLLSGGNKVRAFNGWVMPLLMYSFGILKWTQTELDALDRKVRTLLTANRMHHPRSSVMRLYIPRKCGGRGFLNAKTLHNREICSLREYFLETDVGMHRDVVAVDKGLTPLSLGKENWRKPVVFDTNDRMEVWQSKELHGRFFRALHGPDVDLLASVAWLRFGDLFGETEGFVCAIMDEVMMTNNYRRFIVKDGTVDICRACHRPGESIRHIISGCSRLANGEYLHRHNLVARIIHQQLALKYSLVESEVPYYRYVPDTVLENGNITLYWDRSIITDRTIIANKPDIVVVDRSERRAMIVDITVPHDENLVKAEKDKQIKYLELAHEVVDMWDVDSAIIVPIVVTANGLIAKSLDQHLKRLSLGSWIKGLIQKAVLLDTARIVLSLQP

SEQ ID NO: 11135 - protein, 1111 aa, Mesoligia furuncula
MRWTQTVNENVMRAYFGATEGGSNLTAYRGRMLSLFQVLEPAVNVSAQRLSDQVRVIQRNHMLDNVVLDRLRLESRNSHVTPASSLIAVQLQNVPSVSPRPDHVYVEDDDEAISVSSQCNARLRSALEDAFREYRSIPPGLRPRLPRLPMHKKNKALVCALDSQLSNCFNNSKDLTDTHSILYCAAVAACHVAHVKFPNSDRAPRPKPAVPAWQCRIECRIGEARALIGKLICFREGNTRPRVMRFVRRAFSGTDISSRDYLSRVTERIDFLKQKIYAWANRIRRYRRRVERYTQNRTFQNDERWVYRAWERPDQGVTDTRLPDDDAMCSFWRNIWSVPVSHTEGDWTAKIERACDLIPEMGVLTISPQDVARAVRPLPNWKSPGPDGLHNFWIKWFQGSHARLASQFQSALESGSLPQFLTTGITHLLHKSGSTADPKNYRPITCLPTVYKVLTSILRAKINKHIDTNSIMSVSQNGCGNGSRGTKELLLIDMTISQQVRRSRKDLSTCWIDYKKAYDSVPHTWLMRVLELYKVDTTLRTFLMSCMGQWRTVLRYPGCRNIQRNSEPIRIERGIFQGDSLSPLWFCLALNPLSTLLEDSGLGYRLRRGGQVISHLLYMDDLKLFAPNNLQLMELLKITETFSSAIRMEFGVDKCAVMHVKRGEIVESVGTQLSDSTNLRALSASETYKYLGMSEALGINVTDMKQSLKERFFGRLKKVFNSLLSGGNKVRAFNGWVMPVLMYSFGILKWTQTELDALDRKVRTLLTANRMHHPRSSVMRLYIPRKCGGRGFLNAKTLHNREICSLREYFLETDVGMHRDVVAVDKGLTPLSLGKENWRKPVVLDTNDRMEVWQSKELHGRFFRALHGPDVDLLASVAWLRFGDLFGETEGFVYAIMDEVMMTNNYRRFIVKDGTVDICRACHRPGESIRHIISGCSRLANGEYLHRHNLVARIIHQQLALKYSLVESEVPYYRYVPDPVLENGNITLYWDRSIITDRTIVANKPDIVVVDRSERRAMIVDITVPHDENLVKAEKDKQVKYLDLAREVVDMWDVDSAIIVPIVVTANGLIAKSLDQHLKRLSLGSWIKGLIQKAVLLDTARIVRRFLSLEP

SEQ ID NO: 11136 - protein, 1206 aa, Mesoligia furuncula
MLTRSRARNLLKNTHPTSSGSSLSSASQLPDPAPDVSSVRPAAAVASSSSDEYFSPPTTPPPVCRRGRGRPPASLGLRGPPASDRVPAPGGSVQRMRWTQTVNENVMRAYFGATEGGSNLTAYRGRMLSLFQVLEPAVNVSAQRLSDQVRVIQRNHMLDNVVLDRLRLESRNSHVTPASSLIAVQLQNVPSVSPRPDHVYVEDDDEAISVSSQCNARLRSALEDAFREYRSIPPGLRPRLPRLPMHKKNKALVCALDSQLSNCFNNSKDLTDTHSILYCAAVAACHVAHVKFPNSDRAPRPKPAVPAWQCRIECRIGEARALIGKLICFREGNTRPRVMRFVRRAFSGTDISSRDYLSRVTERIDFLKQKIYAWANRIRRYRRRVERYTQNRTFQNDERWVYRAWERPDQGVTDTRLPDDDAMCSFWRNIWSVPVSHTEGDWTAKIERACDLIPEMGVLTISPQDVARAVRPLPNWKSPGPDGLHNFWIKWFQGSHARLASQFQSALESGSLPQFLTTGITHLLHKSGSTADPKNYRPITCLPTVYKVLTSILRAKINKHIDTNSIMSVSQNGCGNGSRGTKELLLIDMTISQQVRRSRKDLSTCWIDYKKAYDSVPHTWLMRVLELYKVDTTLRTFLMSCMGQWRTVLRYPGCRNIQRNSEPIRIERGIFQGDSLSPLWFCLALNPLSTLLEDSGLGYRLRRGGQVISHLLYMDDLKLFAPNNLQLMELLKITETFSSAIRMEFGVDKCAVMHVKRGEIVESVGTQLSDSTNLRALSASETYKYLGMSEALGINVTDMKQSLKERFFGRLKKVFNSLLSGGNKVRAFNGWVMPVLMYSFGILKWTQTELDALDRKVRTLLTANRMHHPRSSVMRLYIPRKCGGRGFLNAKTLHNREICSLREYFLETDVGIHRDVVAVDKGLTPLSLGKENWRKPVVLDTNDRMEVWQSKELHGRFFRALHGPDVDLLASVAWLRFGDLFGETEGFVYAIMDEVMMTNNYRRFIVKDGTVDICRACHRPGESIRHIISGCSRLANGEYLHRHNLVARIIHQQLALKYSLVESEVPYYRYVPDPVLENGNITLYWDRSIITDRTIVANKPDIVVVDRSERRAMIVDITVPHDENLVKAEKDKQVKYLDLAREVVDMWDVDSAIIVPIVVTANGLIAKNLDQHLKRLSLGSWIKGLIQKAVLLDTARIVRRFLSLEP

SEQ ID NO: 11137 - protein, 1198 aa, Mesoligia furuncula
MLTRSAARRARLPPPDSSLSSASPPPVSSLTVSAVTTPAAAVASSSSDEYFSPPTTPPPARRRGGRRPPDGLGPRGPPASDRVPAPGGSVQRMRWTQSINENVMRSYYGATEGGNNLTAYRVRMLSLFQVLEPAVNVSAQRLSDQVRVIQRNHMLDDTVLDRLRNETQSSHVIAPQSQTAVVLPQSNTSHADEGSNDRATNVSTQCNEELRSTLEDAIQEYRFMSPELRPRLPRLPMHNKNRALVAVLDSQLSNYFDGCEDLTDTHSILYCAAVAACRVAHVKFPNDSRATRPKPAVPAWQCRIERRIGGARALIGKLTCFREGNTRPRVMRFVRRAFLGTDISPQDYMSCVTERIDFLKQKVYAWANRIRRYKRRVERYTQNRTIQSDERWVYRDWERPDQSVTDTCLPDDDAMCSFWRSIWSVPVSHTESDWTREVERACDPIPEMGAITICPQDVARAVRPLPNWKSPGPDGLHNFWIKWFTRSHARLASQFQTALESGSLPQFLTTGITHLLHKSGSTAEPKNYRPITCLPTVYKVLTSILRVKIDNHINTNSIMSASQNGCRNGSRGTKELLLIDMTISQQVRRFRKDLSTCWIDYKKAYDSVPHTWLMRVLELYKIDTTLRTFLMSCMGQWRTVLRYPGCRNIQRNSEPIRIERGIFQGDSLNPLWFCLALNPLSTLLEDSGLGYRLRRGGQVISHLLYMDDLKLFAPNNLQLMELLKITETFSSAIRMEFGVDKCAVMHVKRGEIVESVGTQLSDSTNLRALSASETYKYLGMSEALGINVSDMKQSLKERFFGRLKKVFNSLLSGGNKVRAFNGWVMPVLMYSFGILKWTQTELDAVDRKVRTLLTANRMHHPRSSVMRLYIPRKCGGRGFLNAKTLHNREICSLREYFLEIDVGMHRDVVAVDKGLTPLSLGKENWRKPVVLDTNDRMEVWQSKELHGRFFRALHGPDVDLLASVAWLRFGDLFGETEGFVCAIMDEVMMTNNYRRFIVKDGTVDICRACHRPGESIRHIISGCSRLANGEYLHRHNLVARIIHQQLALKYSLVESEVPYYRYVPDPVLENGNITLYWDRSIITDRTIVANKPDIVVVDRSERRAMIVDITVPHDENLVKAEKDKQIKYLDLAHEVVDMWDVDSAIIVPIVVTANGLIAKSLDQHLKRLSLGSWIKGLIQKAVLLDTARIVRRFLSLEP

SEQ ID NO: 11138 - protein, 1198 aa, Mesoligia furuncula
MLTRSALRKARLPPPDSSLSSASPPPVPSLTVSAVTTPAAAAASSSSDEYFSPPTTPPPARRRGGRRPPDGLGPRGPPASDRVPAPGGSVQRMRWTQSINENVMRSYYGATEGGKNLTAYRVRMLSLFQALEPTVNVSAQRLSDQVRVIQRNHMLDDTVLDRLRNEMQSSHVIAPQSQTAVVLPQSNTSHADEGSNDRATNVSTQCNEELRSTLEDAIQEYRFMSPELRPRLPRLPMHNKNRALVAVLDSQLSNYFDGCEDLTDTHSILYCAAVAACRVAHVKFANDSRATRPKPAVPAWQCRIERRIGEARALIGKLTCFREGNTRPRVMRFVRRAFLGTDISPQDYMSCVTERIDFLKQKVYAWANRIRRYKRRVERYTQNRTFQSDQRWVYRDWERPDQSVTDTCLPDDDAMCSFWRSIWSVPVSHTESDWTREVERACDPIPEMGAITICPQDVARAVRPLPNWKSPGPDGLHNFWIKWFTRSHARLASQFQTALESGSLPQFLTTGITHLLHKSGSTAEPKNYRPITCLPTVYKVLTSILRVKIDKHINTNSIMSASQNGCRNGSRGTKELLLIDMTISQQVRRFRKDLSTCWIDYKKAYDSVPHTWLMRVLGLYKVDTTLRTFLMSCMGQWRTVLRYPGCRNIQRNSEPIRIERGIFQGDSLSPLWFCLALNPLSTLLEDSGLGYRLRRGGQVISHLLYMDDLKLFAPNNLRLMELLKITETFSSAIRMEFGVDKCAVMHVKRGEIVESVGTQLSDSTNLRALSASETYKYLGMSEALGINVTDMKQSLKERFFGRLKKVFNSLLSGGNKVRAFNGWVMPVLMYSFGILKWTQTELDALDRKVRTLLTANRMHHPRSSVMRLYIPRKCGGRGFLNAKTLHNREICSLREYFLETDVGMHRDVVAVDKGLTPLSLGKENWRKPVVLDTNDRMEVWQSKELHGRFFRALHGPDVDLLASVAWLRFGDLFGETEGFVCAIMDEVMMTNNYRRFIVKDGTVDICRACHRPGESIRHIISGCSRLANGEYLHRHNLVARIIHQQLALKYSLVESEVPYYRYVPDPVLENGNITLYWDRSIITDRTIIANKPDIVVVDRSERRVMIVDITVPHDENLVKAEKDKQIKYLDLAHEVVDMWDVDSAIIVPIVVTANGLIAKSLDQHLKRLSLGSWIKGLIQKAVLLDTARIVRRFLSLEP

SEQ ID NO: 11139 - protein, 1198 aa, Mesoligia furuncula
MLTRLAARRARLLPPDSSLSSASPPPVPSPTVSAVMTPAAAVASSSSDEYFSPPTTPPPARRRRGRRPPDGLGLRGPPASDRVPALGGSVQRMRWTQSINENVMRSYYGATEGGNILTAYRVRMLSLFQVLEPAVNVSAQRLSDQVRVIQRNHMLDDTVLDRLRSEMQSSHVIAPQSQTAAILPQPNISHTDEGSNDRAINVSTQCNEELRSALEDAIQEYRFMSPELRPRLPRLPMHNKNRALVAVLDSQLSKYFDTCEDLIDTHSILYCAAVAACRVAHVKFANDSRATRPKQAVPAWQCRIERRIGGARTLIGKLICFREGNTRPRVMRFVRRAFSGTDISPQDYMSCVTERIDFLKQKVYAWANRIRRYRRRVERYTQNRTFQSDERWVYRGWERPDQGVAETCLPDDDAMCSFWRSIWSVPVSHTEGDWAREVERACDPIPEMGAITICPQDVARAVRPLPNWKSPGPDGLQNFWIKWFPRSHARLASQFQTALESGSLPQFLTTGITHLLHKSGSTAEPKNYRPITCLPTVYKVLTSILRTKINKHIDTNSIMSASQNGCRNGSRGTKELLLIDMAISQQVRRFRKDLSTCWIDYKKAYDSVPHTWLMRVLELYKVDTTLRTFLMSCMGQWRTVLRYPGCRNIQRNSEPIRIERGIFQGDSLSPLWFCLALNPLSTLLEDSGLGYRLRRGGQVISHLLYMDDLKLFAPNTLQLMELLKITETFSSAIRMEFGVDKCAVMHVKRGEIVESVGTQLLDSTNLRALSASETYKYLGMSEALGINVADMKQSVKERFFGRLKKVLNSLLSGGNKVRAFNGWVMPVLMYSFGILKWTQTELDALDRRVRTLLTANRMHHPRSSVMRLYIPRKCGGRGFLNAKTLHNREICSLREYFLETDVGMHRDVVIVDKGLTPLSLAKENWRKPVVLDTNDRMEVWQSKELHGRFLRALRGPDVDLQASVAWLRFGNLFGETEGFVCAIMDEVMMTNNYRRFIVKDGTVDICRACHRLGESIRHIISGCSRLANGEYLHRHNLVARIIHQQLALKYNLVESEVPYYRYVPDPVLENGNITLYWDRSIITDRTIVANKPDIVVVDRSERRAMIVDITVPHDENLVKAEKDKQIKYLDLAREVVDMWDVDTAIIVPIVVTANGLIAKSLDQHLRRLSLGSWIKGLIQRAVLLDTARIVRRFLSLKP

SEQ ID NO: 11140 - protein, 1199 aa, Spilarctia lutea
MLTRARSRAQLSPPDSSLRSTLPSPEAITEVPVGAEASSSSSSDEFFSPPTSPIPVRRQGRGRPPTSLGSRGPLTSNRAPAAGGDVRRMKWTHSINENVMRAYFRATELGTNLTAYRVRLVSLFQELEPSVNVSAQRLSDQVRAIQRCHLLDDAVLERIRSDIWNILIVPSSSHAVDLVPINTPQLPYDHYVDELMEGEDISVSTQCDNKIRSALEDAIQEYRYVNCNNRPRLPRLPIHKRNLALVGALDSLLSDYFDNSEDLSDSHSILYCAAVAVCRVANVKFKENMTYVRPKNTIPAWQCRIERRIAETRTLIGKLVSFRSGNTRPRVMRFVKHAFSGTTISPGQYMSCVTERIDFLKQKVYAWANRIRRYRKRVDRYNQNRMFQRNEKWVYRKWEEPSPCVSDGQFPDDNATNTFWRNIWSVPVTHTEGDWCRDVERLCESIISMVPLTIGKDDVSCAARSLPNWKSPGPDVLHNFWLKWFRSSHACLASQFQAAVDSSSLPQFLTTGITHLLYKSGSAMDPKNFRPITCLPTIYKLLTSILRLKISTHINNNSIISVSQNGCRSGTRGTKELLIMDMTISQQVRRNRKSLATCWIDYKKAYDSVPHTWLLRVLELYKIDTTLCTFLKSCMGQWRTVLRYPRCRQTAVNDVLINIERGIFQGDSLSSLWFCLALNPLSTLLEGSELGYRLRKDDRAISHLLYMDVFKLLAPTKLQLTELLKVTENFSNSIKMEFGVDKCAVMYVKKGLIVESEGIELSDSIKLWSLSATESYKYLGFSQSLGIPESDMKQALRERFFGRLKKVLKSLLSGGNKVRAYNGWVMPVLMYSFGVLRWTQTELDTLDRRVRTLLTAFRMHHPRSSVMRLYIPRKFGGRGFLNIKTLHNREIYNLREYFLHTDVGMHRNVVAVDSGLTPLALAKENWRKPVVLSTNDRREVWKGKEFHGRFYRALHGPDIDFKTSTSWLRYGDLFGETEGFVCAIMDEVIMTNNYRRYILKDGTVDICRACHRPGESIRHIISGCSRLANGEYLHRHNQVARIVHQQLALKYHLVNSEVPYYRYVPDPVLENGRATLYWDRSIITNRTIVANKPDIVVIDRLERRAIIIDIAVPHDENLVKVEKEKQIKYLDLSHEIVDMWNVGSVIIVPIVVSAHGLIAKSLDQHLKRLTLEGWIKGLIQKAVLLDTARIVRRFLSLEP

SEQ ID NO: 11141 - protein, 1199 aa, Spilarctia lutea
MLTRARRRAQLSPPDSSLRSALPSPEEAIEVPAGAEASSSSSSDEFFSPPTSPIPVRRQGRGRPPTSLGSRGPLTSNRAPAAGGDVRRMKWTHSINENVMRAYFRATELGTNLTAYRVRLVSLFQELEPAVNVSAQRLSDQVRAIQRCHLLDDAALERIRSDIRNSLTVPSSSHVLNVVTNSTPQVPQNDDISELVDSEIISVSTQYNDRIRSTLEDAIREYRYVNLNNRPRLSRLPIHKRNLALVSALDSILPKYFSNSEDLSDTHSILYCAAIAVCRVAGVKFAEYTTTTRQENTLPAWQYRIERRIAEARTLIGKLMSFRSGNTRPRVMRFVKRAFLGTTISPQEYMSCVTERIDFLKQKVYAWANRIRRYRKRVDRYNQNRMFQRNEKWVYRKWENLSPCMSDGQVPDENATNSFWRNMWSVPVTHTEGDWYRDVERSCESLLPMEPISIDEEDVSCAVRSLPNWKAPGPDGLHNFWLKWFRSSHACLASQFQTALDSGSLPQFLTTGITHLLYKSGDAMDPKNFRPITCLPTLYKLLTSILRLKITTHINHNSILSISQNGCRSGTRGTKELLIIDMTISQQVRRNRKSLATCWIDYKKAFDSVPHTWLLKVLELYKIDTTLCTFLKVCMGQWRTALRYPGCRQSAMNDVLIKIERGIFQGDSLSPLWFCLALNPLSTLLEGSGLGYRLQKDDRVISHLFYMDDLKLLAPTKLQLTALLKVTENFSNSIKMEFGVDKCAVMYVKKGEIVESEGIELSDSTKLRSLSATETYKYLGFSQSLGMPESDMKQTLRERFFSRLKKVLKSLLSGGNKVRACNGWVMPVLMYSFGVLRWTQTELDAIDRRVRTLLTAFRMHHPRSSVMRLYIPRRLGGRGLLNIKTLHNREVYNLREYFLQTDVGVHRSVVTVDTGLTPLALAKENWRKPVVLSTNDRREVWKGKELHGRFYRALHGPDIDFKTSTSWLRYGDLFGETEGFVCAIMDEVIMTNNYRKYILKDGTVDICRACHRPGESIRHIISGCSRLANGEYLHRHNQVARIVHQQLALKYHLVNSEVPYYRYVPDPVLENGRATLYWDRSIITDRTIVANKPDIVVIDRLERRAIIIDIAVPHDENLVKVEKEKQIKYLDLSHEIVDMWNVDSVIIVPIVVSAHGLIAKSLDQHLKRLMLEGWIKGLIQKAVLLDTARIVRRFLSLEP

SEQ ID NO: 11142 - protein, 1046 aa, Xestia c-nigrum
MLDDTVLDRLRTEVQSSHVTATPPSQAVVPPQSTVITDRDDDVCSDMITNVATQCSEDMRSALEGAIREYRFVTPELRPRLPRLPMNNKNRMLVAVLDSQLSNYFDDCEDLTDVHSVLYCAAVAACRVARVKFSDDRVTRPKPAVPAWQYRIEQRIGGARALIGKLICFREGNTRPRVMRFVRRAFSGTDISPRDYMSRVTERIDFLKQKVYAWASRIRRYKRRVDRYTQNRTFQRDERWVYRAWERPDQGVADTHLPDDDAMCSFWRSIWSVPVSHAEGEWTRVIERACDPVPEMGAITISPQDVACAVRPLPNWKSPGPDGLHNFWIKWFTGSHARLATLFQSALESGSLPEFLTTGLTHLLHKSGSTAEPKNYRPITCLPTVYKVLTSILRTKICKHIDDNSVMSASQNGCRNGSRGTKELLLIDMAISQQVRRSRKDLSTCWIDYKKAYDSVPHTWLMRVLELYKVDATLRTFLMSCMRQWRTVLRYPGCRQIQRNSEPIRIERGIFQGDSLSPLWFCLALNPLSTLLEDSGLGYQLRKDGRVISHLLYMDDLKLFAPNDLQLMELLKVTETFSSAIRMEFGVDKCAVMHVKRGEIVESVGTQLSDSINLRSLSATETYKYLGMSEALGINVADMKQSLKERFFGRLKKVFNSLLSGGNKVRAFNGWVMPVLMYSFGILKWTQTELDALDTKVRKLLTAFRMHHPRSSVMRLYIPRKCGGRGFLNAKTLHNREICSLREYFQEADVEMHRDVVAMDKGLTPLSLAKENWRKPIVLTTDDRRKEWQGKELHGRFYRALHGPDVDFLASVSWLRSGDLFGETEGFVCAIMDEVMMTNNYRRFIVKDGTVDICRACHRPGESIRHIISGCSRLANGEYLHRHNLVARIIHQQLALKYNLVESEVPYYRYVPDPVLVNGNITLYWDQSIITDRTVIANRPDIVVMDRSERRAMIVDITVPHDENLVKAEKDKQIKYLDLAREVVDMWEVDSAIIVPIVVSAHGLIAKSLDQHLRRLSLGSWIKGLIQKAVLLDTARIVRRFFSLEP

SEQ ID NO: 11143 - protein, 1107 aa, Xestia c-nigrum
MRWTQSNNENVMRAYYGATEGGNNLTAYRVRMLSLFQVLEPAVNVSAQRLSDQVRVIQRNRMLDDTVLDRLRTEVQSSHVTATPRSQAVVPPQSTIITDRDDDVCSDMITNVATQCSEDMRSALEGAIREYRFVTPELRPRLPRLPMNNKNRMLVAVLDSQLSNYFDDCEDLTDVHSVLYCAAVAACRVARVKFSDDRVTRPKPAVPAWQYRIEQRIGGARALIGKLICFREGNTRPRVMRFVRRAFSGTDISPRDYMSRVTERIDFLKQKVYAWASRIRRYKRRVDRYTLNRTFQRDERWVYRTWERPDQGVADTRLPDDDAMCSFWRSIWSVPVSHAEGEWTRVIERACDPVPEMGAITISPQDVACAVRPLPNWKSPGPDGLHNFWIKWFTGSHARLATLFQSALESGSLPEFLTTGLTHLLHKSGSTAEPKNYRPITCLPTVYKVLTSILRTKICKHIDDNSVMSASQNGCRNGSRGTKELLLIDMAISQQVRRSRKDLSTCWIDYKKAYDSVPHTWLMRVLELYKVDATLRTFLMSCMRQWRTVLRYPGCRQIQRNSEPIRIERGIFQGDSLSPLWFCLALNPLSTLLEDSGLGYQLRKDGRVISHLLYMDDLKLFAPNDLQLMELLKVTETFSSAIRMEFGVDKCAVMHVKRGEIVESVGTQLSGSINLRSLSATETYKYLGMSEALGINVADMKQSLKERFFGRLKKVFNSLLSGGNKVRAFNGWVMPVLMYSFGILKWTQTELDALDTKVRKLLTAFRMHHPRSPVMRLYIPRKCGGRGFLNAKTLHNREICSLREYFQEADVEMHRDVVAMDKGLTPLSLAKENWRKPIVLTTDDRRKEWQGKELHGRFYRALHGPDVDFLASVSWLRSGDLFGETEGFVCAIMDEVMMTNNYRRFIVKDGTVDICRACHRPGKSIRHIISGCSRLANGEYLHRHNLVARIIHQQLALKYNLVESEVPYYRYVPDPVLVNGNITLYWDQSIITDRTVIANRPDIVVMDRSERRAMIVDITVPHDENLVKAEKDKQIKYLDLAREVVDMWEVDSAIIVPIVVSAHGLIAKSLDQHLRRLSLGSWIKGLIQKAVLLDTARIVRRFFSLEP

SEQ ID NO: 11144 - protein, 1198 aa, Griposia aprilina
MLTRSAARRARPPPPDSSLSSASLPPVSSPTVSAVTTPAAVVASSSSDEYFSPPTTPPPVRRRGGHRPPDGLGPRGPPASDRVPAPGGSVQRMRWTRSINENVMRSYYGATEGGNNLTAYRVRMLSLFQVLEPAVNVSAQRLSDQVRVIQRNHMLDDTVLDRLRNEMQSSHVIAPPSQTVVVLPQSNTSQADKESDDRATNVSTQCNDELRSALEDAIREYRFISPELRPRLPRLPMHNKNRVLVAALDAQLSNYFDDCVDPTDTHSILYCAAVAACRVARVKFANDSRATRPKPAVPAWQCRIERRIGGARALIGKLICFREGNTRPRVMRFVRRAFAGTNISPQDYMSCVTERIDFLKQKVYAWANRIRRYKRRVERYTQNRTFQRDERWVYRGWERPDQGVADTCLPDDDAMCYFWRNIWSVPVSHTEGDWTREVERACDPIPEMGAITICPQDVTRAVRPLPNWKSPGPDGLHNFWIKWFGRSHARLAAQYQVALESGSLPQFLTTGVTHLLHKSGSTAEPKNYRPIACLPTVYKVLTSILRDKINKHIDTNYIMSPSQNGCRNGSRGTKELLLIDMAISQQVRRSRKDLSTCWIDYKKAYDSVPHTWLMRVLELYKVEATLRTFLMSCMGQWRTVLRYPACRNTQRNSEPIRIERGIFQGDSLSPLWFCLALNPLSTLLEDSGLGYRLRRGGQVISHLLYMDDLKLFAPNNSQLMDLLKVTETFSSAIRMEFGVDKCAVMHVKRGEIVESVGTQLSDSINLRALSASETYKYLGMSEALGINGTDMKQSLKDRFFGRLKKVFNSLLSGGNKVRAFNGWVMPVLMYSFGILKWTQTELDALDRKVRTLLTANRMHHPRSSVMRLYIPRKCGGRGFLNAKTLHNREICSLREYFLEADVGMHRDVVTVDKGLTPLSLGKENWRKPVVLDTNDRMEVWQSKELHGRFFRALHGPDVDQLASVAWLRFGDLFGETEGFVCAIMDEVMMTNNYRRFIVKDGTVDICRACHRPGESIRHIISGCSRLANEEYLHRHNLVARIIHQQLALKYSLVESEVPYYRYVPDPVLENGHITLYWDRSIITDRTIVANKPDIVMVDRLERRAMIVDITVPHDGNLVKAEKDKQIKYLDLAREVVDMWDVDSAIIVPIVVTANGLIAKSLDQHLRRLSLGSWIKGLIQKAVLLDTARIVRRFLSLEP

SEQ ID NO: 11145 - protein, 1197 aa, Griposia aprilina
MLTRSAALRARLPTPDSSLSSASPPPVSSPIVSAVTTPAAVVASSSSDEYFSPPTTPPPARRRGGHRPPDGLGPRGPPASDRVPAPGGSVQRMRWTQSINENVMRSYYGATEGGNNLTAYRVRMLSLFQVLEPAVNVSAQRLSDQVRVIQRNHMLDDTVLDRLRSEMQSSHVITPPSQTVVVLPQPITSHDEGSDDRATNVSTQCNEELKSALEGAIREYRFMSPELRPRLPRLPMHNKNRALVAALDSQLSNYFDDCVDLTDTHSILYCAAVAACRVAHVKFANDSRATRPKPAVPAWQCRIERRIGGARALIGKLICFREGNTRPRVMRFVRRAFAGTDVSPQDYISCVTERIDFLKQKVYAWASRIRRYKRRVERYTQNRTFQRDERWVYRDWERPDQGVADTYLPDDDAMCSFWHNIWSVPVSHTEGDWTREVERACERIPEMGAITICPQDVARAVRPLPNWKSPGPDGLHNFWIKWFLRSHACLAAQFQAALESGSLPQFLTTGVTHLLHKSGSIAEPKNYRPITCLPTVYKVLTSILRAKINKHIDTNSIMSASQNGCRNGSRGTKELLLIDMAISQQVRRSRKDLSTCWIDYKKAYDSVPHTWLMRVLELYKVDATLRTFLKSCMGQWRTVLRYPTCRNTQRNSEPIRIERGIFQGDSLSPLWFCLALNPLSTLLEDSGLGYRLRRGGRVISHLLYMDDLKLFAPNNLQLIELLKVTETFSSAIRMEFGLDKCAVMHVKRGEIVESVGTQLSDSMNLRALSASETYKYLGMSEALGVNNTDMKQSLKERFFGRLKKVFNSLLSGGNKVRAFNGWVMPVLMYSFGILKWTQTELDTLDRRVRTLLTANRMHHPRSSVMRLYIPRKCGGRGFLNAKALHNREICSLREYFLETDVGMHRDVVAVDKGLTPLSLAKENWRKPVVLDTNDRMEVWQSKELHGRFFRALHGPDVDVQASVAWLRFGDLFGETEGFVCAIMDEVMMTNNYRRFIVKDGTVDICRACHRPGESIRHIISGCSRLANEEYLHRHNLVARIIHQQLALKYSFVESEVPYYRYVPDPVLENGTITLYWDRSIITDRTIIANKPDIVLVDRRERRAMIVDITIPHDGNLVKAEKDKQIKYLDLAREVVDMWDVDSAIIVPIVVTANGLIAKSLDQHLRRLSLGSWIRGLIQKAVLLDTARIVRRFLSLEP

SEQ ID NO: 11146 - protein, 1199 aa, Griposia aprilina
MMLTRSAKRRAHPPPPDSSLSSASPPPVSSPTVSAVTTPAAVVASSSSDEYFSPPTTPPPVRRRGGHRPPDGLGPRGPPASDRVPAPGGSVQRMRWTRSINENVMRSYYGATEGGNNLTAYRVRMLSLFQVLEPAVNVSAQRLSDQVRVIQRNHMLDDTVLDRLRNEMQSSHVIAPPSQTVVVLPQSNTSQADEESDDRATNVSTQCNDELRSALEDAIREYRFISPELRPRLPRLPMHNKNRVLVAALDAQLSNYFDDCVDLTDTHSILYCAAVAACRVAHIKFANDSRPTRPKPAVPAWQCRIERRIGGARALIGKLICFREGNTRPRVMRFVRRAFAGTNISPQDYMSCVTERIDFLKQKVYAWANRIRRYKRRVERYTQNRTFQRDERWVYRGWERPAQGVADTCLPDDDAMCSFWRNIWSVPVSHTEGDWGREVERACDPIPEMGAICICPQDVTRAVRPLPNWKSPGPDGLQNFWIKWFGRSHARLAAQYQVAIESGSLPQFLTTGVTHLLHKSGSTAEPKNYRPITCLPTVYKVLTSILRAKINKYIDTNSIMSPSQNGCRNGSRGTKELLLIDMAISQQVRRSRKDLSTCWIDYKKAYDSVPHTWLVRVLELYKVDATLRTFLKSCMGQWRTILHYPGCRNIQRDNEPIRIERGIFQGDSLSPLWFCLALNPLSTLLEDSGLGYRLRRGGQVISHLLYMDDLKLFAPNNLQLMELLKVTETFSSAIRMEFGVDKCAVMHVKRGEIVESVGTQLSYSINLRALSASDTYKYLGMSEALGINGTDMKQSLKERFFGRLKKVFNSLLSGGNKVRAFNGWVMPVLMYSFGILKWTQTELDALDRKVRTLLTANRMHHPRSSVMRLYIPRKCGGRGFLNAKTLHNREICSLREYFLEADVGMHTDVVKVDKGLTPLSLAKENWRKPVVLDTNDRMEVWQSKELHGRFFRALHEPDVDQLASVAWLRFGDLFGETEGFVCAIMDEVILTNNYRRHIMKDGTVDVCRACHRPGESIRHIISGCSRLANEEYLHRHNLVARIIHQQLALKYSLVESEVPYYRYVPDPVLENGHITLYWDRSIITDRTIVANKPDIVVVDRLERRAMIVDITVPHDGNLVKAEKDKQIKYLDLAREVVDMWDVDSAIIVPIVVTANGLIAKSLDQHLRRLSLGSWIKGLIQKAVLLDTARIVRRFLSLEP

SEQ ID NO: 11147 - protein, 1004 aa, Griposia aprilina
MIGLQTKVSTQCNDELRSALEDAIREYRFISPELRPRLPRLPMHNKNRVLVAALDAQLSNYFDDCVDLTDTHSILYCAAVAACRVAHVKFANDSRATRPKPAVPAWQCRIERRIGGARALIGKLICFREGNTRPRVMRFVRRAFAGTNISPQDYMSCVTERIDFLKQKVYAWANRIRRYKRRVERYTQNRTFQRDERWVYRGWERPDQGVADTCLPDDDAMCSFWRNIWSVPVSHTEGDWTREVERACDPIPEMGAITICPQDVTRAVRPLPNWKSPGPDGLHNFWIKWFGRSHARLAAQYQVALESGSLPQFLTTGVTHLLHKSGSTAEPKNYRPIACLPTVYKVLTSILRDKINKHIDTNYIMSPSQNGCRNGSRGTKELLLIDMAISQQVRRARKDLSTCWIDYKKAYDSVPHTWLMRVLELYKVEATLRTFLMSCMGQWRTVLHYPACRNTQRNSEPIRIERGIFQGDSLSPLWFCLALNPLSTLLEDSGLGYRLRRGGQVISHLLYMDDLKLFAPNNSQLMDLLKVTETFSSAIRMEFGVDKCAVMHVKRGEIVESVGTQLTDSINLRALSASETYKYLGMSEALGINGTDMKQSLKDRFFGRLKKVFNSLLSGGNKVRAFNGWVMPVLMYSFGILKWTQTELDALDRKVRTLLTANRMHHPRSSVMRLYIPRKCGGRGFLNAKTLHNREICSLREYFLEADVGMHRDVVTVDKGLTPLSLAKENWRKPVVLDTNDRMEVWQSKELHGRFFRALHGPDVDQLASVAWLRFGDLFGETEGFVCAIMDEVMMTNNYRRFIVKDGTVDICRACHRPGESIRHIISGCSRLANEEYLHRHNLVARIIHQQLALKYSLVESEVPYYRYVPDPVLENGHITLYWDRSIITDRTIVANKPDIVMVDRLERRAMIVDITVPHDGNLVKAEKDKQIKYLDLAREVVDMWDVDSAIIVPIVVTANGLIAKSLDQHLRRLSLGSWIKGLIQKAVLLDTARIVRRFLSLEP

SEQ ID NO: 11148 - protein, 962 aa, Griposia aprilina
MHNKNRALVVALDAQLSNYFDDCVDLTDTHSILYCAAVAACRVAHVKFANDSRATRPKPAVPAWQCRIERRIGGARALIGKLICFREGNTRPRVMRFVRRAFAGTDISPQDYMSCVTERIDFLKQKVYAWANRIRRYKRRVERYTQNRTFQRDERWVYRGWERPDQGVADTCLPDDDAMCSFWRNIWSVPVSHTEGDWTREVERACDPIPEMGAITICPQDVTRAVRPLPNWKSPGPDGLHNFWIKWFSRSHARLAAQYQVALESGSLPQFLTTGVTHLLHKSGSTAEPKNYRPIACLPTVYKVLTSILRDKINKHIDTNYIMSPSQNGCRNGSRGTKELLLIDMAISQQVRRSRKDLSTCWIDYKKAYDSVPHTWLMRVLELYKVEATLRTFLMSCMGQWRTVLRYPACRNTQRNSEPIRIERGIFQGDSLSPLWFCLALNPLSTLLEDSGLGYRLRRGGQVISHLLYMDDLKLFAPNNSQLMDLLKVTETFSSAIRMEFGVDKCAVMHVKRGEIVESVGTQLSDSINLRALSASETYKYLGMSEALGINGTDMKQSLKDRFFGRMKKVFNSLLSGGNKVRAFNGWVMPVLMYSFGIHKWTQTELDALDRKVRTLLTANRMHHPRSSVMRLYIPRKCGGRGFLNAKTLHNREICSLREYFLEADVGMHRDVVTVDKGVTPLSLAKENWRKPVVLDTNDRMEVWQSKELHGRFFRALHGPDVDQLASVAWLRFGDLFGETEGFVCAIMDEVMMTNNYRRFIVKDGTVDICRACHRPGESIRHIISGCSRLANEEYLHRHNLVARIIHQQLALKYSLVESEVPYYRYVPDPVLENGHITLYWDRSIITDRTIVANKPDIVMVDRLERRAMIVDITVPHDGNLVKAEKDKQIKYLDLAREVVDMWDVDSAIIVPIVVTANGLIAKSLDQHLRRLSLGSWIKGLIQKAVLLDTARIVRRFLSLEP

SEQ ID NO: 11149 - protein, 1046 aa, Omphaloscelis lunosa
MRWTRSINENVMRSYYGATEGGNNLTAYRVRMLSLFQVLEPAVNVSAQQLSDQVRVNQRNHMLDDTVLDRLRSEMQSSHVIAPPLRSVIVPLPIITSQADERIDDRATNVSTQCNEEFKSALGGAIQEYRFMSPELRPRLPRLPMHNKNKALVAVLDSQLSNYFDDCEDLTDTNSILYCATVAICRVDHVKFANDSRATRPKPAAPAWQCRIERRIGGARTLIGKLICFREGNTRPRVMRFVRRSFLGTDISLQDYMTHVTERIDFLKQKVYAWANRIRRYKRRVERYSQNRTFQSDERWVYRAWERPDQGVADTHLPDDDAMCSFRSSIWSVSVSHTKDDWTREVERACDPISEMEAITICPQDVARAVRPLPNWKSPGPDGLHNFWIKWFVRSHARLAAQYQTVLVSGSLPQFLTTGVTQLLHKSGSTAEPKNYRPITCLPTVYKVLTSILRAKINKHIDTNIIMSASQNGCRDGSRDTKELLLIDMAINQQVRRSRKDLSTCWIDYKKAYDSVPHTWLMRVLELYKVDKTLRTFLMSCMGQWRTVIYYPGCRNIQRNSEPIRIERGLFQGDSLSPLWFCLALNPLSTLLEDSGLAYRLRRGGQVISHLLYMDDLKLFAPNNLQLMELLKVTETFSSAIRMEFGVDKCAVMHVKRGEIMESVGTQLSDSINLRALSASETYKYLGMSEALGINVTDMKQSLKERFFGRLKKVLNSLLSGGNKVRAFNGWVMPVLMYSFGILKWTQTELDALDRRVRTLLTAYRMHHPRSSVMRLYIPRKCGGRGFLNAKTLHNREILSLREYFLEANMGVHRDVVVVDKSLTPVSLAKKNWRKPVVLDTKDRLEIWQSKELHGRYFRALHGPDVNLPASVTWLRFGDLFGEIEGFVCAIMDEVMMTNNYRRFIVKDGTVDICRACYRPGESIRHIISGCSRLANEEYLHRHNLVARIIHQQLALKYSLVESEVPYYRYVPDPVLENGNITLYWDRSIITHRTIVANKPDIVVVDRGERRTMIIDITVPHDENLVKAEKDKQIKYLDLAREVVDM

SEQ ID NO: 11150 - protein, 1205 aa, Omphaloscelis lunosa
MLTRSRARKLIDTHPTSSGSSLSSASQLPDPAPDVSPVIPVAAVASSSSDEYFSPPTTPPPTRQRGRGRPPASLGLRGPPASDRVPAPGGSVQRMRWTQTVNENVMRAYFGATEGGSNLTAYRGRMLSLFQVLEPAVNVSAQRLSDQVRVIQRNHMLDDVVLDRLRLESRNNHVTPASPLVTVQLQNLPSSSPRSDRVGEEDDDGVISVSSQCNARLRSALEDAFREYRSIPPGLRPQLPRLPMHKKNKALMCTLDSLLSNCFDGSKDLADTHSILYCAAVAACRVAHVKFPNSDRAPRPKPAVPAWQCRIERRIGEARVLIGKLICFREGNTRPRVMRFVKRAFSGTDISFQDYLTRVTERIDFLKQKIYAWANRIRRYRRRVERYTQNRTFQSDERWVYRAWERPDQGVADTHLPDDDAMCSFWRSIWSVPVSHTEGDWTREVERACDPIPEMGAITICPQDVARAVRPLPNWKSPGPDGLHNFWIKWFQRSHARLASQFQSALESGSLPQFLTTGITHLLHKSGSTAEPKNYRPITCLPTVYKAFTSILRTKINKHIDTNSIMSASQNGCRNGSRGTKELLLIDMAINQQVRRSRRDLSTCWIDYKKAYDSVPHTWLMRVLELYKVNATLRTFLMSCMGQWRTVLRYPGCRQILRNSEPIRIERGIFQGDSLSPLWFCLALNPLSTLLEDSGLGYRLRRGGQVISHLLYMDDLKLFAPNNLQLLELLKVTETFSSAIRMEFGVDKCAVMHVKRGEIVESVGTQLSDSIQLRSLSSIETYKYLGMSEALGVNAADMKQSLKERFFNRLNKVLNSLLSGGNKVRAFNGWVMPVLMYSFGILKWTQTELDALDRRVRTLLTANRMHHPRSSVMRLYIPRKCGGRGFLNAKTLHNREVCSLREYFLEADVGMHRDVVTVDKGLTPLSLANENWRKPIVLDTNDRREVWQSKELHGRFYRALHGPDVDLLASVSWLRFGDLFGETEGFVFAIMDEVMMTNNYRKYIVKDGTVDICRACHRPGESIRHIISGCSRLANGDYLHRHNLVARIIHQQLALKYSLVESEVPYYRYVPDPVLENGNITLYWDRSIITDRTIVANKPDIVVIDRLERRTMIIDIAVPHDENLVKAEKDKQIKYLDLAREVVDMWDVDTAIIVPIVVTANGIIAKSLDQHLKRLSLGSWIKGLIQKAVLLDTARIVRRFLSQEP

SEQ ID NO: 11151 - protein, 1197 aa, Sesamia nonagrioides
MLTRSAARRARPPSPDSLLSSASPPPASSTTGSAVTTPAAAVALSSSDEYFSPPTTPPPARRRGGRRPPDRLGPRGPSASDRVPAPDGSVQRMRWTQSINENVMRSYYGATEGGNNLTAYRVRMLSLFQVLEPAVNVSAQRLSDQVRVIQRNHMLDDTVLDRLRNEMQSSRIIAHQSQTAEIPPQPTNYADEGSNDRATNVSTQCNEELINALEAAIREYRFTPAEQRPRLPRLPMHNRNRALMAALDAQLSDYFDTCEDLTDTHSILYCAAVAACRVAHVKFPSDSRATRPKPVVPAWQRRIEHRIGGARALIGKLICFREGNTRPRVMRFVRRAFAGTNISPQNYMARVTERIDFLKQKVYAWANRIRRYKRRVERYTQNRTFQSNERWVYRDWERPEQGVTDTCLPDDDAMCSFWRSIWSVPVSHTEGDWARDVERACDPIPEMGAITICPQDVACAVRPLPNWKSPGPDGLHNFWIKWFPRSHARLASQFQTALVSGSLPQFLTTGITHLLHKSGSTAEPKNYRPITCLPTVYKVLTSILKTKINKHIDSNSIMSASQNGCKSGSRGTKELLLIDMAISQQVRRSRKDLSTCWIDYRKAYDSVPHTWLMRVLELYKVDATLRTFLMSCMKTWRTVLRYPGCRNIQRNSEPIRIERGIFQGDSLSPLWFCLALNPLSTLLEDSGLGYRLRRGGQVISHLLYMDDLKLFAPNNSQLRELLKITETFSSSIRMEFGVDKCAVMHVKRGEIMESVGTQLTDSINLRALSASETYKYLGMSEALGINVTDMKQSLKERFFGRLKKVLNSLLSGGNKVRAFNGWVMPVLMYSFGILKWTQTELDALDQRVRTLLTANRLHHPRSSVMRLYIPRKCGGRGFLNAKTLHNREVCSLRDYFLVTDVGMHRDVVAADKGLTPLSLAKENWRKPVVLDTNDRMEVWKSKELHGRFFRALHGPDVDFQASVAWLRFGDLFGETEGFVFAIMDEVMMTNNYRRFIVKDGTVDICRACHRPGESIRHIISGCSRLANGEYLHRHNLVARIIHQQLALKYNLVESEVPYYRYTPDPVLENGYITLYWDRSIITDRTIVANKPDIVMVDRSERRAMIVDITIPHDENLVKAEKDKQIKYLDLAHEVVDMWEVDSAIIVPIVVTANGLIAKSLDQHLRRLSLGSWIKGLIQKAVLLDTARIVRKFLSLEP

SEQ ID NO: 11152 - protein, 868 aa, Sesamia nonagrioides
MRFVRRAFSGTDTSTRDYLFRVTERIDFFKQKIYAWANRIRRYRRRVERYSQNRNFQSDERRVYRAWERSDQGVTDTCLPDDDATCSFWRNIWSVPVSHTEGSWTRVVERACDPVPEMGAITICPQDVARAVRPLPNWKSPGPDGLHNFWIKWFSGSHARLASQFQTALESGSLPQFLTTGVTHLLHKSGSTAEPKNYRPITCLPTVYKVLTSILKSKINTHIDSNFIMSVSQNGCRSGSRGTKELLLIDMAISQQVRRSRKDLSTCWIDYKKAYDSVPHTWLMRVLELYKVDATLLTFLMTCMRTWRTVLRYPGCRNIQRNSEPIRIERGIFQGDSLSPLWFCLALNPLSTLLEDSGLGYRLRRGGQVISHLLYMDDLKLFARTDSQLKELLKITETFSSSIRMEFGVDKCAVMHVKRGEIMESVGTQLTSSINLRAVSASETYKYLGMSEALGINVTDMKQSLKERFFGRLKKVLNSLLSGGNKVRAFNGWVMPVLMYSFGILKWTQTELDALDRRVRTLLTANRLHHPRSSVMRLYIPRKCGGRGFLNAKTLHNREICSLREYFLTTDVGMHRDVVAVDKGLTPLSLAKENWRKPVVLDTNDRMEVWKSKELHGRFFKALHGPDVDLQASVAWLRFGDLFGETEGFVCAIMDEVMMTNNYRRFIVKDGTVDICRACHRSGESIRHIISGCSRLANGEYLHRHNLVARIIHQQLALKYNLVESEVPYYRYTPDPVLENDHITLYWDRSIITDRTIIANKPDIVLVDRSERRAMIVDITIPHDENLVKAEKDKQIKYLDLAHEVVDMWEVDSAIIVPIVVTANGLIAKSLDQHLRRLSLGSWIKGLIQKAVLLDTARIVRKFLSLEP

SEQ ID NO: 11153 - protein, 1201 aa, Sesamia nonagrioides
MLTRSAARKRARPPSPNSLLSSASPPPVSSPTVSAVTTPAAAVASSSSDEYFSPPTTPPPVRRRGGRRPPDRLGPRGPSASDRVPAPGGSVQRMRWTQSINENVMRSYYGATEGGNNLTAYRVRMLSLFQVLEPAVNVSAQRLSDQVRVIQRNHMLDDVVLDRLRLESRNSHVTPASSLVAVQLNSVSPRPNRVDEEDDDRAISVSPQCIEKLRSALEDAFCEYRSTPPELRPRLPRLPMHKKNKALVCALDSQLSYYLKDSKDLTDTHSILYCGAVAICRVAHVKFPDSDRATRPKSAVPAWQCRIERRIGETRALIGKLTSFREGNTRPRVMRFVRRAFSGTDTSTRDYLFRVTERIDFFKQKIYAWANRIRRYKRRVERYSQNRNFQSDERRVYRAWERSDQGVTDTCLPDDDAMYSFWRNIWSVPVSHTEGSWTRVVERACDPVPEMGAITICPQDVARAVRPLPNWKSPGPDGLHNFWIKWFSGSHARLASQFQTALESGSLPQFLTTGVTHLLHKSGSTAEPKNYRPITCLPTVYKVLTSILKSKINTHIDSNSIMSASQNGCRSGSRGTKELLLIDMAISQQVRRSRKDLSTCWIDYKKAYDSVPHTWLMRVLELYKVDATLRTFLMTCMRTWRTVLRYPGCRNIQRNSEPIRIERGIFQGDSLSPLWFCLALNPLSTLLEDSGLGYRLRRGGQVISHLLYMDDLKLFAHTDSQLKELLKITETFSSSIRMEFGVDKCAVMHVKRGEIMESVGTQLTSSINLRALSASETYKYLGMSEALGINVTDMKQSLKERFFGRLKKVLNSLLSGGNKVRAFNGWVMPVLMYSFGILKWTQTELDALDQRVRTLLTANRLHHPRSSVMRLYIPRKCGGRGFLNAKTLHNREVCSLREYFLETDVGMHRDVVAADKGLTPLSLAKENWRKPVVLDTNDRLEVWKSKELHGRFFRALHGPDVDFQASVAWLRFGDLFGETEGFVFAIMDEVMMTNNYRRFIVKDGTVDICRACHRPGESIRHIISGCSRLANGEYLHRHNLVARIIHQQLALKYNLVESEVPYYRYMPDPVLENGHITLYWDRSIITDRTIVANKPDIVLVDRSERRAMIVDITIPHDENLVKAEKDKQIKYLDLAHEVVDMWEVDSAIIVPIVVTANGLIAKSLDQHLRRLSLGSWIKGLIQKAVLLDTARIVRKFLSLEP

SEQ ID NO: 11154 - protein, 1197 aa, Sesamia nonagrioides
MLTRSAARRARPPSPDSLLSSASPPPASSTTVSAVTTPAAAVALSSSDEYFSPPTTPPPARRRGGRRPPDRLGPRGPSASDRVPAPGGSVQRMRWTQSINENVMRSYYGATEGGNYLTAYRVRMLSLFQVLEPAVNVSAQRLSDQVRVIQRNHMLDDTVLDRLRNEMQSSRIIAHQSQTAEIPPQPTNYADEGSNDRATNVSTQCNEELINALEAAIREYRFTPAEQRPRLPRLPMHNRNRALMAALDAQLSDYFDTCEDLTDTHSILYCAAVAACRVAHVKFPSDSRATRPKPVVPAWQRRIERRIGGARALIGKLICFREGNTRPRVMRFVKRAFAGTNISSQNYMARVTERIDFLKQKVYAWANRIRRYKRRVERYTQNRTFQSNERWVYRDWERPEQGVTDTCLPDDDAMCSFWRSIWSVPVSHTEGDWARDVERACDPIPEMGAITICPKDVACAVRPLPNWKSPGPDGLHNFWIKWFPRSHARLASQFQTALVSGSLPQFLTTGITHLLHKSGSTAEPKNYRPITCLPTVYKVLTSILKTKINKHIDSNSIMSASQNGCKSGSRGTKELLLIDMAISQQVRRSRKDLSTCWIDYRKAYDSVPHTWLMRVLELYKVDATLRTFLMSCMKTWRTVLRYPGCRNIQRNSEPIRIERGIFQGDSLSPLWFCLALNPLSTLLEDSGLGYRLRRGGQVISHLLYMDDLKLFAPNNSQLRELLKITETFSSSIRMEFGVDKCAVMHVKRGEIMESVGTQLTDSINLRALSASETYKYLGMSEALGINVTDMKQSLKERFFGRLKKVLNSLLSGGNKVRAFNGWVMPVLMYSFGILKWTQTELDALDQRVRTLLTANRLHHPRSSVMRLYIPRKCGGRGFLNAKTLHNREVCSLRDYFLVTDVGMHRDVVAADKGLTPLSLAKENWRKPVVLDTNDRMEVWKSKELHGRFFRALHGPDVDFQASVAWLRFGDLFGETEGFVFAIMDEVMMTNNYRRFIVKDGTVDICRACHRPGESIRHIISGCSRLANGEYLHRHNLVARIIHQQLALKYNLVESEVPYYRYTPDPVLENGYITLYWDRSIITDRTIVANKPDIVMVDRSERRAMIVDITIPHDENLVKAEKDKQIKYLDLAHEVVDMWEVDSAIIVPIVVTANGLIAKSLDQHLRRLSLGSWIKGLIQKAVLLDTARIVRKFLSLEP

SEQ ID NO: 11155 - protein, 1200 aa, Sesamia nonagrioides
MLTRSAARRARPPSPDSSLSSASPPPVSSPTVNAVMTPAAVVASSSSDEYFSPPTTPPPARRRGGRRPPDRLGPRGPSASDRVPAPGGSVQRMRWTQSINENVMRSYYGATEGGNNLTAYRVRMLSLFQVLEPAVNVSAQRLSDQVRVIQRNHMLGDVVLDRLRLESRNSHVTPASSLVAVQLNSVSPRPNHIDEEDDDRAISVSPQCNEKLRSALEDAFREYRSIPPELRPRLPRLPMHKKNKALVCALDSQLSNYLKDSKDLNDTHSILYCGAVAICRVAHVKFPDNDRATRPKSAVPAWQCRIERRIGETRALIGKLVSFREGNTRPRVMRFVRRAFSGTDTSTRDYLFRVTERIDFFKQKIYAWANRIRRYRRRVERYSQNRNFQSDERRVYRAWERSDQGVTDTCLPDDDATCSFWRNIWSVPVSHTEGSWTRVVERACDPVPEMGAITICPQDVARAVRPLPNWKSPGPDGLHNFWIKWFSGSHARLASQFQTALESGSLPQFLTTGVTHLLHKSGSTAEPRNYRPITCLPTVYKVLTSILKSKINTHIDSNSIMSASQNGCRSGSRGTKELLLIDMAISQQVRRSRKDLSTCWIDYKKAYDSVPHTWLMRVLELYKVDATLRTFLMTCMRTWRTVLRYPGCRNIQRNSEPIRIERGIFQGDSLSPLWFCLALNPLSTLLEDSGLGYRLRRGGQVISHLLYMDDLKLFAHTDSQLKELLKITETFSSSIRMEFGVDKCAVMHVKRGEIMESVGTQLTSSINLRALSASETYKYLGMSEALGINVTDMKQSLKERFFGRLKKVLNSLLSGGNKVRAFNGWVMPVLMYSFGILKWTQTELDALDRRVRTLLTANRLHHPRSSVMRLYIPRKCGGRGFLNAKTLHNREICSLREYFLTTDVGMHRDVVAVDKGLTSLSLAKENWRKPVVLDTNDRMEVWKSKELHGRFFKALHGPDVDLQASVAWLRFGDLFGETEGFVCAITDEVMMTNNYRRFIVKDGTVDICRACHRPGESIRHIISGCSRLANGEYLHRHNLVARIIHQQLALKYNLVESEVPYYRYSPDPVLENDHITLYWDRSIITDRTIIANKPDIVLVDRSERRAMIVDITIPHDENLVKAEKDKQIKYLDLAHEVVDMWEVDSAIIVPIVVTANGLIAKSLDQHLRRLSLGSWIKGLIQKAVLLDTARIVRKFLSLEP

SEQ ID NO: 11156 - protein, 1199 aa, Sesamia nonagrioides
MLRRSAARRARPPSPDSLLGSASSPPVSSATASAVTTPAAAVASSSSDEYFSPPTTPPPARRRGGRRPPDRLGPRGPSASDRVPAPGGSVQRMRWTQSINENVMRSYYGATEGGNNLTAYCVRMLSLFQVLEPAVNVSAQRLSDQVRVIQRNHMLDDVVLDRLRLESRNSHVTPASSLVAVQINSVSPRPNHVDEEDDDRAISVSPQCIEKLRSALEDAFCEYRSTLPELRPRLPRLPMHKKNKALVCALDSQLSNYLKDSKDLNDTHSILYCGAVAICRVAHVKFPDSDRATRPKSAVPAWQCRIERRIGETRALIGKLISFREGNTRPRVMRFVRRAFSGTDTSTRDYLFRVTERIDFFKQKIYAWANRIRRYRRRVERYSQNRNFQSDERRVYRAWEQSDQGVTDTCLPDDDATGSFWRNIWSVPVSHTEGSWTRVVERACDPVPEMGAITICPQDVARAVRPLPNWKSPGPDGLHNFWIKWFSGSHARLASQFQTALESGSLPQFLTTVTHLLHKSGSTAEPKNYRPITCLPTVYKVLTSILKSKINTHIDSNSIMSASQNGCRSGSRGTKELLLIDMAISQQVRRSRKDLSTCWIDYKKAYDSVPHTWLMRVLELYKVDATLRTFLMTCMRTWRTVLRYPGCRNIQRNSEPIRIERGIFQGDSLSPLWFCLALNPLSTLLEDSGLGYRLRRGGQVISHLLYMDDLKLFAHTDSQLKELLKITETFSSSIRMEFGVDKCAVMHVKRGEIMESVGTQLTSSINLRALSASETYKYLGMSEALGIDVTDMKQSLKERFFGRLKKVLNSLLSGGNKVRAFNGWVMPVLMYSFGILKWTQTELDALDRRVRTLLTANRLHHPRSSVMRLYIPRKCGGRGFLNAKTLHNREICSLREYFLTTDVGMHRDVVAVDKGLTPLSLAKENWRKPVVLDTNDRMEVWKSKELHGRFFKALHGPDVDLQASVAWLRFGDLFGETEGFVCAITDEVMMTNNYRRFIVKDGTVDICRACHRPGESIRHIISGCSRLANGEYLHRHNLVARIIHQQLALKYNLVESEVPYYRYTPDPVLENDHITLYWDRSIITDRTIIANKPDIVLVDRSERRAMIVDITIPHDENLVKAEKDKQIKYLDLAHEVVDMWEVDSAIIVPIVVTANGLIAKSLDQHLRRLSLGSWIKGLIQKAVLLDTARIVRKFLSLEP

SEQ ID NO: 11157 - protein, 1200 aa, Sesamia nonagrioides
MLTRSAARRARSPPPDSSPSSASPPPVSSPTVNAVMTPAAAVALSSSDEYFSPPTTPPPVRRRGGRRPPDCLGPRGPPASDRAPATGGNVQRMKWTQTINENVMRAYFGATEGGSNLTAYRGRMLSLFQVLEPAVNVSAQRLSDQVRVIQRNHMLDDVVLDRLRLESRNSHVAPASSLVAVQFNSVPSRPNLVDEEDDDEAISVTPQCNEKVRSALEDAFREYRYTPPELRPRLPRLPMHKKNKALVCALDSQLSNYLKDSKDLADTHSILYCGAVAICRVAHVKFPDSDRATRPKPAVPAWQCRIERRIGETRALIGKLISFREGNTRPRVMRFVRRAFSGTDVSTRDYLLRVTERIDFLKQKIYAWANRIRRYRRRVERYSQNRNFQSDERWVYRAWERSDQGVTDTCLPDDDATCSFWRNIWSVPVSHTEGSWTRVVERACDPVPEMGAITICPQDVARAVRPLPNWKSPGPDGLHNFWIKWFSGSHACLASQFQTALESGSLPQFLTTGITNLLHKSGSTAEPKNYRPITCLPTVYKVLTSILKAKINTHIDSNSIMSVSQNGCRNGSRGTKELLLIDMAISQQVRRSRKDLSTCWIDYKKAYDSVPHTWLMRVLELYKVDATLRTFLMTCMSQWRTVLRYPGCRNIQRNSEPIRIQRGIFQGDSLSPLWFCLALNPLSTLLEDSGLGYRLRRGGQVISHLLYMDDLKLFAHTNSQLKELLKITETFSSAISMEFGVDKCAVMHVQRGEIVESVGTQLTGSINLRSLSASETYKYLGMSEALGINITDMKQSLKERFFGRLKKVLNSLLSGGNKVRAFNGWVMPVLMYSFGILKWTQTELDALDQRVRTLLTANRLHHPRSSVMRLYIPRKCGGRGFLNAKTLHNREVCSLREYFLKTDVGMHRDVVAVDKGLTPLSLAKENWRKPVVLETNDRMEVWQSKELHGRFFRALRGPDVDFQASVAWLRYGDLFGETEGFVCAIMDEVMMTNNYRKFIVKDCTVDICRACHRPGESIRHIISGCSRLANGEYLHRHNIVARIIHQQLALKYNLVESEVPYYRYMPDPVLENGHITLYWDRSIITDRTIVANKPDIVMVDRSERRAMIVDITIPHDENLVKAEKDKQIKYLDLAHEVIDMWEVDSAIIVPIVVTANGLIAKSLDQHLRRLSLGGWIKGLIQKAVLLDTARIVRKFLSLEP

SEQ ID NO: 11158 - protein, 1074 aa, Sesamia nonagrioides
MLSLFQVLEPAVNVSAQRLSDQVRVIQRNRMLDDTVLDRLRNEMQSSRVITHQSQSAEIPPQPTNYADEGSNDRATNVSTQCNEELRSALEAAIREYRFMSAELRPRLPRLPMYNRNRALMAALDAQLSNYFDTCENLTDTHSILYCAAVAACRVAHVKFSSDSRATRPKPVVPAWQHRIERRIGGARALIGKLICFREGNTRPRVMRFVRRAFSGTNTSPQNYIARITERIDFLKQKVYAWANRIRRYKRRVERYTQNRTFQSNQRWVYRDWERPEQGVTDTCLPDDDAMCSFWRSIWSVPVSHTEGDWARDVERACDPIPEMGAITICPQDVARAVRPLPNWKSPGPDGLHNFWIKWFPRSHASLASQFQTALVSGSLPQFLTTGITHLLHKSGSTAEPKNYRPITCLPMVYKVLTSILKAKINNHIDSNSIMSVSQNGCRSGSRGTKELLLIDMAISQQVRRSRKDLLTCWIDYKKAYDSVPHTWLMRVLELYKVDTTLRTSLMTCMGQWRTVLRYPGYRNIQRNSEPIRIERGIFQGDNLSPLWFCLALNPLSTLLEDSGLGYRLRRGGQVISHLLYMDDLKLFAPNNLQLKELLKITETFSSAIRMEFGVDKCAVMHIKRGEIVESVGSQLTSSINLRALSASETYKYLGMSEALGINVTDMKQSLKERFFGRLKKVLNSLLSGGNKVRAFNGWVMPVLMYSFGILKWTQTELDALDRRVRTLLTANRLHHPQSSVMRLYIPRKCGGRGFLNAKTLHNREICSLREYFLETDVGMHRDVVAVDKGLTPLSLAKENWRKPVVLDTNDRMEVWKSKELHGRFFRALHGPDVDLQASVAWLRFGDLFWETEGFVCAIMDEVMMTNNYRRFIVKDGTVDICRACHRPGESIRHIISGCSRLANGEYLHRHNLVARIIHQQLALKYNLVESEVPYYRYTPDPVLENGYITLYWDRSIITDRTIVANKPDMVMVDRSERRAMIVDITIPHDENLVKAEKDKQIKYLDLAHEVVDMWEVDSAIIVPIVVTANGLIAKSLDQHLRRLSLGSWIKSLIQKAVLLDTARIVRKFFSLEP

SEQ ID NO: 11159 - protein, 1200 aa, Sesamia nonagrioides
MLTRSAARRARSPPPDSSPSSASPPPVSSPTVNAVMTPAAAVALSSSDEYFSPPTTPPPVRRRGGRRPPDCLGPRGPPASDRAPATGGNVQRMKWTQTINENVMRAYFGATEGGSNLTAYRGRMLSLFQVLEPAVNVSAQRLSDQVRVIQRNHMLDDVVLDRLRLESRNSHVTPASSLVAVQFNSVPSRPNLVDEEDDDEAISVTPQCNEKVRSALEDAFREYRSTPPELRPRLPRLPMHKKNKALVCALDSQLSNYLKDSKDLADTHSILYCGAVAICRVAHVKFPDSDRATRPKPAVPAWQCRIERRIGETRALIGKLISFREGNTRPRVMRFVRRAFSGTDVSTRDYLLRVTERIDFLKQKIYAWANRIRRYRRRVERYSQNRNFQSDERWVYRAWERSDQGVTDTCLPDDDATRSFWRNIWSVPVSHTEGGWTRDVERACDPVPEMGAITICPQDVARAVRPLPNWKSPGPDGLHNFWIKWFSGSHACLASQFQTALESGSLPQFLTTGITHLLHKSGSTAEPKNYRPITCLPTVYKVLTSILKAKINTHIDSNSIMSASQNGCRNGSRGTKELLLIDMAISQQVRRSRKDLSTCWIDYKKAYDSVPHTWLMRVLELYKVDATLRTFLMTCMSQWRTVLRYPGCRNIQRNSEPIRIERGIFQGDSLSPLWFCLALNPLSTLLEDSGLGYRLRRGGQVISHLLYMDDLKLFAHTNSQLKELLKITETFSSAIRMEFGVDKCAVMHVQRGEIVESVGTQLTGSINLRSLSASETYKYLGMSEALGINVTDMKQSLKERFFGRLKKVLNSLLSGGNKVRAFNGWVMPVLMYSFGILKWTQTELDALDQRVRTLLTANRLHHPRSSVMRLYIPRKCGGRGFLNAKTLHNREVCSLREYFLKTDVGMHRDVVAVDKGLTPLSLAKENWRKPVVLETNDRMEVWQSKELHGRFFRALRGPDVDFQASVAWLRYGDLFGETEGFVCAIMDEVMMTNNYRKFIVKDGTVDICRACHRPGESIRHIISGCSRLANGEYLHRHNLVARIIHQQLALKYNLVESEVPYYRYMPDPVLENGHITLYWDRSIITDRTIVANKPDIVMVDRSERRAMIVDITIPHDENLVKAEKDKQIKYLDLAHEVVDMWEVDSAIIVPIVVTANGLIAKSLDQHLRRLSLGGWIKGLIQKAVLLDTARIVRKFLSLEP

SEQ ID NO: 11160 - protein, 1197 aa, Sesamia nonagrioides
MLTRSAALRARPPPPDSLLSSASPPPVSSASVSAVTTPAAAVALSSSDEYFSPPTTPPPARRRGGRRPPDRLGPRGPSASDRVPAPGGSVQRMRWTQSINENVMRSYYGATEGGNNLTAYRVRMLSLFQVLEPAVNVSAQRLSDQVRVIQRNHMLDDTVLDRLRNEMQSSRVIAHQSQTAEIPPQSTNYADEGSNDRATNVSTQCNEELINALEAAIREYRYTSAELRPCLPRLPMHNRNRALMAALDAQLSNYFDTCEDLTDTHSILYCAAVAACRVAHVKFLSDSRATRPKPVVPAWQHRIERRIGGARALIGKLICFREGNTRPRVMRFVRRAFAGTNISLQNYMARVTERIDFLKQKVYAWANRIRRYKRRVERYTQNRTFRSNERWVYRDWERPEQGVTDTCLPDDDAMCSFWRSIWSVPVSHTEGDWARDVERACDPIPEMGAITICPQDVACAVRPLPNWKSPGPDGLHNFWIKWFPRSHARLASQFQTALVSGSLPQFLTTGITHLLHKSGSTAEPKNYRPITCLPTVYKVLTSILKTKINKHIDSNSIMSASQNGCKSGSRGTKELLLIDMAISQQVRRSRKDLSTCWIDYKKAYDSVPHTWLMRVLELYKVDATLRTFLMSCMRTWRTVLRYPGCRNIQRNSEPIRIERGIFQGDSLSPLWFCLALNPLSTLLEDSGLGYRLRRGGQVISHLLYMDDLKLFAPNNSQLRELLKITETFSSSIRMEFGVDKCAVMHVKRGEIMESVGTQPTDSINLRALSASETYKYLGMSEALGINVTDMKQSLKERFFGRLKKVLNSLLSGGNKVRAFNGWVMPVLMYSFGILKWTQTELDALDQRVRTLLTANRLHHPRSSVMRLYIPRKCGGRGFLNAKTLHNREVCSLREYFLETDVGMHRDVVAADKGLTPLSLAKENWRKPVVLDTNDRLEVWKSKELHGRFFRALHGPDVDFQASVAWLRFGDLFGETEGFVFAIMDEVMMTNNYRRFIVKDGTVDICRACHRPGESIRHIISGCSRLANGEYLHRHNLVARIIHQQLALKYNLVESEVPYYRYMPDPVLENGHITLYWDRSIITDRTIVANKPDIVLVDRSERRAMIVDITIPHDENLVKAEKDKQIKYLDLAHEVVDMWEVDSAIIVPIVVTANGLIAKSLDQHLRRLSLGSWIKGLIQKAVLLDTARIVRKFLSLEP

SEQ ID NO: 11161 - protein, 1196 aa, Sesamia nonagrioides
MLTRSAARRARPPSPDSLLSSASPPPVSSPTVSAVTTPAATVASSSSDEYFSPPTTPPPVRRRGGRRPPDCLGPRGPSASDRVPAPGGSVQRMRWTQSINENVMRSYYGATEGGTNLTAYRVRMLSLFQVLEPAVNVSAQRLSDQVRVIQRNHMLDDIVLDRLRNEMQSSRVIAHQSQSAEIPPQSINYADEGSNDRATNVSTQCNEELRNALEAAIREYRSISAELRPRLPRLPMHNRNRALMAALDAQLSNYFDTCEDLTDTHSILYCAAVAACRVAHVKFPSDSRATRPKPVVPAWQHRIERRIGGARALIGKLICFREGNTCPRVMRFVRRAFSGTNTSPQNYMASVTERIDLLKQKVYAWANRIRRYKRRVERYTQNRTFQSNERRVYRDWERQQGVTDTCLPDDDAMCSFWRSIWSVPVSHTEGDWARDVERACDPIPEMGAITICPQDVAHAVRPLPNWKSPGPDGLHNFWIKWFPRSHARLASQFQTALVSGSLPQFLTTGITHLLHKSGSTAEPKNYRPITCLPTVYKVLTSILKTKINKHIDSNSILSASQNGCRSGSRGTKELLLIDMAISQQVRRSRKDLSTCWIDYKKAYDSVPHTWLMRVLELYKVDATLRTFLMTCMRTWRTVLRYPGCRNIQKNSEPIRIERGIFQGDSLSPLWFCLALNPLSTLLEDSGLGYRLRRGGQVISHLLYMDDLKLFAPNNSQLNELLKITEIFSSFIRMEFGVDKCAVMHLKRGEIMEPVGTQLTSSINLRALSASETYKYLGMSEALGINVTDMKQSLKERFFGRLKKVLNSLLSGGNKVRAFNGWVMPVLMYSFGILKWTQTELDALDQRVRTLLTANRLHHPRSSVMRLYIPRKCGGRGFLNAKTLHNREICSLRDYFLETDVGMHRDVVAADKGLTPLSLAKENWRKPVVLDTNDRMEVWKNKELHGRFFRALHGPDVDFQASVAWLRFGDLFGETEGFVFAIMDEVMMTNNYRRFIVKDGTVDICRACHRPGESIRHIISGCSRLANGEYLHRHNLVARIIHQQLALKYKLVESEVPYYRYMPDPVLENGHITLYWDRSIITDRTIIANKPDIVLVDRSERRAMIVDITIPHDENLVKAEKDKQTKYLDLAHEVVDMWEVDSAIIVPIVVTANGLIAKSLDQHLRRLSLGSWIKGLIQKAVLLDTARIVRKFLSLKP

SEQ ID NO: 11162 - protein, 975 aa, Apamea monoglypha
MSPELRPRLPRLPMHNKNRALVAVLDAQLSSHFDACEDLTDTHSILYCAAVAACRVAHVKFDSDSRATRPKPAIPAWQCRIERRIGGARALIGKLICFREGNTRPRVMRFVRRAFLGTDISSQDYLSRVTERIDFLKQKVYAWANRIRRYKRRVERYTQNRTFQSDERWVYRGWERPDQSVADTCLPDDDAMCSFWRSIWSAPVSHTEGDWTGKIERACELIPEMGAITICPQDVARAVRPLPNWKSPGPDGLHNFWIKWFQRSHAPLAAQFQSALESGLLPQFITTGITHLLHKSGSTADPKNYRPITCLPTIYKVLTSILRAKINKHIDSNSIMSVSQNGCRNGSRGTKELLLIDMAISQQVRRSRKDLSTCWIDYKKAYDSVPHTWLMRVLELYKVDTTLRTFLMTCMGQWRTVLRYPGCRNIQRNSEPIRIERGIFQGDSLSPLWFCLALNPLSTLLDDSGLGYRLRRGGQVISHLLYMDDLKLFAPNNLQLMKLLKITETFSSAIRMEFGVDKCAVMHVKRGEIVESVGTQLSDFTNLRALSAAETYKYLGMSEALGINVTDMKQSLKERFFGRLKKVFNSLLSGGNKVRAFNSWVMPVLMYSFGILKWTQTELEALDRRVRTLLTANRMHHPRSSVMRLYIPRKCGGRGFLNAKTLHNREICSLREYFLETDVGMHRDVVAVDKGLTPLSLAKENWRKPVVLDTNDRMEVWQSKELHGRFYRALHGPDVDLLASVAWLRFGDLFGETEGFVCAIMDEVMMTNNYRRYIVKDGTVDICRACHRPGESIRHIISGCSRLANGEYLHRHNLVARIIHQQLALKYSLVESEVPYYRYVPDPVLENGNITLYWDRSIITDRTIVANKPDIVVVDRSERRAMIVDITVPHDENLVKAEKDKQIKYLDLAREVVDMWDVDSAIIVPIVVSANGLIAKSLDQHLRRLSLGSWIKGLIQKAVLLDTARIVRRFLSLEP

SEQ ID NO: 11163 - protein, 1198 aa, Apamea monoglypha
MLTRSAARRARPPPPDSSLSSASPPPVPSLTVSAVTTPAAVVASSSSDEYFSPPTTPPPVRRRGGRRPPDGLGPRGPPASDRVPAPGGSVQRMRWTQSINENVMRSYYGATEGGNNLTTYRVRMLSLFQVLEPAVNVTAQRLSDQVRVIQRNHMLDDTVLDRLRSEMQSSHVIAHQSQTAAVLPQSNTSHADEGSNDMATNVSIQCNEELRNALEGAIREYRFMSPELRPRLPRLPMHNKNRALVAVLDAQLSSHFDVCEDLTDTHSILYCAAVAACRVAHVKFASDSEATRPKPAIPAWQCRIERRIGGARALIGKLICFREGNTRPRVMRFVRRAFLGTDISSQDYLSRVTERIDFLKQKVYAWANRIRRYKRRVERYTQNRTFQSDERWVYRGWERPDQSVADTCLPDDDAMCSFWRSIWSAPVSHTEGDWTGKIERACELIPEMGAITICPQDVARAVRPLPNWKSPGPDGLHNFWIKWFQRSHAPLAAQFQSALESGLLPQFITTGITHLLHKSGSTADPKNYRPITCLPTIYKVLTSILRAKINKHIDSNSIMSVSQNGCRNGSRGTKELLLIDMAISQQVRRSRKDLSTCWIDYKKAYDSVPHTWLMRVLELYKVDTTLRTFLMTCMGQWRTVLRYPGCRNIQRNSEPIRIERGIFQGDSLSPLWFCLALNPLSTLLEDSGLGYRLRRGGQVISHLLYMDDLKLFAPNNLQLMELLKITETFSSAIRMEFGVDKCAVMHVKRGEIVESVGTQLSDSTNLRALSASETYKYLGMSEALGINVTDMKQSLKERFFGRLKKVLNSLLSGGNKVRAFNSWVMPVLMYSFGILKWTQTELDALDRRVRTLLTANRLHHPRSSVMRLYIPRKCGGRGFLNAKTLHNREICSLREYFLETDVGMHRDVVAVDKGLTPLSLAKENWRKPVVLDTNDRMEVWQSKELHGRFYRALHGPDVDLLASVAWLRFGDLFGETEGFVCAIMDEVMMTNNYRRFIVKDGTVDICRACHRPGESIRHIISGCSRLANGEYLHRHNLVARIIHQQLALKYNLVESEVPYYRYVPDPVLENGNITLYWDRSIITDRTIVANKPDIVVVDRSERRAMIVDITVPHDENLVKAEKDKQIKYLDLAHEVVDMWHVDSAIIVPIVVTANGLIAKSLDQHLRRLSLGSWIKGLIQKAVLLDTARIVRRFLSLEP

SEQ ID NO: 11164 - protein, 1198 aa, Apamea monoglypha
MLTRSAARRARPPPPDSSLSSASPPPVPSLTVSAVTTPAAVVASSSSDEYFSPPTTPPPVRRRGGRRPPDGLGPRGPPASDRVPAPGGSVQRMRWTQSINENVMRSYYGATEGGNNLTAYRVRMLSLFQVLEPAVNVTAQRLSDQVRVIQRNHMLDDTVLDRLRSEMQSSHVIAHQSQTAAVLPQSNTSHADEGSNDMATNVSIQCNEELRNALEGAIREYRFMSPELRPRLPRLPMHNKNRALVAVLDAQLSSHFDVCEDLTDTHSILYCAAVAACRVAHVKFASDSEATRPKPAIPAWQCRIERRIGGARALIGKLICFREGNTRPRVMRFVRRAFLGTDISSQDYLSRVTERIDFLKQKVYAWANRIRRYKRRVERYTQNRTFQNDERWVYRGWERPDQSVADTCLPDDDAMCSFWRSIWSAPVSHTEGDWTGKIERACELIPEMGAITICPQDVARAVRPLPNWKSPGPDGLHNFWIKWFQRSHAPLAAQFQSALESGLLPQFITTGITHLLHKSGSTADPKNYRPITCLPTIYKVLTSILRAKINKHIDSNSIMSVSQNGCRNGSRGTKELLLIDMAISQQVRRSRKDLSTCWIDYKKAYDSVPHTWLMRVLELYKVDTTLRTFLMTCMGQWRTVLRYPGCRNIQRNSEPIRIERGIFQGDSLSPLWFCLALNPLSTLLDDSGLGYRLRRGGQVISHLLYMDDLKLFAPNNLQLMELLKITETFSSAIRMEFGVDKCAVMHVKRGEIVESVGTQLSDSTNLRALSASETYKYLGMSEALGINVTDMKQSLKERFFGRLKKVLNSLLSGGNKVRAFNSWVMPVLMYSFGILKWTQTELDALDRRVRTLLTANRLHHPRSSVMRLYIPRKCGGRGFLNAKTLHNREICSLREYFLETDVGMHRDVVAVDKGLTPLSLAKENWRKPVVLDTNDRMEVWQSKELHGRFYRALHGPDVDLLASVAWLRFGDLFGETEGFVCAIMDEVMMTNNYRRFIVKDGTVDICRACHRPGESIRHIISGCSRLANGEYLHRHNLVARIIHQQLALKYNLVESEVPYYRYVPDPVLENGNITLYWDRSIITDRTIVANKPDIVVVDRSERRAMIVDITVPHDENLVKAEKDKQIKYLDLAREVVDMWHVDSAIIVPIVVTANGLIAKSLDQHLRRLSLGSWIKGLIQKAVLLDTARIVRRFLSLEP

SEQ ID NO: 11165 - protein, 1197 aa, Furcula furcula
MLTRSKVAQLRPPDSSPCSASQPPAPSTDGTPPAAVASSESDEYFSPPSSPPPVRRRRGRPPRELGRLGQPAPNRVLAPGGVVRRMKWTSSINESVMRAYYEATEGGTNLTAYRDRMLSLFQVLEPAVNVSAQRLSDQVRAIQRGHMLDDTVLDRLRSVVQGSRVAPCIPSQAVAPVVDTAPAPRLAANSDDDRDDTTTNISTQYINLLRSTLEDVVREYRSMPQSLRPRLPRLPMHKRNRALVCALDSLLSSYFDSSEDLADAHSHLYCAAMTACRVARVKLPNTDAATRPRPAVPAWQCRIERRIGDARVLIGKLTCFREGNTRPRVMRFVRRAFSGTGIGPREYVSRITERIDFLKQKVCAWANRIRRYRARVDRYSQNNMFQRDQRWVYRSWERPSQTGGEAQRPDDDAMIRFWRNIWSVPVTHSEGDWIRDVEQVCEPIPEMGAITIRPQDVADAVRPLPNWKAPGPDGLHNFWLKWLRSSHACLASLFQLAVESGSLPDFLTTGITHLLHKTNSTTDPKNYRPITCLPTVYKTLTSILRAKIYRHVEGNSIMSASQNGCKSGARGTKELLLIDMAICQQAHRNRKDLSTCWIDYKKAYDSVPHTWLMRVLELYKVNTTLRTFLASCMRQWRTVLLYPGSRQTLGDGEPIRIERGIFQGDSLSPLWFCLALNPLSTLLKSSGLGCRLRRGGQVISHLLYMDDLKLFAPTELQLMGLLKVTETFSNSIRMEFGVDKCAVMYVKRGRLVESRSVQLSDSTDLRTLSAIETYKYLGMSQALGINETDMKQSLRERFLGRLRKVLKSLLSGGNRVRAYNGWVMPVLMYSFGILKWTQTELDTLDRTVRTLLTTYRMHHPRSSVMRLYIPRKCGGRGFLNAKTLHNREICNLREYFLHCGGEMQTDVVAVDNGLTPLSIAKGNWRKPVVLTTGDREAVWQSKELHGRFYRALHGPDVDFSASVAWLRFGDLFGETEGFVCAIMDEVVMTNNYRKYILRDGTIDICRACHRPGESLRHIISGCSRLANGEYLHRHNQVARIIHQQLALKYRLVTSEVPYYRYVPEPVLEDGHITLYWDRSIITDRTIVANKPDIVLIDRTERRAMIVDVTVPHDENLVKAEKDKECKYLDLAHEVVDMWDIDRAIIVPIVVSVHGLMAKSLDKHLKRLTLDGWIKGQMQKAVLLETARIVRKFLSLEP

SEQ ID NO: 11166 - protein, 1202 aa, Spodoptera exigua
MLTRAAARRARPPPPASSLSSASPPPGSSLTVSEETPAVAAASSSSDEYYSPPTTPPPTRRRGGRRPPAGLGPRGPSASDRVPAAGGSVQRMRWTQAINENVMRAYYGATEGGNNLTAYRVRMLSLFQVLEPAINVSAQRLSDQVRVIQRNRMLDNTVLDRLRTEMGSCAGASSSRTVAPAMMPPSNRGIVSTAADEESTDTVTHVSTQCNDELRSALECAIREYRYMSPEIRPRLPRLPMHNKNRVLVAALDSQLSNHFDDCEDLSDTHSMMYCAAVAACRVAHVKFPTSDVATRLKPAVPAWQRRIERRIAGARALIGKLICFREGNTRPRVMRFVRRAFSGTDISPQDYMSRVTERIDFLKQKVYAWANRIRRYKRRVQRYTQNRTFRSNERWVYRAWERPDQGVTDTRLPDDDAMCSFWRSIWSVPVSHTEGDWIREVKRACDPIPQMGAINISPQDVARAVRPLPNWKSPGPDGLHNFWIKWFTRSHARLASQFQAALESGSLPQFLTTGVTHLLHKSGSTTEPKNYRPITCLPTVYKVLTSILRSKINSHIDKNNIMSTAQNGCKSGSRGTKELLLIDMTISQQVRRSRKDLSTCWIDYKKAYDSVPHTWLMRVLELYKIDTKLRTFLMSCMRQWSTVLRYPGCRHIQTNSETVRIERGIFQGDSLSPLWFCLALNPLSTLLENSGLGYRLKRGGQVISHLLYMDDLKLFAPNRLQLMELLKLTETFSSAIRMEFGVDKCAVMHVKRGEIVESVGTQLTDSINLRSLSPTETYKYLGMSEALGINVTDMKQSLRERFFGRLKKVFNSFLSGGNKVRAFNDWVMPVLMYSFGVLKWSQTELDTLDRRVRTMLTAYRMHHPRSSVMRLYIPRKCGGRGFLNAKTLHNREVCSLREYFLAADVGMHRDVVAVDKGLTPLSLASENWRKPVVLDTNARREVWQGKELHGRFFRALHGPDVDQLASVSWLRSGDLFGETEGFVCAIMDEVIMTNNYRRFIVKDGTADICRACHRPGESIRHIISGCSRLANGEYLHRHNLVARIIHQQLALKYSLVGSEVPYYRYEPDPVLENGHITLYWDRSIITDRTIVANKPDIVVVDRNERRAMIVDIAVPHDENLVKAEKDKLIKYIDLAREVVDMWDVDSAVIVPIVVSANGLIAKSLDQHLKRLSLGGWIKGLIQKVVLLDTARIVRRFLSLEP

SEQ ID NO: 11167 - protein, 1200 aa, Arctia plantaginis
MITRARSKAQLTSPDSSLRSVLPSTETTTEVPAVAEASSSTSSDEFFSPPTSPTPVRRQGRGRPPICLGSRGPLTSNRVPATGGNVRRMKWTNSINENVMRAYYRATEMGTNLTAYRVRLVSLFQELEPAVNVSAQRLSDQVRAIQRCHLLDDAVLERIRSDLRNSLIIPSSSHTVDLVANSTPQLVSHTNDVDELVEGEVISVSTQYKDRIRSALEDAILEYRYVNWNNRPRLSRLPIHKRNLALVGALDSLLPDYLDNSEDLGDTHSILYCAAVAVCRVAGVNIVGNVITTRPKSTVPAWQCRIERRIAETRVLIGKLISFRSGNTRPRVMRFVKQAFLGTTIGPQQYMSCVTERIDFLKQKIYAWANRLRRYKKRIDRYNQNRMFQRNEKWVYRKWEEPDPCVSHGHLPDENVTHTFWRNIWSVPVTHIEGDWLRDVRRSCESITPMEPVIIDKDDVSCAVRSLPNWKSPGLDGLHNFWLKWFRSSHACLASQFQAALDSGSLPQFLTTGITHLLYKSGSVMDPKNFRPITCLPTMYKLLTSILRLKITLHINNNSIMSVSQNGCRSGSRGTKDLLIIDRAISQQVRRNRKSLATCWIDYKKAYDSVPHTWLLRVLELYKIDTTLCTFLKSCMGQWRTALRYPGCRQTTVIDAPIKIERGIFQGDSLSPLWFCLALNPLSTLLEGSGLGYRLQKDDQVISHLLYMDDLKLLAPTKLQLSALLKVTENFSNSIKMEFGVDKCAVMYVKKGEIVESEGIELSDSTKLRSLSATETYKYLGISQSLGIPESDMKQTLQERFFGRLKKVLKSLLSGGNKVRACNGWVMPILMYSFGILKWTQTELDALDRRVRTLLTAFRMHHPRSSVMRLYIPRKLGGRGLLNIKTLHNREICNLREYFLHTDVGMHRNVVAVDIGFTPLALAKENWRKPVVFSTNDRREVWKGKELHGRFYRALNGSDIDFKASTTWLRYGDLFGETEGFVCAIMDEVIMTNNYRKYILKDGTVDICRACHRPGESIRHIISGCSRLANGEYLHRHNQVARIVHQQLALKYHLVNLEVPYYRYVPDPVLENGRATLYWDRSIITDRTIVANKPDIVVIDRLERRAMIVDIAVPHDENLVKVEKEKQIKYLDLSHEIVDMWNVDSVIIVPIVVSAHGLIAKSLDQHLKRLTLDGWIKGLIQKAVLLDTARIVRRFLSLQS

SEQ ID NO: 11168 - protein, 1208 aa, Amphipyra berbera
MQTRSRAKATVTQNTRPTTSASSLSSASQPPDSSIVSDVTPAAAVASSSSDEFFSPPTSPPPPPARRRGIRRPPASIGPRGPPASDRVPAPGGSVQRMRWTQSMNENCMRAYFGATEGGTNLTAYRGRMLSLFQVLEPAVNVSAQRLSDQVRVIQRDHRLTDVALDRLRSEVQSNRIISPQSQTAAQPRAPTVVPPPPIHADEESNDRVTNVSTQCNEQLRSALELAIREYRFTPPNLRPRIPRLPMHRKNRALMCALDSLLSSYFDNSENLEDTHSILYCAAVAACRVAHVKFDNNDRATRPKPTVPAWQCRIERRINEARALIGKLICFREGNTRPRVMRFVRRAFSGTDINPRDYMSRVTERIDFLKQKVYAWANRIRRYKRRVERYTQNRMFHSDERRVYRTWERPDHDVNDTHLPDNDVMNTFWRNIWSMPVTHTEGDWMQEVQRACEPIEEMGDITIVPQDVTSAVRPMANWKSPGPDGLHNFWLKWLRSSHARLASQFQSSLESGSLPQFLTTGVTHLLHKSGSTAEPKNYRPITCLPTVYKLLTSILRAKINSHIINNSIMSVSQNGCKNGSRGTKELLLIDMAISQQVRRSRKDLSTCWIDYKKAYDSVPHTWLMRVLELYKVNTTLCAFLTSCMGQWRTVLHYPGCRQIQGRGEPIRIERGIFQGDSLSPLWFCLALNPLSTLLEGSGLGYRLRRGGQVISHLLYMDDLKLFAPNNLQLMKLLKVTETFSNSIRMEFGVDKCAVMHVKRGGIMESVGTQLSDSIHLRSLSSTETYKYLGMSETLGINETDMKQSLRERFYGRLKKVLKSLLSGGNKVRAFNGWVMPVLMYSFGILKWTQTELDALDRRVRTLLTAYRMHHPRSSVMRLYIPRKCGGRGFLNAKTLHNREVCSLREYFLQADVGMHRDIVAVDKGFTPLSLAKENWRKPVVLDTNGRREVWQSKELHGRFYRALHGPDVDFLASVAWLRFGDLFGETEGFVCAIMDEVIMTNNYRKYIVKDGTVDICRACHCPGESIRHIISGCSRLANGEYLHRHNLVARIIHQQLALKYNLVDAEVPYYKYVPDPVLENGHITLYWDRSIITDRTIVANKPDIVVIDRTERLTMIVDITVPHDENLVKAEKDKEIKYQDLAHEVVDMWEIDSAVIVPIVVTANGLIAKSLDHHLTRLSLGSWVKGLIQKAVLLDTARIVRKFLSLRP

SEQ ID NO: 11169 - protein, 1203 aa, Amphipyra berbera
MLTRARARKQTAHPRSPDSSLSSASQPPESSPPVSAVTPAAAVASSSSDEYYSPPSSPPPVRRRGGARPPACLGPRGQPATNRVPAAGGNVSRMRWTQSINENVMRAYYGATEGGINLTAYRERMLFLFQVLEPAINVSAQRLSDQVRVVQRNRRLDDTVLERLRSEARNSQTVTFPVQAAVQMQPIAVPPRPIHVDGEGDGEAINVSNQCSEELRSALDDAILEFRTTPPEIRPRLPRLPMHGKNRALMCALDSLLSNYFDGSEDLADTHSILYCAAIAACRVAHVKFTENERATRPKPAVPAWQSRIERRIGGARVLIGKLICFREGNNRPRVMRFVRRAFSGTDISPRDYMSRVTERIDFLKQKVYAWANRIRRYKRRVERYTQNRIFQSDQRRVYRAWERPDPGGGDVRLPDDDALSSFWRSIWSVPIAHTEDGWMRDIEQACEPIAEMEPITITPQDVADAARPLPNWKSPGPDGLHNFWLKWLRSSHARLASQLQSSLESGSLPQFLTTGVTHLLYKSGSTAEPKNYRPITCLPTVYKLLTSILRVKITTHIDNNCIMSASQNGCRKGSRGTKELLLIDMAISQQVRRSQKDLSTCWIDYKKAYDSVPHSWLMRVLELYKINTTLRTFLMSCMRHWRTVLRYPGCRRIRGSGEQIRIERGIFQGDSLSPLWFCLALNPLSTLLEGTGLGYQLRRGGQVISHLLYMDDLKLFAPTDLQLMELLKVTENFSNSIRMEFGVDKCAVMHVKRGRIAESEGIQLPNSVQLRSLSPTETYKYLGMSEALGISETDMRQSLRERFFGRLNKLLKSLLSGGNKVRAFNGWVMPVLMYSFGTLKWTQADLDALDRRVRALLTAHRMHHPRSSVMRLYIPRKCGGRGFLNVKTLHNREVYSLREYFLQAEGVMHRDVVAVDKGFTPLALARENWRKPAVLSTNDREVVWQSKELHGRYYRALRGPDVDFSASVSWLRSGNLFGETEGFVCAIMDEVMMTNNYRKYIVKDGTVDICRACHRPGESIRHIVSGCSRLANGEYLHRHNLVARIIHQQLALKYNLVESEVPYYRYVPDPVLENGHATLYWDRSIITDRTIVANKPDIVVIDRSERRTMIVDITVPHDENLVKAEKDKQIKYLDLAHEVVGMWDVDSAVIVPIVVTANGIIAKSLDIHLMRLSLGGWIKGLIQRAVLLDTARIVRRFLSLEP

SEQ ID NO: 11170 - protein, 1210 aa, Amphipyra berbera
MLTRSRTKTQDTRTRPRPSASSLSSASQPPDSSIVSDVTPAAAVASSSSDEFYSPPTSPPPPPPPRRGRRGRGRPPACMEPRGPPASDRVPAPGGSVQRMRWTLTMNENCMRAYFGATEGGTNLTAYRGRMLSLFQVLEPTVNVSAQRLSDQVRVIQRDHRLTDAALDRLRSEVQSNRIISLQSQTAAQPQTPTVVPPLPIHADEESDDRVTNVSTQCNEQLRSALELAIREYRFTPPNIRPRIPRLPMHRKNRALMCALDSLLSSYFDNSENLEDTHSILYCAAVAACRVAHAKFDNNDRATRPKPAVPAWQCRIERHINEARALIGKLICFREGNTRPRVMRFVRRAFSGTDINPRDYLSRVTERIDFLKQKVYAWANRIRRYKRRVERYTQNRMFHSDERWVYRTWERPDHDVSDTHLPDNDVMNIFWRNIWSMPVTHTEGDWMQEVQRACEPIEEMGDITIVPQDVTSAVRPMANWKSPGPDGLHNFWLKWLRSSHARLASQFQSSLESGSLPEFLTTGVTHLLHKSGSTAEPKNYRPITCLPTVYKLLTSILRAKINSHIINNSIMSVSQNGCKNGSRGTKELLLIDMAISQQVRRSRKDLSTCWIDYKKAYDSVPHTWLMRVLELYKVNTTLCAFLTLCMGQWRTVLHYPGCRQIQGRGEPIRIERGIFQGDSLSPLWFCLALNLLSTLLEGSGLGYRLRRGGQVISHLLYMDDLKLFAPNNLQLMKLLKVTETFSNSIRMEFGVDKCAVMHVKRGGIMESVGTQLSDSIHLRPLSSTETYKYLGMSEALGINETDMKQSLRERFYGRLKKVLKSLLSGGNKVRAFNGWVMPVLMYSFGILKWTQTELDALDRRVRTLLTAYRMHHPRSSVMRLYIPRKCGGRGFLNAKTLHNREVCSLREYFLQADVGMHRDVVAVDKGFTPLSLAKENWRKPVVLDTNGRREVWQSKELHGRFYRALYGPDVDFLASVAWLRFGDLFGETEGFVCAIMDEVMMTNNYRKYIVKDGTVDICRACHCPGESIRHIISGCSRLANGEYLHRHNLVARIIHQQLALKYNLVDAEVPYYNYVPDPVLENGHITLYWDRSIITDRTIVANKPDIVVIDRSERLTMIVDITVPHDENLVKAEKDKEIKYQDLAHEVVDMWEVDSAVIVPIVVTANGLIAKSLDQHLTRLALGSWVKGLIQKAVLLDTARIVRKFLSLRP

SEQ ID NO: 11171 - protein, 1207 aa, Amphipyra berbera
MLTRSRAKAIAQNTRPRPSASSLSSASQPPDSSIVSDVTPAAAVASSSSDEYFSPPSTPPPPPPRRRGRGRPPASLGPRGPPASDRVPAPGGSVQRMRWTQSMNENCMRAYFGATEGGTNLTAYRGRMLSLFQVLEPAVNVSAQRLSDQVRVIQRDHRLTDDALDRLRSEVQSNCIISLQSQTAAQPQVPPMVPPQPIRADEESDDRVTIVSAQCNEQLRSALELAIREYRFTPPNLRPRIPRLPMNRQNRALMCALDSLLSNYFDNSEGLEDTHSILYCAAVAACRVAHVKFDNNDRATRPKPAVPAWQCRIERRINEARALIGKLICFREGNTRPRVMRFVRRAFSGTDINPREYMSRVTERIDFLKQKVYAWANRIRRYKRRVERYTQNRMFHSDERWVYRTWERPDHDVSDTHLPDNDVMNTFWRNIWSMPVTHTEGDWMQEVQRACEPIEEMGDIIIVPQDVTSAVRPMANWKSPGPDGLHNFWLKWLRSSHARLASQFQSSLESGSLPPFLTTGITHLLHKSGSTAEPKNYRPITCLPTIYKLLTSILRAKINTHIINNSIMSASQNGCKNGSRGTKELLLFDMAISQQVRRSRKDLSTCWIDYKKAYDSVPHTWLMRVLELYKVNTTLCAFLTSCMGQWRTVLHYPGCRQIQGRGEPIRIERGIFQGDSLSPLWFCLALNPLSTLLEGSGLGYRLRRGGQVISHLLYMDDLKLFAPNNLQLMKLLKVTETFSNSIRMEFGVDKCAVMHVKRGGIMESVGTQLLDSIHLRSLSSTETYKYLGMSEALGINETDMKQSLRERFFGRLKKVLKSLLSGGNKVRAFNGWVMPVLMYSFGILKWTQTELDALDRRVRTLLTAYRMHHPRSSVMRLYIPRKCGGRGFLNAKTLHNREVCSLREYFLQADVGMHRDVVAVDKGFTPLSLAKENWRKPVVLDTNGRREVWQSKELHGRFYRALHGPDVDFLASVAWLRFGDLFGETEGFVCAIMDEVMMTNNYRKYIVKDGTVDICRACHCPGESIRHIISGCSRLANGEYLHRHNLVARIIHQQLALKYNLVDAEVPYYKYVPDPVLENGHITLYWDRSIITDRTIVANKPDIVVIDRTERLTMIVDITVPHDENLVKAEKDKEIKYQDLAHEVVDMWEVDSAVIVPIVVTANGLIAKSLDQHLTRLSLGSWVKGLIQKAVLLDTARIVRKFLSLRP

SEQ ID NO: 11172 - protein, 1171 aa, Noctua janthe
MLTRSAARLARLSPPDPSLSSASPPPESSPVVSAVTPAVAVASSSSDEYFSPPTTPPPVRRRGGRRPPDGLGPRGPPASDRVPAPGGSVPRMRWTQSINANVMRAYYGATEGGNNLTAYRVRMLSLFQVLEPAVNVSAQRLSDQVRVIQRNRMLDDTVLDRLRTEMQSSHVITPSVQAVVLPQSSTISNHANNVNNDMVTNVSTQCNEEMRSALEGAIREYRFMQPDLRPRISRLPMHNKNRALVAVLDSQLSNYFDNCEDLTDAHSILYCAAVTACRVAHVKFSDDRATRPKPAVPAWQYRIERRIDVARALIGKLICFREGNTRPRVMRFVRRAFLGTDISPRDYMSRVTERIDFLKQKVYAWANRIRRYKRRVDRYTQNRTFQRDERWVFRAWERPDQGVADTRLPDDDAMCSFWRSIWSVPVSHTEGEWTRRVERACDLVPEMGAINISPQDVVRAVRPLPNWKSPGPDGLHNFWIKWFTRSHARLAILFQSALESGSLPEFLTTGITHLLHKSGSTAEPKNYRPITCLPTVYKVLTSILRAKINKHIDDNSVMSASQNGCRNGSRGTKELLLIDMAISQQVRRSRKDLSTCWIDYKKAYDSVPHTWLMRVLELYKIDATLRTFLMSCMGQWRTVLRYPGCRQIQRNSEPIRIERGIFQGDSLSPLWFCLALNPLSTLLEDSGLGYRLRRGGQVISHLLYMDDLKLFAPNDLQLMELLKVTETFSSAIRMEFGVDKCAVMHVKRGEIVESVGTQLSDSINLRSLSATETYKYLGMSEALGINVADMKQSLKERFFGRLKKVFNSLLSGGNKVRAFNGWVMPVLMYSFGILKWTQTELDALDRRVRTLLTACRMHHPRSSVMRLYIPRRCGGRGFLNAKTLHNREICSLREYFLETDVGMHRDVVAVDKGLTPLSLAKENWRKPVVLDTNDRMEVWQSKELHGRFFRALHGPDVDLSASVAWLRSGDLFGETEGFVCAIMDEVMMTNNYRRFIVKDGTVDICRACHRPGESIRHIISGCSRLANGEYLHRHNLVARIIHQQLALKYNLVESEEPYYKYVPDPVLENGSITLYWDRSIITDRTIVANKPDIVVVDRSERRAMIVDITVPHDENLVKAEKDKQIKYLDLAREVVDMWDVDSAIIVPIVVSAHGLIAKSLDQYLRRLSLGS

SEQ ID NO: 11173 - protein, 1197 aa, Noctua janthe
MLTRSATRRARLSPPDPSLSSASPPPESSPIVSAVTPAVAVASSSSDEYFSPPTTPPPVRRRGGRRPPDGLGPRGPPASDRVPAPGGSVPRMRWTQSINANVMRAYYGATEGGNNLTAYRVRMLSLFRVLEPAVNVSAQRLSDQVRVIQRNGMLDDTVLDRLRTEMQSSHVIATPPQTVVPPQSTIIPTHDNNVSNDMVTNVSTQCNEEMRCALEGAIREYRFMQPDLRPRVPRLPMHNKNKVLVAVLDSQLSNYFDNCENLTDAHSVLYCAAVAACRVAHVKFSDDRATRPKPAVPSWQYRIERRIGEARALIGKLICFREGNTRPRVMRFVRRAFSGTDISARDYMSRVTERIDFLKQKVYAWANRIRRYKRRVDRYTQNRTFQRDERWVYRAWERPDQGVADTHLPDDDAMCSFWRSIWSVPVSHTEGEWTREVERACDLVPEMGAITISPQDVVRAVRPLPNWKSPGPDGLHNFWIKWFTRSHARLAILFQSALESGSLPEFLTTGITHLLHKSGSTAEPKNYRPIACLPTVYKVLTSILRAKINKHIDDNSVMSASQNGCRNGSRGTKELLLIDMAISQQVRRSRRDLSTCWIDYKKAYDSVPHTWLMRVLELYKVDSTLRIFLMSCMGQWRTVLRYPGCRQIQRNSEPIRIERGIFQGDSLSPLWFCLALNPLSTLLEDSGLGYRLRRGGQVISHLLYMDDLKLFAPNDLQLMELLKVTETFSSAIRMEFGVDKCAVMHVKRGEIVESMGTQLSDSINLRSLSATETYKYLGMSEALGINVADMKQSLKERFFGRLKKVFNSLLSGGNKVRAFNGWVMPVLMYSFGILKWTQTELDALDRRVRTLLTTYRMHHPRSSVMRLYISRRCGGRGFLNAKTLHNREIYSLRKYFLETDVGMHRDVVAVDKGLTPLSFAKENWRKPVVLDTNDRMEVWQSKELHGRFFRALHGPDVDLPASVAWLRSGDLFGETEGFVCAIMDEVMMTNNYRRFIVKDGTVDICRACHRPGESIRHIISGCSRLANGEYLHRHNLVARIIHQQLALKYNLVESEVPYYKYVPDPVLENGNITLYWDRSIVTDRTIVANKPDIVVVDRSERRAIIVDITVPHDGNLVKAEKDKQIKYLDLAHEVVDMWDVDSAIIVPIVVSAHGLIAKSLDQYLRRLSLGSWIKGLIQKAVLLDTARIVRRFLSLES

SEQ ID NO: 11174 - protein, 1197 aa, Noctua janthe
MLTRSATRRARLSPPDPSLSSASPPPESSPIVSAVTPAVAVASSSSDEYFSPPTTPPPVRRRGGRRPPDGLGPRGPPASDRVPAPGGSVPRMRWTQSINANVMRAYYGATEGGNNLTAYRVRMLSLFQVLEPAVNVSAQRLSDQVRVIQRNGMLDDTVLDRLRTEMQSSHVIATPPQTVVPPQSTIIPTHDNNVSNDMVTNVSTQCNEEMRCALEGAIREYRFMQPDLRPRVPRLPMHNKNKVLVAVLDSQLSNYFDNCENLTDAHSVLYCAAVAACRVAHVKFSDDRATRPKPAVPSWQYRIERRIGEARALIGKLICFREGNTRPRVMRFVRRAFSGTDISARDYMSRVTERIDFLKQKVYAWANRIRRYKRRVDRYTQNRTFQRDERWVYRAWERPDQGVADTHLPDDDAMCSFWRSIWSVPVSHTEGEWTREVERACDLVPEMGAITISPQDVVRAVRPLPNWKSPGPDGLHNFWIKWFTRSHARLAILFQSALESGSLPEFLTTGITHLLHKSGSTAEPKNYRPIACLPTVYKVLTSILRAKINKHIDDNSVMSASQNGCRNGSRGTKELLLIDMAISQQVRRSRRDLSTCWIDYKKAYDSVPHTWLMRVLELYKVDSTLRIFLMSCMGQWRTVLRYPGCRQIQRNSEPIRIERGIFQGDSLSPLWFCLALNPLSTLLEDSGLGYRLRRGGQVISHLLYMDDLKLFAPNDLQLMELLKVTETFSSAIRMEFGVDKCAVMHVKRGEIVESVGTQLSDSINLRSLSATETYKYLGMSEALGINVADMKQSLKERFFGRLKKVFNSLLSGGNKVRAFNGWVMPVLMYSFGILKWTQTELDALDRRVRTLLTTYRMHHPRSSVMRLYIPRRCGGRGFLNAKTLHNREICSLREYFLETDVGMHRDVVAVDKGLTPLSLAKENWRKPVVLDTNDRMEVWQSKELHGRFFRALHGPDVDLPASVAWLRSGDLFGETEGFVCAIMDEVMMTNNYRRFIVKDGTVDICRACHRPGESIRHIISGCSRLANGEYLHRHNLVARIIHQQLALKYNLVESEVPYYKYVPDPVLENGNITLYWDRSIVTDRTIVANKPDIVVVDRSERRAMIVDITVPHDGNLVKAEKDKQIKYLDLAHEVVDMWDVDSAIIVPIVVSAHGLIAKSLDQYLRRLSLGSWIKGLIQKAVLLDTARIVRRFLSLEP

SEQ ID NO: 11175 - protein, 1200 aa, Mythimna ferrago
MLTRSRARSQIAQPTSSSSSLSSASQPPGPAPAVSPEIPVAAVASSSSDEYFSPPTTPPPARRRGRGRPPACLGPRGPPASDRVLAAGGSVQRMRWTQSINENVMRSYFGATEGGTNLTAYRGRMLSLFQVLEPAVNVSAQRLSDQVRVIQRNRMLDDAVLDRLRLESRNGRVSPISPPAAVQRQPSVSPRPDHVGEDDDDGAISVNTQCNARLRSALEDAFREYRSIPPELRPRLPRLPMHRKNRALVCALDSQLSNCFDSSEYLTDTHSILYCAAAAACRVAHVKIPNNDRATRPAKPAWQCRIERRIGEARALIGKLICFREGNTRPRVMRFVRRAFSGTDISPRDYLPRITERIDFLKQKVYAWANRIRRYKRRVERYTQNHTFQSNERWVYRAWERPDQSVIDTRLPDDDAMYSFWRSIWSVPVNHTEGDWTREIERVCELVPEMGAINISPQDVARAVRPLPNWKSPGPDGLHNFWLKWFQSSHARLAFQFQSALESGSLPQFLTTGITHLLHKSGSTAEPKNYRPITCLPTVYKVLTSILRAKINNHIETNSIMSASQNGCRNGSRGTKELLLIDVAISQQVRRSRRDLSTCWIDYKKAYDSVPHTWLMRVLELYKVDATLRAFLMSCMGQWRTVLHYPGCRRVSENSEPLRIERGIFQGDSLSPLWFCLALNPLSTLLEASGLGYRLRREGQVISHLLYMDDLKLFASNNLQLMELLKVTETFSSAIRMEFGLDKCAVMHVKRGEIMESVGTQLSDSIHLRSLCSTETYKYLGMSEALGINAADVKQSLRERFFGRLNKVLNSLLSGGNKVRAFNGWVMPVLMYSFGILKWTQTELDALDRRVRTLLTANRMHHPRSSVMRLYIPRKCGGRGFLNAKTLHNREVCSLREYFLETDVGMHRDVVAVDKGLTPLSLANENWRKPIVMDTNERKEVWKGKELHGRFYRALHGPDVDLLASVSWLRFGDLFGETEGFVFAIMDEVMMTNNYRKYIVKDGTVDICRACHRPGESIRHIISGCSHLANGDYLHRHNLVARIIHQQLALKYNLVESEVPYYRYVPDPVLENGSVTLYWDRSIITDRTIVANKPDIVVIDRLERRTMIVDIAVPHDENLVKAEKDKQTKYLDLAREVVDIWEVDRAIIVPIVVTANGLIAKSLDQHLRRLSLGSWIKGLIQKAVLLDTARIVRRFLSQEP

SEQ ID NO: 11176 - protein, 1048 aa, Mythimna ferrago
MLDDTVLDRLRTEMSNRVITPPSQHVVPVVVPQSSHISLHTDEVSTDTVTNVSTQCNNELRSALECAIREYRNMPLELRPRLPRLPMHNKNKALVAALDSQLSNYFDDCEDLTDTHSIMYCAAVAACRVAHVKFPNSDVAKRPKPAVPAWQYRIERRIGGARALIGKLICFREGNTRPRVMRFVRRAFSGTDISPRDYMSRVTERIDFLKQKVYAWANRIRRYKRRVERYIQNSTFRSNERWVYRAWERPDQGVTDTRPPDDDAMCSFWRNIWSVPVSHTEGGWTREVERACESVTEMGAITISPQDVARAVRPLPNWKSPGPDGLHNFWIKWLQRSHARLASQYQAALESGSLPEFLTTGVTHLLHKSGSTAEPKNYRPITCLPTVYKVLTSILRAKINHHVDNNAIMSASQNGCRNGSRGTKELLLIDMAISQQVRRSRKDLSTCWIDYKKAYDSVPHTWLMRVLELYKVDATLRTFLMSCMRQWRTVLRYPGCRNIQRNSEPVRIERGIFQGDSLSPLWFCLALNPLSTLLENSGLGYRLKRGGQVISHLLYMDDLKLFAPNNLQLMELLKVTETFSSAIRMEFGVDKCAVMHIKRGEIVESVGIQLSDSIHLRSLSPTETYKYLGMSEALGINATDMKQSLRERFFGRLKKVLNSLLSGGNKVRAFNGWVMPVLMYAFGVLKWTQTELDALDRRVRTLLTAYRMHHPRSSVMRLYIPRKCGGRGFLNAKSLHNREVCSLREYFLAADGGMHRDVVAVDKGLTPLSLANENWRKPVVLDTNVRREVWQSKELHGRFFRALHGPDVDQLASVAWLRVGDLFGETEGFVCAIMDEVIMTNNYRRFIVKDGTVDICRACHRPGESIHHIISGCSRLANGEYLHRHNLVARIIHQQLALKYSLVESEVPYYRYVPDPVLDSGDITLYWDRSIITDRTIVANKPDIVVVDRSERRAMIVDISVPHDENLAKAEKDKQIKYIDLAREVVDMWEVDSAIIVPIVVSANGLIAKSLDQHLRRLSLGDWIKGLIQKAVLLDTARIVRRFLSLEP

SEQ ID NO: 11177 - protein, 1200 aa, Mythimna ferrago
MLTRSRARQQQTHPTSSDSSFSSASQPPGPAPAVSPEIPVAAVASSSGDEYFSPPTTPPPARRRGRGRPPACLGPRGPPASGGVPAVGGSVQRMRWTQSINENVMRSYFGATEGGTNLTAYRGRMLSLFQVLEPAVNVSAQRLSDQVRVIQRNRMLDDAVLDRLRLESRNGRVSPVSPPAAVQLQPSVSPRPDHVGEDDDDGAISVSTQCNARLRSALEDAFRKYRSIPPELRPRLPRLPMHRKNRALVCALDSQLSNCFDSSEDLTDTHSILYCAAAAACRVAHVKIPNSDRATRPVKPAWQCRIERRIGEARALIGKLICFREGNTRPRVMRFVRRAFSGTDVSPRDYLPRITERIDFLRQKVYAWANRIRRYKRRVERYTQNRAFQSNERWVYRAWERPDQSVIDTRLPDDDAMYSFWRSIWSVPVSHTEGDWTRGVERECELIPEMGAITISPQDVARAVRPLPNWKSPGPDGLHNFWLKWFKSSHARLASQFQSALESGSLPQFLTTGITHLLHKSGSTAEPKNYRPITCLPTVYKVLTSILRVKINSHIETNSIMSASQNGCRNGSRGTKELLLIDVAISQQVRRSRRDLSTCWIDYKKAYDSVPHTWLMRVLELYKIDVTLRTFLMSCMGQWRTVLHYPGCRRVSENSEPLRIERGIFQGDSLSPLWFCLALNPLSTLLEGSGLGYRLRRESQVISHLLYMDDLKLFASNNLQLMELLKVTETFSSAIRMEFGLDKCAVMHVKRGEIMESVGTQLSDSIHLRSLSSTETYKYLGMSEALGINAADVKQSLRERFFCRLNKVLKSLLSGGNKVRAFNGWVMPVLMYSFGILKWTQTELDALDRRVRTLLTANRMHHPRSSVMRLYIPRKCGGRGFLNTKTLHNREVCSLREYFLETDVGMHRDVVAVDKGLTPLSLASENWRKPIVMDTNERKEVWKGKELHGRFYRALHGPDVDLLTSVSWLRFGNLFGETEGFVFAIMDEVMMTNNYRKYIVKDGTVDICRACHRPGESIRHIISGCSHLANGDYLHRHNLVARIIHQQLALKYNLVESEVPYYRYVPDPVLENGSVTLYWDRSIITDRTIVANKPDIVVIDRLERRTMIVDIAVPHDENLVKAEKDKQTKYLDLAREVVDMWEVDRAIIVPIVVTANGLIAKSLDQHLRRLSLGSWIKGLIQKAVLLDTARIVRRFLSQEP

SEQ ID NO: 11178 - protein, 1200 aa, Mythimna ferrago
MLTRAAARRARPPPPASSLSSASPPSEPSLTESAVTLAVAAASSSSDEYYSPPTTPPPTRRRGGRRPPACLGPRGPPASDRVPAAGGSVPRMRWTQSTNENVMRAYYGATEGGNNLTAYRVRMLSLFQVLEPAVNVSAQRLSDQVRVIQRNHMLDDTVLDRLRTEMSDRVITAPSQPVVPVVASPPSHISFHTDEVSTDTVTNVSTQCNNELRSALECAIREYRNMPLEFRPRLPRLPMRNKNKALVAALDSQLSNYFDDCEDLTDTHSIMYCAAVAACRVAHVKFPNSDVATRPKPAVPAWQCRIERRIGGARALIGKLICFREGNTRPRVMRFVRRAFSGTDINPRDYMSRVTERIDFLKQKVYAWANRIRRYKRRVERYTQNSTFWSNERWVYRAWERPDQGVTDTRLPDDDAMCLFWRNIWSVPVSHTEGGWTREVERACESITEMGAITISPQDVARAVRPLPNWKSPGPDGLHNFWIKWLQRSHARLASQYQAALESGSLPEFLTTGVTHLLHKSGSTAEPKNYRPITCLPTVYKVLTSILRAKINHHVDNNAIMSASQNGCRNGSRGTKELLLIDMAISQQVRRSRKDLSTCWIDYKKAYDSVPHTWLMRVLELYKVDATLRTFLMSCMRQWRTVLRYPGCRNIQRNSEPVRIERGIFQGDSLSPLWFCLALNPLSTLLENSGLGYRLKRGGQAISHLLYMDDLKLFAPNNLQLMELLKVTETFSSAIRMEFGVDKCAVMHIKRGEIVESVGIQLSDSIHLRSLSPTETYKYLGMSEALGINATDMKQSLKERFFGRLKKVLNSFLSGGNKVRAFNGWVMPVLMYAFGVLKWTQTELDALDRRVRTLLTAYRMHHPRSSVMRLYIPRKCGGRGFLNAKTLHNREVCSLREYFLAADGGMHRAVVAVDKGLTPLSLANENWRKPVVLDTNVRKEVWQSKELHGRFFRALHGPDVDQLASVAWLRVGDLFGETEGFVCAIMDEVIMTNNYRRFIVKDGTVDICRACHQPGESIRHIISGCSRLANGEYLHGHNLVARIIHQQLALKYSLVESEVPYYRYVPDPVLDSGDITLYWDRSIITDRTIVANKPDIVVVDRRERRAMIVDISVPHDENLVKAEKDKQIKYIDLAREVVDMWNVDSAIIVPIVVSANGLIAKSLDQHLRRLSLSGWIKGLIQRAVLLDTARIVRRFLSLEP

SEQ ID NO: 11179 - protein, 1200 aa, Mythimna ferrago
MLTRAAARRARPPPPASSLSSASLPPEPSLTVSAVTPAAAAASSSSDEYYSPPTTPPPARRRGGRRPPACLGPRGPPVSDRVPAAGGSVPRMRWTQSTNENVMRAYYGATEGGNNLTAYRVRMLSLFQALEPAVNVSAQRLSDQVRVIQRNHMLDDTVLDRLRTEMSNRVITPPSQPVVPVVVPQSSHISLHTDEVSTDTVTNVSTQCNNELRSALECAIREYRNMPLELRPRLPRLPMHNKNKALVAALDSQLSNYFDDCEDLTDTHSIMYCAAVAACRVAHVKFPNSDVAKRPKPAVPAWQCRIERRIGGARALIGKLICFREGNTRPRVMRFVRRAFSGTDISPRDYMSRVTERIDFLKQKVYAWANRIRRYKRRVERYIQNSTFRSNERWVYRAWERPDQGVTDTRPPNDDAMYSFWRNIWSVPVSHTEGGWTREVDRACESITEMGAFTISPQDVARAVRPLPNWKSPGPDGLHNFWIKWLQRSHARLASQYQAALESGSLPEFLTTGVTHLLHKSGSTAEPKNYRPITCLPTVYKVLTSILRAKINHHVDNNAIMSASQNGCRNGSRGTKELLLIDMAISQQVRRSRKDLSTCWIDYKKAYDSVPHTWLMRVLELYKVDATLRTFLMSCMRQWRTVLRYPGCRNIQRNSEPVRIERGIFQGDSLSPLWFCLALNPLSTLLENSGLGYRLKRGGQVISHLLYMDDLKLFAPNNLQLMELLKVTETFSSAIRMEFGVDKCAIMHIKRGEIVESVGIQLSDSIHLRSLSPTETYKYLGMSEALGINATDMKQSLRERFFGRLKKVLNSLLSGGNKVRAFNGWVMPVLMYAFGVLKWTQTELDALDRRVRTLLTAYRMHHPRSSVMRLYIPRKCGGRGFLNAKSLHNREVCSLREYFLAADGGMHRDVVAVDKGLTPLSLANENWRKPVVLDTNVRREVWQSKELHGRFFRALHGPDVDQLASVAWLRVGDLFGETEGFVCAIMDEVIMTNNYRRFIVKDGTVDICRACHRPGESIRHIISGCSRLANGEYLHRHNLVARIIHQQLALKYSLVESEVPYYRYVPDPVLDSGDITLYWDRSIITDRTIVANKPDIVVVDRSERRAMIVDISVPHDENLAKAEKDKQIKYIDLAREVVDMWEVDSAIIVPIVVSANGLIAKSLDQHLRRLSLGDWIKGLIQKAVLLDTARIVRRFLSLEP

SEQ ID NO: 11180 - protein, 1198 aa, Mythimna ferrago
MLTRAAARRTRLPAPASPLSSASPPPEPSSTVSAVTPAVAAASSSSDEYYSTPTTPPPTRPRGGRRPPACLESRGPPASERVPATGGCVSRMRWTQSINENVMRAYFGATEGGNNLTAYRVRMLSLFQVLEPAVNVSAQRLSDQVRVIQRNHMLDDTVLDRLRTEMGSHAVTSSSQTVVPPQVSNHLSINADEEITDMVTHVSTQWNNELRSALECAIREYRNIPPELRPRIPRLPMCNKNKALVAALDSQLSNYFDDCEDLTDTHSIMYCAAVAARRVAHVKFPNTDVATRPKPAVPAWQCRIERRIGGARALIGKLICFREGNTRPRVMRFVRRAFSGTDISPRDYMSRVTERIDFLKQKVYAWANRIRRYKRRVERYIQNSTFRSNERWVYRTWERPDQGVTDTHLPDDDAMCSFWRNIWSVPVSHTEGGWTREVERACESITEMGAITISPQDVARAVRPLPNWKSPGPDGLHNFWIKWLQRSHARLASQYQTALESGSLPEFLTTGVTHLLHKSGSTAEPKNYRPITCLPTVYKVLTSILRAKINNHVDNNAIMSASQNGCRNGSRGTKELLLIDMAISQQVRRSRKDLSTCWIDYKKAYDSVPHTWLMRVLELYKVDATLCTFLMSCMRQWRTVLRYPGCRNIQRNSEPVRIERGIFQGDSLSPLWFCLALNPLSTLLENSGLGYRLKRGGQVISHLLYMDDLKLFAPNNLQLMELLKVTETFSSAIRMEFGVDKCAVMHIKRGEIVESVGTQLSDSIHLRSLSPTETYKYLGMSEALGINATDMKQSLKERFFGRLKKVLNSLLSGGNKVRAFNGWVMPVLMYAFGVLKWTQTELDALDRKVRTLLTAYRMHHPRSSVMRLYIPRKCGGRGFLNAKTLHNREVCSLREYFLAADVGMHRDVVAVDKGLTPLSLANENWRKPVVLDTNVRKEVWQSKELHGRFFRALHGPDVDQLASVAWLRVGDLFGETEGFVCAIMDEVIMTNNYRRFIVKDGTVDICRACHRPGESIRHIISGCSRLANGEYLHRHNLVARIIHQQLALKYSLVESEVPYYRYVPDPVLDSGDITLYWDRSIITDRTIVANKPDIVVVDRSERRAMIVDISVPHDENLVKAEKDKQIKYIDLAREVVDMWEVDSAIIVPIVVSANGLIAKSLDQHLRRLSLGDWIKGLIQKAVLLDTARIVRRFLSLEP

SEQ ID NO: 11181 - protein, 1198 aa, Mythimna ferrago
MLTRAAARRARLPAPASSLSSASPPPEPSPTVSAVTPAVAAASSSSDEYYSPPTTPPPTRRRGGRRPPACLGSRGPPASERVPATGGCVSRMRWTQSINENVMRAYFGATEEGNNLTAYRVRMLSLFQVLEAAVNVSAQRLSDQVRVIQRNHMLDDTVLDRLRTEMGSHAVTSSSQTVVPPQVSNHLSINADKEITDMVTHVSTQCNNELRSALKCAIREYRNIPPELRPRIPRLPMCNKNRALVAALDSQLSNYFDDCEDLTDTHSIMYCAAVAAYRVAHVKFPNTDVATRPKPAVPAWQCRIERRIGGARALIGKLICFREDNTRPRVMRFVRRAFSGTDISPRDYMSRVTERIDFLKQKVYVWANRIRRYKRRVERYIQNSTFRSNERWVYRTWERPDQGVTDTHLPDDDAMCSFWRNIWSVPVSHTEGGWTREVERACESITEMGAITISPQDVARAVRPLPNWKSPGPDGLHNFWIKWLQRSHARLASQYQTALESGSLPEFLTTGVTHLLHKSGSTAEPKNYRPITCLPTVYKVLTSILRAKINNHIDNNAIMSASQNGCRNASRGTKELLLIDMAISQQVRRSRKDLSTCWIEYKKAYDSVPHTWLMRVLELYKVDATLCTFLMSCMRQWRTVLRYPGCRNIQRNSEPVRIERGKFQGDSLSPLWFCIALNPLSTLLENSGLGYRLKRGGQVISHLLYMDDLKLFAPNDLQLMELLKVTETFSSAIRMEFGVDKCAVLHIKRGEIVESVGTQLSDSIHLRSLSPTETYKYLGMSEALGINATDMKQSLKERFFGRLKKVLNSLLSGGNKVRAFNGWVMPVLIYAFGVLKWTQTELDALDRKVRTLLTAYRMHHPRSSVMRLYIPRKCGGRGFLNAKTLHNREVCSLREYFLAADVGMHRDVVAVDKGLTPLSLVNENWRKPVVLDTNVRKEVWQSKELHVRFFRALHGPDVDQLASVAWLRVGDLFGETEGFVCAIMDEVIMTNHYRRFIVKDGTVDICRACHRPGESIRHIISGCSRLANGEYLHRHNLVARIIHQQLALKYSLVESEVPYYRYMPDPVLDSGDITLYWDRSIITDRTIVANKPDIVVVDRSERRAMIVDISVPHDENLVKAEKDKQIKYIDLAREVVDMWEVDSAIIVPIVVSANGLIAKSLDQHLRRLSLGDWIKGLIQKAVLLDTARIVRRFLSLEP

SEQ ID NO: 11182 - protein, 1200 aa, Mythimna ferrago
MLTRAAARRARPPPLASSLSSASLPPEPSLTVSAVTPAAAAASSSSDEYYSPPTTPPPARRRGGRRPPACLGPRGPPVSDRVPAAGGSVPRMRWTQSTNENVMRAYYGATEGGNNLTAYRVRMLSLFQVLEPAVNVSAQRLSDQVRVIQRNNMLDDTVLDRLRTEMSNRVITPPSQPVVPVVVPQSSHISLHTDEVSTDTVTNVSTQCNNELRSALECAIREYRNMPLELRPRLPRLPMHNKNKALVAALDSQLSNYFDDCEDLTDTHSIMYCAAVAACRVAHVKFPNSDVATRPKPAVPAWQCRIERRIGGARALIGKLICFREGNTRPRVMRFVRRAFSGTDISPRDYMSRVTERIDFLKQKVYAWANRIRRYKRRVERYIQNSTFRSNERWVYRAWERPDQGVTDTRPPDDDAMCSFWRNIWSVPVSHTEGGWTREVERACESVTEMGAITISPQDVARAVRPLPNWKSPGPDGLHNFWIKWLQRSHARLASQYQTALESGSLPEFLTTGVTHLLHKSGSTAEPKNYRPITCLPTVYKVLTSILRAKINHHVDNNAIMSASQNGCRNGSRGTKELLLIDMAISQQVRRSRKDLSTCWIDYKKAYDSVPHTWLMRVLELYKVDATLRTFLMSCMRQWRTVLRYPGCRNIQRNSEPVRIERGIFQGDSLSPLWFCLALNPLSTLLENSGLGYRLKRGGQVISHLLYMDDLKLFAPNNLQLMELLKVTETFSSAIRMEFGVDKCAVMHIKRGEIVESVGIQLSDSIHLRSLSPTETYKYLGMSEALGINATDMKQSLRERFFGRLKKVLNSLLSGGNKVRAFNGWVMPVLMYAFGVLKWTQTELDALDRRVRTLLTAYRMHHPRSSVMRLYIPRKCGGRGFLNAKSLHNREVCSLREYFLAADGGMNRDVVAVDKGLTPLSLANENWRKPVVLDTNVRREVWQSKELHGRFFRALHGPDVDQLASVAWLRVGDLFGETEGFVCAIMDEVIMTNNYRRFIVKDGTVDICRACHRPGESIRHIISGCSRLANGEYLHRHNLVARIIHQQLALKYSLVESEVPYYRYVPDPVLDSGDITLYWDRSIITDRTIVASKPDIVVVDRSERRAMIVDISVPHDENLAKAEKDKQIKYIDLAREVVDMWEVDSAIIVPIVVSANGLIAKSLDQHLRRLSLGDWIKGLIQKAVLLDTARIVRRFLSLEP

SEQ ID NO: 11183 - protein, 960 aa, Mythimna ferrago
MHRKNRALVCALDSQLSNCFDSSEDLSDTHSILYCAAAAACRVAHVKIPNNDRATRPAKPAWQCRIERRIGEARALIGKLICFREGNTRPRVMRFVRRAFSGTDISLRDYLPRITERIDFLKQKVYAWANRIRRYKRRVERYTQNHTFQSNERWVYRAWERPDQSVIDTRLPDDDAMYSFWRSIWSVPVNHTEGDWTREIERECELIPEMGAINISPQDVARAVRPLPNWKSPGPDGLHNFWLKWFQSSHARLASQFQSTLESGSLPQFLTTGITHLLHKSGSTAEPKNYRPITCLPTVYKVLTSILRAKINNHIETNSIMSASQNGCRNGSRGTKELLLIDVAISQQVRRSRRDLSTCWIDYKKAYDSVPHTWLMRVLELYKVDATLRAFLMSCMGQWRTVLHYPGCRRVSENSEPLRIERGIFQGDSLSPLWFCLALNPLSTLLEGSGLGYRLRREGQVISHLLYMDDLKLFASNNLQLMELLKVTETFSSAIRMEFGLDKCAVMHVKRGEIMESVGTQLSDSIHLRSLCSTETYKYLGMSEALGINAADVKQSLRERFFGRLNKVLNSLLSGGNKVRAFNGWVMPVLMYSFGILKWTQTELDALDRRVRTLLTANRMHHPRSSVMRLYIPRKCGGRGFLNAKTLHNREVCSLREYFLETDVGMHRDVVAVDKGLTPLSLASENWRKPIVMDTNERKEVWKGKELHGRFYRALHGPDVDLLASVSWLRFGNLFGETEGFVFAIMDEVMMTNNYRKYIVKDGTVDICRACHRPGESIRHIISGCSHLANGDYLHRHNLVARIIHQQLALKYNLVESEVPYYKYVPDPVLENGSVTLYWDRSIITDRTIVANKPDIVVIDRLERRTMIVDIAVPHDENLVKAEKDKQTKYLDLAREVVDMWEVDRAIIVPIVVTANGLIAKSLDQHLRRLSLGSWIKGLIQKAVLLDTARIVRRFLSQEP

SEQ ID NO: 11184 - protein, 1200 aa, Mythimna ferrago
MLTRSRARSQIAQPTSSGSSLSSASQPPGPAPTVSPEIPVAAVASSSSDEYFSPPTTPPPARRRGRDRPPACLGPRGPPASDRVLAAGGSVQRMRWTQSINENVMRSYFGATEGGTNLTAYRGRMLSLFQVLEPAVNVSAQRLSDQVRVIQRNRMLDDAVLDRLRLESRNGRVSPISPPAAVQGQSSVSPRPDHVGEDDDDGAISVSTQCNARLRSALEDAFREYRSIPPELRPRLPRLPMHRKNRALVCALDSQLSNCFESSEDLTDTHSILYCAAAAACRVAHVKIPNNDRATRPAKPAWQCRIERRIGEARALIGKLICFREGNTRPRVMRFVRRAFSGTDISPRDYLPRITERIDFLKQKVYAWANRIRRYKRRVERYTQNHMFQSNERWVYRAWERPDQSVIDMRLPDDDAMYSFWRSIWSVPVNHTEGDWTREIERVCELIPEMGAINISPQDVARAVRPLPNWKSPGPDGLHNFWLKWFQSSHARLAFQFQSALESGSLPQFLTTGITHLLHKSGSTAEPKNYRPITCLPTVYKVLTSILRAKINNHIETNSIMSASQNGCKNGSRGTKELLLIDVAISQQVRRSRRDLSTCWIDYKKAYDSVPHTWLMRVLELYKVDATLCAFLMSCMGQWRTVLHYPGCRRVSENSEPLRIERGIFQGDSLSPLWFCLALNPLSTLLEGSGLGYRLRREGQVISHLLYMDDLKLFASNNLQLMELLKVTETFSSAIRMEFGLDKCAVMHVKRGEIMESVGTQLSDSIHLRSLCSTETYKYLGMSEALGINAADVKQSLRERFFGRLNKVLNSLLSGGNKVRAFNGWVMPVLMYSFGILKWTQTELDALDRRVRTLLTANRMHHPRSSVMRLYIPRKCGGRGFLNAKTLHNREVCSLREYFLETDVGMHRDVVAVDKGLTPLSLANENWRKPIVMDTNERKEVWKGKELHGRFYRALHGPNVDLLASVSWLRFGNLFGETEGFVFAIMDEVMMTNNYRKYIVKDGTVDICRACHRPGESIRHIISGCSHLANGDYLHRHNLVARIIHQQLALKYNLFESEVPYYRYVPDPVLENGSVTLYWDRSIITDRTIVANKPDIVVIDRLERRTMIVDIAVPHDENLVKAEKDKQTKYLDLAREVVDMWEVDRAIIVPIVVTANGLIAKSLDQHLRRLSLGSWIKGLIQKAVLLDTARIVRRFLSQEP

SEQ ID NO: 11185 - protein, 1200 aa, Mythimna ferrago
MLTRSRARQQQTHPTSSDSSFSSASQPPGPAPAVSPVIPVAAVASSSSDEYFSPPTTPPPARRRGRGRPPACLGPRGPPASGGVPAAGGSVQRMRWTQSINENVMRSYFGATEGGTNLTAYRGRMLSLFQVLEPAVNVSAQRLSDQVRVIQRNRMLDDAVLDRLRLESRNGRVSPVSPPAAVQLQPSVSPRPDHVGEDDDDGAISVSTQCNARLRSALEDAFREYRSIPPELRPRLPRLPMHRKNRALVCALDSQLSNCFDSSEDLTDTHSILYCAAAAACRVAHVKIPNSDRATRPAKPAWQCRIERRIGEARALIGKLICFREGNTRPRVMRFVRRAFSGTDVSPRDYLPRITERIDFLRQKVYAWANRIRRYKRRVERYTQNRAFQSNERWVYRAWERPDQSVIDTRLPDDDAMYSFWRSIWSVPVSHTEGDWTRGVERECELIPEMGAITISPQDVARAVRPLPNWKSPGPDGLHNFWLKWFKSSHARLASQFQSALELGSLPQFLTTGLTHLLHKSGSTAEPKNYRPITCLPTVYKVLTSILRAKINSHIETNSIMSASQNGCRNGSRGTKELLLIDVAISQQVRRSRRDLSTCWIDYKKAYDSVPHTWLMRVLELYKIDVTLRTFLMSCMGQWRTVLHYPGCRRVSENSEPLRIERGIFQGDSLSPLWFCLALNPLSTLLEGSGLGYRLRREGQVISHLLYMDDLKLFASNNLQLMELLKVTETFSSAIRMEFGLDKCAVMHVKRGEIMESVGTQLSDSIHLRSLSSTETYKYLGMSEALGINAADVKQSLRERFFCRLNKVLKSLLSGGNKVRAFNGWVMPVLMYSFGILKWTQTELDALDRRVRTLLTANRMHHPRSSVMRLYIPRKCGGRGFLNAKTLHNREVCSLREYFLETDVGMHRDVVAVDKGLTPLSLASENWRKPIVMDTNERKEVWKGKELHGRFYRTLHGPDVDLLASVSWLRFGNLFGETEGFVFAIMDEVMMTNNYRKYIVKDGTVDICRACHRPGESIRHIISGCSHLANGDYLHRHNLVARIIHQQLALKYNLVESEVPYYRYVPDPVLENGSVTLYWDRSIITDRTIVANKPDIVVIDRLERRTMIVDIAVPHDENLVKAEKDKQTKYLDLAREVVDMWKVDRAIIVPIVVTANGLIAKSLDQHLRRLSLGSWIKGLIQKAVLLDTARIVRRFLSQEP

SEQ ID NO: 11186 - protein, 1200 aa, Mythimna ferrago
MLTRSRAQQLNTHLTTSGSSLSSASQPPGPAPAVSPEIPVAAVASSSSDEYFSPPTTPPPTRRRGRGRPPACLGPRGPPASDRVPAAGGSVQRMRWTQSINENVMRSYFGATEGGTNLTAYRGRMLSLFQVLEPAVNVSAQRLSDQVRVIQRNRMLDDAVLDRLRLESRNGRVSPVSPPAAVQRQLSVSPRPDHVGEDDDDGAISVSTQCNARLRSALEDAFREYRSIPPELRPRLPRLPMHRKNRALVCALDSQLSNCFDSSEDLTDTHSILYCAAAAACRVAHVKIPNSDRATRPAKPAWQCRIERRIGEARALIGKLICFREGNTRPRVMRFVRRAFSGTDISPRDYLPRITERIDFLRQKVYAWANRIRRYKRRVERYTQNRAFQSNERWVYRAWERPDQSVIDTHLPDDDAMYSFWRSIWSVPVNHTEGDWTREVERECELIPEMGAITISPQDVARAVRPLPNWKSPGPEGLHNFWLKWFKSSHARLASQFQSALESGSLPQFLTTGITHLLYKSGSTAEPKNYRPITCLPTVYKVLTSILRAKINSHIETNSIMSASQNGCRNGSRGTKELLLIDVAISQQVRRSRRDLSTCWIDYKKAYDSVPHTWLMRVLELYKIDVTLRTFLMSCMGQWRTVLHYPGCRRVSENSKPLRIERGIFQGDSLSPLWFCLALNPLSTLLEGSGLGYRLRREGQVISHLLYMDDLKLFASNNLQLMELLKVTETFSSAIRMEFGLDKCAVMHVKRGEIMESVGTQLSDSIHLRSLCSTETYKYLGMSEALGINAADVKQSLRERFFGRLNKVLKSLLSGGNKVRAFNGWVMPVLMYSFGILKWTQTELDALDRRVRTLLTANRMHHPRSSVMRLYIPRKCGGRGFLNAKTLHNREVCSLREYFLETDVGMHRDVVAVDKGLTPLSLANENWRKPIVMDTNERKEVWKGKELHGRFYRALHGPDVDLLASVSWLRFGDLFGETEGFVFAIMDEVMMTNNYRKYIVKDGTVDICRACHRPGESIRHIISGCSHLANGDYLHRHNLVARIIHQQLALKYNLVESEVPYYRYVPDPVLENGSVTLYWDRSIITDRTIVANKPDIVVIDRLERRTMIVDIAVPHDENLVKAEKDKQTKYLDLAREVVDMWEVDRAIIVPIVVTANGLIAKSLDQHLRRLSLGSWIKGLIQKAVLLDTARIVRRFLSQEP

SEQ ID NO: 11187 - protein, 962 aa, Mythimna ferrago
MCNKNRALVAALDSQLSNYFDDCEDLTDTHSIMYCAAVAACRVAHVKFPNTDVATRPKPAVPAWQCRIERRIGGARALIGKLICFREGNTRPRVMRFVRRAFSGTDISPRDYMSRVTERIDFLKQKVYAWANRIRRYKRRVERYIQNSTFRSNERWVYRTWERPDQGVTDTHLPDDDAMCSFWRNIWSVPVSHTEGGWTREVERACESITEMGAITISPQDVARAARPLPNWKSPGPDGLHNFWIKWLQRSHARLASQYQTALESGSLPEFLTTGVTHLLHKSGSTAEPKNYRPITCLPTVYKVLTSILRAKINNHVDNNAIMSASQNGCRNGSRGTKELLLIDMAISQQVRRSRKDLSTCWIDYKKAYDSVSHTWLMRVLELYKVDATLCTFLMSCMRQWRTVLRYPGCRNIQRNSEPVRIERGIFQGDSLSPLWFCLALNPLSTLLENSGLGYRLKRGGQVISHLLYMDDLKLFAPNNLQLMELLKVTETFSSAIRMEFGVDKCAVMHIKRGEIVESVGTQLSDSIHLRSLSPTETYKYLGMSEALGINATDMKQSLKERFFGRLKKVLNSLLSGGNKVRAFNGWVMPVLMYAFGVLKWTQTELDALDRKVRTLLTAYRMHHPRSSVMRLYIPRKCGGRGFLNAKTLHNREVCSLREYFLAADVGMHRDVVAVDKGLTPLSLANENWRKPVVLDTNVRKEVWQSKELHGRFFRALHEPGVDQLASVAWLRVGDLFGETEGFVCAIMDEVIMTNNYRRFIVKDGTVDICRACHRPGESIRHIISGCSRLANGEYLHRHNLVARIIHQQLALKYSLVESEVPYYRYVPDPVLDNGDITLYWDRSIITDRTIVANKPDIVVVDRSERRAMIVDISVPHDENLAKAEKDKQIKYIDLAREVVDMWEVDSAIIVPIVVSANGLIAKSLDQHLRRLSLGDWIKGLIQKAVLLDTARIVRRFLSLEP

SEQ ID NO: 11188 - protein, 962 aa, Acronicta aceris
MNNKNLALVCALDSLLSDYFDSSEDLADTHSILYCAAVAACRVAHVKFPESDRATRPKPMIPAWQSRIEQRIGEARALIGKLICFREGNTRPRVMRFVRRAFSGTNIDPRDYASCVTERIDFLKQKVYAWANRIRRYKRRAERYSLNRAFQGDQRWVYRTWDRPDNGVSDVCRPNDDAMSLFWRNIWSVPVNHTEDDWICDVERACESLPAMEEINISPQDVACAVHSVPNWKAPGPDGLHNFWIKWLRSSHARLASQFQSSLESGTLPQFLTTGITHLLHKSGDTADPKNYRPITCLPTVYKLLTSILRAKICYHIDESSIMSASQNGCRNGSRGTKELLLIDMTISQQVRRLRKNLSTCWIDYKKAYDSVPHTWLMRVLELYKVDVSLRTFLRSCMGQWRTVLHYPGCRQIQRISEPIRIERGIFQGDSLSPLWFCLALNPLSTLLEESRLGYRLRRGGQVISHLLYMDDLKLFASSDLHLMELLKITENFSNSIRMEFGVEKCAVMHVKRGGIVESVGIQLSDSTQLRSLASTETYKYLGMAEALGINVADMKQSLQVRFFGRLTKVLKSLLSGGNKVRAFNGWVMPVLMYSFGVLKWTQTELETLDRKVRTLLTAYRMHHPRSSVMRLYIPRKCGGRGFLNAKNLHNREVCSLREHFLKTEMGMHRDVVAVDNGLTPLSMAKENWRKPVVLSTNDRRNVWQGKELHGRYYRALHEPGVDTLASVSWLRFGDLFGETEGFVCAIMDEVMMTNNYRKFIVKDGTVDICRACHRPGESIRHIISGCSRLANGEYLHRHNLVARIIHQQLALKYNLVESEVPYYKYVPDPVLENGHATLYWDRSIITDRTIIANKPDIVVIDRLERRAMIVDITVPHDENLFKAEKEKEIKYLDLAHEVVDMWGVDATIIVPIVVSANGLIAKSLDRHLKRLSLGGWIKGLIQKAVLLDTARIVRRFLSLGP

SEQ ID NO: 11189 - protein, 975 aa, Eilema sororculum
MPVHVRPRLPRLPIHRRNIALVSALDSLLPRYLENSENLGDTHSILYCTAVAACRMAGAKFPIKDPAIRPKSAIPAWQCRIERRVTEARVLIGKLNCFRSGNTRPRVMRYVTRAFAGTDISPQDYTSRVTERIDFLKQKVYAWANRIRRYKKRVDRYTVNRMFQRDQRWVYRSWERTEESVDDVRRPDAEVTNAFWRSIWSVPVSHTEGDWMHEVERACETIPEMEEINIDAIDVDCAVRSLSNWKSPGPDGLHNFWLKWLRSSHVVLASQFQSAVESGTLPAFMTTGVTHLLHKTGSTLEPNNYRPITCLPTVYKLLTSILRAKINNHINNNSIMCASQNGCRNGARGTKELLLIDMAISQQARRNRKDLTACWIDYKKAFDSVPHTWLLRVLELYKVNTTLCTFLRSCMGQWRTVLFYPGCRQALGGGVPITIERGIFQGDSLSPLWFCLALNPLSTLLVNSGLGYRLRREGQMVSHLFYMDDLKLFAHTNPQLITLLKITETFSNSIKMAFGVDKCAVIHVKRGRVVESEGIQLSDSTNLRSLLVTETYKYLGMSQALCINEVDMKQMLQERFFGRLKKVLNSLLSGGNKVRACNSWVMPLLMYSFGILKWTQTELDTIDRKVRTQLTAFRMHHPRSSVMRLYIPRKCGGRGFLNAKTLHNREVCNLRDYFLKSNVDMHRDVVNVDTGLTPLGLAKENWRRPTIVSTDSRREVWQSKELHGRFYRALHRPEVDLLASVSWLRFSDLFGETEGFVCATADEVIKTNNYRKYIMRDGTIDICRACHQPGESLRHITSGCSRLANGEYLHRHNQVARIIHQRLALKYNLVEVEVPYYRYVPEPVLENSHITLYWDRSIITDRTVVANKPDIVVIDRSERRALIVDVTIPHDENLVKAEKDKQVKYLDLAHEVVDMWNVDSAIIVPIVVSVNGLIAKSLDQHLKRLGLDGWVRGQMQKAVLLDTARIVRKFLSLEP

SEQ ID NO: 11190 - protein, 1193 aa, Eilema sororculum
MLTRAQANRNKSAPITSPDSSLSSAAQPPAVEPAASSSSSSDEFFSPPTSPTPERRPGRGRPPTCLGPRGPPASNRAPATGGNVRRMRWTSSMNENVMRAYFAATEGGTNLTAYRVRMLPLFQVLEPGVNVSAQRLSDQVRVIQRNQLLDGDALERLRLECLRSNPVISPTPALLQSESTQVLNSVNVVGDDRVITVVTECNEEVKVALECAIREYRSMPINIRPRLPRLPMHKKNLMLMSALDSLLPVYFDSSESLSDTHSILYCAAVAACRLARVKFSAHAPAPRQKPAVPAWQRRIEERIAEARVLIGKLTCFRSGNARPRVMRFVNRAFSGTGISPPEYIARVTERIDLLKQKIYAWANRVRRYKKRVDRFSVNRTFQRDQRWVYRSWDRPNKDVSSGCLPSADETNMFWRSIWSAPVAHVEGDWTRDVERACAGIPDMEFVNIDDSDVASAVRPLSNWKSPGPDGLHNFWIKWLRSSHARLASQFQAAIESGSLPIFMTTGVTHLLHKTGSTSNPSNYRPITCLPSVYKLLTSILRDKITKHISTNTVMSASQNGCRSGARGTKELLLIDMAISQQVRRSRKNLSICWIDYKKAFDSVPHTWLLRVLELYKVDTTLCIFLASCMRQWRTVLSYPGCREVCSNGEPINIERGIFQGDSLSPLWFCLALNPLSTLLGNSGLGYRLRGGGQIISHLLYMDDLKLFATSSSQLVDLLKITKSFSDSIKMEFGVDKCAVMHVKRGRTVESEGIQLSDAIHLKSLLVTDTYKYLGMSQALGINEADMKQSLRERFFGRLKKVLNSLLSGGNKVRAYNGWVMPLLIYSFGILKWTQTELDAIDRRVRTLLTTYRMHHPRSSVMRLYIPRKCGGRGFLNAKNLHNREVYNLREYFLRVNEDMHRDVVAVDVSLTPLKLAKENWCKPVVLSISDRQEVWQSKELHGRFYRALHGPDVDLLASVAWLRFGDLFGETEGFACAIADEVIMTKNYRKYILRDGTVDICRACHQPGESLRHIVSGCSRLANSEYLHRHNQVARIIHQQLALLYQLVDAEVPYYRYVAEPVLENGHITLYWDRSIITDRTVVANKPDIVVIDRSERRAMIVDVTIPHDENLVKAEKDKQIKYLDLAHEIVDMWEVDSAIIVPIVITVNGLVAKSLDQHLKRLALGSWIKGLIQKAVLLDTARIVRKFLSLEP

SEQ ID NO: 11191 - protein, 1106 aa, Eilema sororculum
MRWTNSINENVMRAYFAATEGGTNLSAYRTRMLPLFQALEPSINVSAQRLSDQVRVIQRNRMLNETVLETLRLECLRNICVTPAPVPVPASTVELNDDTCVAPDDTPIPVSIQYNEEIKEALECALREYRSMPVHVRPRLPRLPIHRRNIALVSALDSLLPRYLENSENLGDTHSILYCTAVAACRMAGAKFPIKDPAIRPKSAIPAWQCRIERRVTEARVLIGKLICFRSGNTRPRVMRYVTRAFAGTDISPQDYTSRVTERIDFLKQKVYAWANRIRRYKKRVDRYTVNRMFQRDQRWVYRSWERTEESVDDVRRPDAEVTNAFWRSIWSVPVSHTEGDWMHEVERACETIPEMEEINIDAIDVDCAVRSLSNWKSPGPDGLHNFWLKWLRSSHVVLASQFQSAVESGTLPAFMTTGVTHLLHKTGSTLEPNNYRPITCLPTVYKLLTSILRAKINNHINNNSIMCAYQNGCRNGARGTKELLLIDMAISQQARRNRKDLTACWIDYKKAFDSVPHTWLLRVLELYKVNTTLCTFLRSCMGQWRTVLFYPGCRQALDGGVPITIERGIFQGDSLSPLWFCLALNPLSTLLVNSGLGYRLRREGQMVSHLFYMDDLKLFAHTNPQLIALLKITETFSNSIKMAFGVDKCAVIHVKRGRVVESEGIQLSDSTNLRSLLVTETYKYLGMSQALCINEVDMKQMLQERFFGRLKKVLNSLLSGGNKVRACNSWVIPLLMYSFGILKWTQTELDTIDRKVRTQLTAFRMHHPRSSVMRLYIPRKCGGRGFLNAKTLHNREVCNLRDYFLKSNVDMHRDVVNVDTGLTPLGLAKENWRRPTIVSTDSRREVWQSKELHGRFYRALHRPEVDLLASVSWLRFSDLFGETEGFVCAIADEVIKTNNYRQYIMRDGTIDICRACHQPGESLRHITSGCSRLANGEYLHRHNQVARIIHQRLALKYNLVEFEVPYYRYVPEPVLENTHITLYWDRSIITDRTVVANKPDIVVIDRSERRALIVDVTIPHDENLVKAEKDKQVKYLDLAHEVVDMWNVDSAIIVPIVVSVNGLIAKSLDQHLKRLGLDGWVKGQMQKAVLLDTARIVRKFLSLEP

SEQ ID NO: 11192 - protein, 922 aa, Eilema sororculum
MSLAGAKFPIKDPAIRPKFTIPAWQCRIERRVAEARVLIGKLICFRSGNTRPRVMRYVTRAFAGTDISPQDYTSRVTERIDFLKQKVCAWANRIRRYKKRVDRYTVNRMFQRDQRWVYRSWERTDESVDDVRRPDAEATNAFWRSIWSVPVSHTEGDWMREVERACETIPAMEEIYIDATDVDCAVRSLSNWKSPGPDGLHNFWLKWLRSSHVVLASQFQSAIESGTLPAFMTTGVTHLLHKTGSTLEPNNYRPITCLPTVYKLLTSILRAKINNHINNNSIMCASQNGCRNGARGTKELLLIDMAISQQARRNRKDLTACWIDYKKAFDSVPHTWLLRVLELYKVNTTLCTFLRSCMRQWRTVLFYPGCRQALGGGVPITIERGIFQGDSLSPLWFCLALNPLSALLVNSGLGYRLRREGQMVSHLFYMDDLKLFAHTNPQLIALLRVTETFSNSIKMAFGVDKCAVIHVKRGRVVESEGIQLSDSTNLRSLLVTETYKYLGMSQALCINEVDMKQLLQERFFGRLKKVLNSLLSGGNKVRACNSWVMPLLMYSFGILKWTQTELDTIDRKVRTQLTAFRMHHPRSSVMRLYIPRKCGGRGFLNAKTLHNREVCNLRDYFLKSNVDMHRDVVNVDTGLTPLGLAKENWRRPTIVSTDSRREVWQSKELHGRFYRALHRPEVDLLASVAWLRFSDLFGETEGFVCAIADEVIKTNNYRKYIMRDGTIDICRACHQPGESLRHITSGCSRLANGEYLHRHNQVARIIHQRLALKYNLVEVEVPYYRYVPEPVLENSHITLYWDRSIITDRTVIANKPDIVVIDRSERRALIVDITIPHDENLVKAEKDKQVKYLDLAHEVVDMWNVDSAIIVPIVVSVNGLIAKSLDQHLKRLGLDGWVKGQMQKAVLLDTARIVRKFLSLEP

SEQ ID NO: 11193 - protein, 1113 aa, Ptilodon capucinus
MRWTSSINENVMRAYYEATEGGTNLTAYRNRMLPLFQSLEPAVNVSAQRLSDQVRVIQRGNMLADTVLDRLRSEMQSRRVVPVASSQPAAQPVASATVTSRLAADSDVDRDNAPIDVSNQYNDLLRSTLEDVVRVYRSMPNHLRPRIPRLPMHKGNRALVGALDSLLSIYFDSSDNLADTHSILYCAAITVCRVARVKVFNTDTATRPKPAVPAWQCRIERRISEARALIGKLSCFREGNTRPRVMRFVKRAFAGTDVSPREYISRVTERIDFLKQKIYAWANRIRRYKVRVDRYSQNSMFQRDQRWVYRSWERPNEPVSELQRPDDNAMTTFWRDIWSVPVTHYEGDWIGDVERMCEPIKEMEAISIGPLDVANAVRSLPNWKAPGPDGLHNFWLKWLRSSHVRLASQFQSALQSGSLPEFITTGVTHLLHKTGSTTDPKNYRPITCLPTIYKTLTSILRAKIARHVEDNSIMSASQNGCRSGSRGTKELLLIDMTICQQARRNRKDLSTCWIDYKKAYDSVPHTWLVRVLELYKIDTTLRTFLESCMRQWKTVLLCPGSRQILGNGEPIRIERGIFQGDSLSPLWFCLALNPLSTLLEESGFGFRLRRGGQVISHLLYMDDLKLFAPTALQLTGLLKVTETFSNSIRMEFGVDKCAVMHAKQGRLVESEGIQLSDSIQLRSLAATETYKYLGMSQGLAISETDMKQLLRDRFLGRLKKVLKSLLSGGNKVRAYNGWVMPVLMYSFGILKWTQTELDTLDRTVRTTLTAYRMHHPRSSVMRLYIPRKCGGRGFLNVKTLHNREICSLREYFLRADGEMHVDVVAVDNGLTPLSLAKENWRKPVVLTTDDRRLVWQGKELHGRYYRALHGPDVDLAASVAWLRFGDLFGETEGFVCAIMDEVVMTNNYRKYILRDGTIDICRACHRPGESLRHIISGCSRLANGQYLHRHNQVARIIHQQLALKYRLVTSEVPYYRYEPQPVLEEGHISLYWDRSIITDRTIVANKPDIVLIDRQERRAMIVDITVPHDENLVKAEKDKESKYLDLAHEVVDMWDIDAAIIVPIVVSAHGLLAKSLDKHLKRLALGGWIKGQIQKAVLLETARIVRKFLSLEP

SEQ ID NO: 11194 - protein, 975 aa, Ptilodon capucinus
MPNHLRPRIPRLPMHKGNRAIVGALDSLLSIYFDSSDNLADTHSILYCAAITVCRVARVKVFNTDTATHPKPAVPAWQCRIERRISEARALIGKLSCFREGNTRPRVMRFVRRAFAGTDVSPREYISRVTERIDFLKQKIYAWANRIRRYKVRVDRYSQNSMFQRDQRWVYRSWERPNEPVSELQRPDDNAMTTFWRDIWSVPVTHYEGDWIGDVERMCEPIKEMEAISIGPLDVANAVRSLPNWKAPGPDGLHNFWLKWLRSSHVRLASQFQSALQSGSLPEFITTGVTHLLHKSGSTTDPKNYRPITCLPTIYKTLTSILRAKIARHVEDNSIMSASQNGCRSGSRGTKELLLIDMTICQQARRNRKDLSTCWIDYKKAYDSVPHTWLVRVLELYKIDTTLRTFLESCMRQWKTVLLCPGSRQILGNGEPIRIERGIFQGDSLSPLWFCLALNPLSTLLEESGFGFRLRRGGQVISHLLYMDDLKLFAPTALQLTGLLKVTETFSNSIRMEFGVDKCAVMHAKQGRLVESEGIQLSDSIQLRSLAATETYKYLGMSQGLGISETDMKQLLRDRFLGRLKKVLKSLLSGGNKVRAYNGWVMPVLMYSFGILKWTQTELDTLDRTVRTTLTAYRMHHPRSSVMRLYIPRKCGGRGFLNVKTLHNREICSLREYFLRADGEMHADVVAVDNGLTPLSLAKENWRKPVVLTTDDRRLVWQGKELHGRYYRALHGPDVDLAASVAWLRFGDLFGETEGFACAIMDEVVMTNNYRKYILWDGTIDICRACHRPGESLRHIISGCSRLANGQYLHRHNQVARIIHQQLALKYRLVTSEVPYYRYEPQPVLEEGHISLYWDRSIITDRTIVANKPDIVLIDRQERRAMIVDITVPHDENLVKAEKDKESKYLDLAHEVVDMWDIDAAIIVPIVVSAHGLLAKSLDKHLKRLALGGWIKGQIQKAVLLETARIVRKFLSLEP

SEQ ID NO: 11195 - protein, 940 aa, Ptilodon capucinus
MEEGEGGLCPAVGRYRLIIIIISVKVFNTDTTTRPKPAVPAWQCRIERRISEARALIGKLSCFREGNTRPRVMRFVKRAFAGTDVSPREYISRVTERIDFLKQKIYAWANRIRRYKARVDRYSQNSMFQRDQRWVYRSWERPNEPVSELQRPDDNAMTTFWRDIWSVPVTHYEGNWIGDVERMCEPIKEMEAISIGPLDVANAVRSLPNWKAPGPDGLHNFWLKWLRSSHVRLASQFQSALQSGSLPEFITTGVTHLLHKTGSTTDPKNYRPITCLPTIYKTLTSILRAKIARHVENNSIISASQNGCRSGSRGTKELLLIDMTICQQARRNRKDLSTCWIDYKKAYDSVPHTWLVRVLELYKIDTTLRTFLESCMRQWKTVLLCPGSRQILGNGEPIRIERGIFQGDSLSPLWFCLALNPLSTLLEESGFGFRLRRGGQVISHLLYMDDLKLFAPTALQLSGLLKVTEAFSNSIRMEFGVDKCAVMHAKQGRMVESEGIQLSDSIQLRSLAATETYKYLGMSQGLGISETDMKQLLRDRFLGRLKKVLKSLLSGGNKVRAYNGWVMPVLMYSFGILKWTQTELDALDRTVRTTLTAYRMHHPRSSVMRLYIPRKCGGRGFLNVKTLHNREICSLREYFLRADGEMHVDVVAVDNGLTPLSLAKENWRKPVVLTTDDRRVVWQGKELHGRYYRALHGPDVDLAASVAWLRFGDLFGETEGFVCAIMDEVVMTNNYRRYILRDGTIDICRACHRPGESLRHIISGCSRLANGQYLHRHNQVARIVHQQLALKYRLVTSEVPYYRYEPQPVLEEGHITLYWDRSIITDRTIVANKPDIVLIDRQERRAMIIDITVPHDENLVKAEKDKESKYLDLAHEVVDMWDIDAAIIVPIVVSAHGLLAKSLDKHLKRLALGSWIKGQIQKAVLLETARIVRKFLSLEP

SEQ ID NO: 11196 - protein, 1198 aa, Agrochola circellaris
MLTRSATRRARLLPPDSSLSSASPPPVPSPTVSAGTTPAAAVASSSSDEYFSPPTTPPPARRRGGHRPPVGLGPRGPPASDRVPAPGGSVQRMRWTQSINENVMRSYYGATEGGNNLTAYRVRMLSLFQVLEPAVNVSAQRLSDQVRVILRNHMLDDTVLDRLRSEMRNSHATAPPSQTVMVAPQFTINQVDEGIDDMATNVSTQYNEELRSALERAIREYRSMSPELRPRLPRLPMHNKNRALVAALDSQLSNYFDDCEGLTDTHSILYCAAVAACRVAHVKFANDSRATRPKPAVPAWQCRIERRIGGARALIGKLICFREGNTRPRVMRFVRRAFSGTDISPEDYVSRATERIDFLKQKVYAWANRIRRYKRRVERYTQNRTFQSDERRVYRAWEQPDQGVADARLPDDDAMCSFWRSIWSAPVSHTEGDWTREVERACDPIPEMGAITICPQDVARAVRPLPNWKSPGPDGLHNFWIKWFKRSHARLAAQYQTALESGSLPEFLTTGVTHLLHKSGSTADPKNYRPITCLPTVYKVLTSILRAKINKHIDTNSIMSASQNGCRNGSRGTKELLLIDMTISQQVRRSRKDLSTCWIDYKKAYDSVPHTWLMRVLELYKVDATLRTFLLSCMGQWRTVLRYPGCRNIQRNSEPIRIERGIFQGDSLSPLWFCLALNPLSTLLEGSDLGYRLRRGGQVISHLLYMDDLKLFAPNNFQLMELLKVTETFSRAIRMEFGVDKCAVMHVKRGEIVESVGTQLTDSINFRALSASETYKYLGMSETLGINVTDMKQSLKERFFGRLKKVFNSFLSGGNKVRAFNGWVMPVLMYSFGVLKWTQTELDALDRRVRTLLTGYRMHHPRSSVMRLYIPRKCGGRGFLNAKTLHNREICSLREYFLEADVGMHRDVVAVDKGLTPLSLAKENWRKPAVLDTNDRREVWQNKELHGRYFRALHGPDVDLLASVAWLRFGDLFGETEGFVCAIMDEVMMTNNYRRFIVKDGTVDICRACHRPGESIRHIISGCSRLANEEYLHRHNLVARIIHQQLALKYSLVESEVPYYRYVPDPVLERGHITLYWDRSIITDRSIVANKPDIVVVDRAERRTMIIDITVPHDGNLVKAEKDKQIKYLDLAREVVDMWDVDSAIIVPIVVSANGLIAKSLDQHLRRLSLGGWIKGLIQKAVLLDTARIVRRFLSLEP

SEQ ID NO: 11197 - protein, 1201 aa, Hydraecia micacea
MLTRSAAARRARLPPPDSSLSSASPPAPLVSSPTVSAVTAPAAAVASSSSDEYFSPPTTPPPARRRGGRRPPDSLGPRGPPASDRVPAPGGSVQRMRWTRSINENVMRSYYGATEGGSNLTAYRVRMLSLFQVLEPAVNVSAQRLSDQVRVIQRNHMLDDTVLDRLRNEIQSSHAIAPQSQTAVILPQSNTSHADEGSNDRATNVSTQCNEELRSALEDAIQEYRFMSPELRPRLPRLPMHNKNRALVAVLNSQLSKYFDDCEDLTDTHSILYCAAVAACRVAHVKFTNDSRATRPKPAVPAWQCRIERRIGGARALTGKLICFREGNTRPRVMRFVRRAFLGTDISPQDYTSCVTERIDFLKQKVYAWANRIRRYKRRVERYTQNRTFQSDERWVYRDWERPDQSVADTCLPDDDAMCSFWRSIWSVPVSHTEGDWARDVERACDPIPEMEAITICPQDVARAVRPLPNWKSPGPDGLHNFWIKWFSRSHARLASQFQTALESGSLPQFLTTGITHLLHKSGSTAEPKNYRPITCLPTVYKVLTSILRAKINKHIDTNFIMSASQNGCRNGSRGTKELLLIDMTISQQVRRFRKDLSTCWIDYKKAYDSVPHTWLMRVMELYKVDTTLRTFLMSCMGQWRTVLRYPGCRNIQRNSEPIRIERGIFQGDSLSPLWFCLALNPLSTLLEDSGLGYRLRRGGQVISHLLYMDDLKLFAPNNLQLMELLKVTQTFSNAIRMEFGVDKCAVMHVKRGEIVESVGNQLSDSTNLRALSASETYKYLGMSEALGINVTDMKQSLKERFFGRLKKVLNSLLSGGNKVRAFNGWVMPVLMYSFGILKWTQTELDALDRRVRTLLTANRMHHPRSSVMRLYIPRKCGGRGFLNSKTLHNREICSLREYFLETDVGMHRDVVMVDKGLTPLSLAKENWRKPVVLDTNDRMEVWQSKELHGRFFRALHGPDVDLLASVAWLRFGDLFGETEGFVCAIMDEVMMTNNYRRFIVKDGTVDICRACHRPGESIRHIISGCSRLANGEYLHRHNLVARIIHQQLALKYSLVESEVPYYRYVPDPVLENGNITLYWDRSIITDRTIVANKPDIVVVDRSERRAMIVDITVPHDENLVKAEKDKQIKYLDLAREVVDMWDVDSAIIVPIVVTANGLIAKSLDQHLRRLSLASWIKGLIQKAVLLDTARIVRRFLSLEP

SEQ ID NO: 11198 - protein, 1203 aa, Hydraecia micacea
MLTRSRARRLPTTHPTSSGSSLSSASQLPEPAPDVSPVSPAAAVASSSSDEYFSPPTTPPPVCRRGRGRPPASLGLRGPPASERVPAPGGSVQRMRWTQTVNENVMRAYFGATEGGSNLTAYRGRMLSLFQVLEPAVNVSAQRLSDQVRVIQRNHMLDNVVLDRLRLESRNSHVTPASSLVAVQLQPSVPLRPDCVDVEDDDEAISVSSQCNARLRSALEDAFREYRSIPPGLRPRLPRLPMHKKNKALVCALDSQLSNCFNDSKDLADTHSILYCAAVAACRVAHVKFPNSDRAPRPKPAVPAWQCRIECRIGEARALIGKLICFREGNTRPRVMRFVRRAFSGTDISSRDYLSHVTERIDFLKQKICAWANRIRRYRRRVERYTQNRRFQSDERWVYRAWERPDQGVTDTRLPDDDAMCSFWRNIWSVPVSHTEGDWTGKIERACDLIPEMEALIISPQDVARAVRPLPNWKSPGPDGLHNFWIKWFKRSHDRLASQFQSALESGSLPQFLTTGITHLLYKSGSTADPKNYRPITCLPTVYKVLTSILRTKINKHIDTNSIMSVSQNGCKNGSRGTKELLLIDMTINQQVRRSRKDLSTCWIDYKKAYDSVPHTWLMRVLELYKVDTTLCTFLMSCMGQWRTVLRYPGCRNIQRNSEPIRIERGIFQGDSLSPLWFCLALNPLSTLLEDSGLGYRLRRGGQVISHLLYMDDLKLFAPNNLQLMELLKITETFSSAIRMEFGVDKCAVMHVKRGEIVESVGNQLSDSTNLRALSASDTYKYLGMSEALGINVTDMKRSLKERFFGRLKKVFNSLLSGGNKVRAFNDWVMPVLMYSFGILKWTQTELDALDRKVRTLLTANRMHHPRSSVMRLYIPRKCGGRGFLNAKTLHNREICSLREYFLETDVGMHRDVVVVDNGLTPLSLGKENWRKPVVLDTNDRMEVWQSKELHGRFFRALHGPDVDLLASVAWLRFGDLFGETEGFVCAIMDEVMMTNNYRRFIVKDGTVDICRACHRPGESIRHIISGCSRLANGEYLHRHNLVARIIHQQLALKYSLVESEVPYYRYVPDPVLENGNITLYWDRSIITDRTIVANKPDIVVVDRSERRAMIVDITVPHDENLVKAEKDKQIKYLDLAREVVDMWDVDSAIIVPIVVTANGLIAKSLDQHLRRLSLASWIKGLIQKAVLLDTARIVRRFLSLEP

SEQ ID NO: 11199 - protein, 1198 aa, Eupsilia transversa
MLTRSRARQNTHPTSSGSSLSSASQLPEPVTDVSPVIPAAAAASSSSDEYFSPPSTPPPVRRRGRGRPPASLGPRGPPASDMVPAPGGSVQRMRWTQTINENVMRAYFGATEGGSNLTAYRGRMLSLFQVLEPAVNVSAQRLSDQVRVIQRNHMLDDSVLDRLRIEMQSSHVIAPPSRTVVAPLQSNSDRADVGSHDRATNVSTQCNEELRSALEDAIREYRFMSPELRPRLPRLPMHNKNRALVAVLDPQLSNYFDDCENLTDTHSILYCAAVVACRVAHVKFTNDSGATRPKSVVPAWQCRIERRIGEARTLIGKLFCFREGNTRPRVMRFVRRAFSGTDISPQDYMARVTERIDFLKQKVYAWANRIRRYKRRVDRYTQNRTFQSDERWVYRAWEQPDQGVTDTHLPDDNAMCSFWRSIWSVPVSHTEGDWTREVERACDPIPEMGAITICPQDVARAVRPLPNWKSPGPDGLHNFWIKWFQRSHARLAAQYQAALESGSLPQFLTTGVTHLLHKSGSTAEPKNYRPITCLPTVYKVLTSILRAKINKHIDTNSIMSVAQNGCKNGSRGTKELLLIDMAISQQVRRSRKDLSICWIDYKKAYDSVPHTWLMRVLELYKVDATLRTFLMACMGQWRTVLRYPGCRNIQRNSEPIRIERGIFQGDSLSPLWFCLALNPLSTLLEDSGLGYRLRRGGQVISHLLYMDDLKLFAPNNLQLMELLKVTETFSSAIRMEFGVDKCAVMHVKRGKIVESVGAQLSDSINLRALSATETYKYLGMSEALGINVTDMKQSLKERFFGRLKKVFNSLLSGGNKVRAFNGWVMPVLMYSFGILKWTQTELDALDRRVRTLLTAYRMHHPRSSVMRLYIPRRCGGRGFLNAKTLHNREICSLREYFLETDVGMHRDVVAVDKGLTPLSLAKENWRKPVVLDTNDRSEVWQSKELHGRFFRALHGPDVDLLASVAWLRFGDLFGETEGFVCAIMDEVIMTNNYRRFIVKDGTVDICRACHRPGESIRHIISGCSRLANEEYLHRHNLVARIIHQQLALKYSLVESEVPYYRYVPDPVLENGNITLYWDRSIITDRTIVANKPDIVVVDRIERRTMIIDITVPHDGNLVKAEKDKQIKYLDLAREVVDMWDVDSAIVVPIVVTANGLIAKSLDQHLRRLSLGSWIKGLIQKAVLLDTARIVRRFLSLEP

SEQ ID NO: 11200 - protein, 1198 aa, Amphipyra tragopoginis
MLTRARSKAARPPPPDSPLSSASQPPELGPPVTPAAAAASSSSDEYFSPPTSPRPVRRQGRHRPPTSLGPRGPPAPSRVLATGGCVQRMKWTESINENVMRAYYGSTEGGTNLTAYRVRMLTLFRELEPAINVSAQRLSDQVRVIQRNHRLDDAALDRLRLEVQNSRVTPFPSQTAVHEVNINIVPPRSDYVDGDMDDRAVTVSSQYNDQLRSALEDAIREYRANPELRPRLPRLPMHNKNRALVCALDSLLSSYFESSEDLGDTHSILYCAAVAACRVANVKFNNSERATRPKPAVPAWQCRIERRIDGARALIGKLICFREGNTRPRVMRFVRRAFSGTGISPREYMSQVTERIDFLKQKVCAWASRIRRYKRRVERYTQNRMFQCDQRWVYRAWERPDQGVSDGRLPDDDAMNSFWRSIWSVPVIHTEGDWMRDIERACEPIEEMGEILISPQDVASAARPLPNWKSPGPDGLHNFWIKWLRSSHARLATQFQSSLESGSLPQFFTTGVTHLLHKSGSTAEPKNYRPITCLPTVYKLLTSILRSKINTHIENNSVMSSAQNGCRNGSRGTKELLLIDMAISQQVRRSRKNLSTCWIDYKKAYDSVPHTWLMRVLELYKINATLRTFLMSCMGQWRTVLRYPGCRPIRESGEPIRIERGIFQGDSLSPLWFCLALNPLSTLLEGSGLGYPLRRGGQVVSHLLYMDDLKLFAPTKLQLVGLLKVTETFSNSIRMEFGVDKCAVMHVRRGGIMESEGLQLSDSIHLRPLSANDTYKYLGMSEGLGISEADMKQSLRERFFGRLKKVLKSLLSGGNKVRAFNGWVMPVLMYSFGILKWTQTELDALDRRVRSLLTANRMHHPRSSVMRLYIPRKCGGRGLLNAKTLHNREVCSLREYFLHADAGMHRDVVAVDKGLTPLNLAKENWRKPVVLSTNDRREIWQSKELHGRFYRALHGPDVDFQASVSWLRFGDLFGETEGFVCAIMDEVIMTNNYRKYIVKDGTVDICRACHCPGESLRHIISGCSRLANGEYLHRHNQVARIIHQQLALKYNLVESEVPYYKYVPDPVLENGHITLYWDRSIITDRTIVANKPDIVVIDRSERRTMIVDVTIPHDESLVKAEKDKQIKYLDLAHEVVNMWDVDSATIVPIVVTANGLMAKSLDQHLKRLSLGGWIKGLIQKAVLLDTARIVRRFLALEP

SEQ ID NO: 11201 - protein, 1206 aa, Amphipyra tragopoginis
MLTRSRAKAQNTRPPSSASSLSSASQPPEPASIVSDVTPAAAVASSSSDEYFSPATSPSPPPARRRGRGRPPTCLGPRGPPASDRVPAPGGSVQRMRWTQSMNENCMRAYFGATEGGTNLTAYRGRMLSLFQALEPAVNVSAQRLSDQVRVIQRDHRLDDAALDRLRSEMQNSHAAPLPSQIRTLTLVPPAVPLESNYADEEGEDRAISAGTQYSEIMRSALEDALREFRSTPPELRPRLPRLPMHNKNRALVCALDSLLPNVFESSEDLGDTQSILYCAAVAACRVAHVKFPNDNRATRPKSAVPAWQCRIERRIDEARVLIGKLTCFREGNRRPRVMRFVRRAFSGTDIGPGEYASRVTERIDFLKQKVYAWANRIRRYRRRVDRYTQNRIFQSDQRWVYRTWERPDQGVSDTHLPDNDVMNAFWRNIWSVPVTHTEGDWMQEVQRACEPIQEMGAVTIGPQDVTSAVRPMPNWKSPGPDGLHNFWIKWLRSSHARLASQFQSSLESGSLPAFLTTGITHLLFKSGSTAEPKNYRPITCLPTVYKLLTSILRAKLNHHIDSNAIMCATQNGCRNGSRGTKELLLIDMAISQQVRRSRKDLSTCWIDYKKAYDSVPHTWLMRVMELYKVNATLRTFLMSCMGQWRTVLHYPGCRQIQGNGELIRIERGIFQGDSLSPLWFCLALNPLSTLLEGSGLGYRLRRGGQVISHLLYMDDLKLFAPNNLQLVELLQVTETFSNSIRMEFGVDKCAVMHVKRGRIMESVGTQLSDSIRLRSLSSTETYKYLGMSEALGINEADMKQSLRERFFGRLIKVLKSLLSGGNRVRAFNGWVMPVLMYSFGILRWTQTELDALDRRVRTLLTAYRMHHPRSSVMRLYIPRKCGGRGFLNAKTLHNREVCSLREYFSQADVGMHRDVVAVDKGLTPLSLAKENWRKPVVLDAKGRMEVWRSKELHGRFYRALHGPDVDFLASVAWLRFGDLFGETEGFVCAIMDEVMMTNNYRKYIVKDGTVDICRACHCPGESIRHIVSGCSRLANGEYLHRHNLVARIIHQQLALKYNLVDTEVPYYRYVPDPVLENGHVTLYWDRSIITDRTIVANKPDIVVIDRLERRTMIVDITVPHDENLVKAENDKKIKYLDLAHEVVDMWDVDSAVIVPIVVTANGLIAKSLDQHLMRLSLGSWIKGLIQKAVLLDTARIVRKFLSLEP

SEQ ID NO: 11202 - protein, 1203 aa, Amphipyra tragopoginis
MLTRARARQKDARPRSPDSSLCSASQPPESSPPVSAVTPAAAVASSSSDEYFSPPSSPPPVRRRGGARPPACLGPRNQPASNRVPAAGGNVSRMRWTQSINENVMRAYYGATDGGINLTAYRDRMLSLFQVLEPAINVSTQRLSDQVRVIQRNRRLDDTVLERLRSETQNNRTVTSPAQSAVQPQLPAVPPRPSHADGEGDGEVIEVSNQCSDELRSALEGAILEYRTTPPELRPRLPRLPMHKKNRALVCALDSLLSNYFDGSEDLADTHSILYCAAIAACRVAHVKFTESDRATRPKPVVPAWQCRIERRIGGARALIGKLICFREGNTRPRVMRFVRRAFSGTDISPRDYMSRITERIDFLKQKVYAWANRIRRYKRRVERYTQNRTFQSDQRRVFRTWERPDPSGSDVRLPDDEAMGSFWRSIWSVPIAHTEGDWMRDIERACEPIPEMEAIIISPQDVAGAARPLPNWKSPGPDGLHNFWLKWLRSSHACLASQFQSSLESGSLPQFLTTGATHLLYKSGSTAKPKNYRPITCLPTVYKLLTSILRVKISNHIDNNSILSPSQNGCRSGSRGTKELLLIDMTISQQVRRSRKDLSTCWIDYKKAYDSVPHTWLMRVLELYKINTTLRTFLMSCMRQWRTVLRYPGCREIRGRGEPIRIERGIFQGDSLSPLWFCLALNPLSTLLEGTRLGYRLRREGQVISHLLYMDDLKLFAPTDLRLMELLKVTENFSSSIRMEFGVDKCAVMHVKRGGIVESEGIQISNSIQLRSLSPTETYKYLGMSEALGISEADMRQSLRERFFGRLNKVLRSLLSGGNRVRAFNGWVMPVLMYSFGILKWTQTDLEALDRRVRALLTVHRMHHPRSSVMRLYIPRKCGGRGFLNAKTLHNREVCSLREYFLQAEGEMHRDVVAVDKGLTPLALAKENWRKPAVLSTNDREEVWQSKELHGRFYRALHGPDVDFPASVSWLRFGDLFGETEGFVCAIMDEVMMTNNYRKYIVKDGTVDICRACHRPGESIRHIISGCSRLANGEYLHRHNLVARIIHQQLALKYNLVESEVPYYRYVPDPVLENGHATLYWDRSIITDRTIVANKPDIVVIDRSERRTMIVDITVPHDENLVKAEKDKQIKYLDLAHEVVGMWDVDSAVVVPIVVTANGLIAKSLDQHLKRLSLGGWIKGLLQKAVLLDTARIVRRFLSLAP

SEQ ID NO: 11203 - protein, 1201 aa, Amphipyra tragopoginis
MLTRSKARARNHHAHPPPPDSSPSSASQQQELDPAPPAAAVASSSSDEYFSPPSSPPPVRRRGGARPPASLGLRDRPAPNRVPAAGGNVSRMRWTQSINENVMRAYYGATEGGINLTAYRDRMLSLFQVLEPAINVSTQRLSDQVRVIQRNRRLDDAVLERLRSEEQNNRAVTPPVQAAEQPQLLAVSPRPIHVDGESDGAVINVSSQCSDELRSALECAILEYRATPPELKPRLPRLPMHKKNRALVCALDSLLSNYFDGSEDLGDTHSILYCAAIAACRVAHVKLTQNERATRPKPAVPAWQCRIERRIDGARALIGKLICFREGNTRPRVMRFVRRAFSGTDISPRDYMSRVTERIDFLKQKVYAWANRIRRYKRRVERYTQNRTFQSDQRRVYRTWERPVPGVSDMRLPDDDAMSSFWRSIWSVPVAHTEGDWMRDIERACETIPEMGEIVISPQDVATAARPLPNWKSPGPDGLHNFWIKWLRSSHACLASQFQSSLESGSLPQFLTTGVTHLLYKSGSTAEPKNYRPITCLPTVYKLFTSILRVKISNHIDNNYILSPSQNGCRSGSRGTKELLLIDMAISQQVRRSRKDLSTCWIDYKKAYDSVPHTWLMRVMELYKINTTLRTLLMSCMRQWRTVPRYPGCREILGRGEPIRIERGIFQGDSLSPLWFCLALNPLSTLLEGTRLGYRLRREGQVISHLLYMDDLKLFAPTDLQLMELLKVTENFSNSIRMKFGVDKCAVMHVKRGGIVESEGIQLSNSIQLRSLSPTETYKYLGMSEALGISEADMRQSLRERFFGRLNKVLKSLLSGGNKVRAFNGWVMPVLMYSFGILKWTQTDLDALDRRVRALLTVHRMHHPRSSVMRLYIPRKCGGRGFLNAKTLHNREVYSLREYFLQAEGEMHRDVVAVDRGLTPLALAKENWRKPVVLSTNDREEVWQSKELHGRFYRALHGPDVDFLASVSWLRFGDLFGETEGFVCAIMDEVMMTNNYRKYIVKDGTVDICRACHRPGESIRHIISGCSRLANGEYLHRHNLVARIIHQQLALKYNLVESEVPYYRYVPDPVLENGHATLYWDRSIITDRTIVANKPDIVVIDRSERRTMIVDITVPHDENLVKAEKDKQLKYLDLAHEVVAMWDVDSAVIVPIVVTANGLIAKSLDQHLKRLSLDGWIKGLIQKAVLLDTARIVRRFLSLEP

SEQ ID NO: 11204 - protein, 1142 aa, Amphipyra tragopoginis
MYSSQQNNNNNNNRGPPASDRVPAPGGSVQRMRWTQSMNENCMRAYFGATEGGTNLTAYRGRMLSLFQTLEPAVNVSAQRLSDQVRVIQRDHRLDDAALGRLRDEMQNSHATPPPSQIRTQPLVPPAVPLQPNHADEEEQDRAISAGTQYSEIMRSALEDALREFRSTPPELRPRLPRLPMHNKNRALVCALDSLLSNVLESSKDIGDTHSILYCAAVAACRVAHVKFPNDNRATRPKSTVPAWQCRIERRIDEARVLIGKLTCFREGNIRPRVMRFVRRAFSGTDVSPGEYVSRVTERIDFLKQKVYAWANRIRRYRRRVDRYTQNRIFQSDQRWVYRTWERPDQGVSDTHLPDNDVMNAFWRNIWSVPVTHTEGDWMQEVQRACEPIQEMGAVTIGPQDVTSAVRPMPNWKSPGPDGLHNFWIKWLRSSHARLASQFQSSLESGSLPSFLTTGVTHLLFKSGSTAEPKNYRPITCLPTVYKLLTSILRAKINNHIDNNAIMSDSQNGCRNGSRGTKELLLIDMAISQQVRRSRKDLSTCWIDYKKAYDSVPHAWLMRVLELYKINATLRTFLMSCMGQWRTVLHYPGCLQIQGNGELIRIERGIFQGDSLSPLWFCLALNPLSTLLEGSGLGYRLRRGGQVISHLLYMDDLKLFAPNNLQLVELLKVTETFSNSIRMEFGVDKCAVMHVKRGRIMESVGTQLSDAIHLRSLSSTETYKYLGMSEALGINEADMKQSLKERFFGRLIKVLKSLLSGGNKVRAFNGWVMPVLMYSFGMLRWTQTELDALDRRVRTLLTAYRMHHPRSSVMRLYIPRKCGGRGFLNAKTLHNREVCSLREYFSQADVGMHRDVVAVDKGLTPLSLAKENWRKPVVLDTNGRREVWRSKELHGRFYRALHGPDVDFLASVAWLRFGDLFGETEGFVCAIMDEVMMTNNYRKYVVKDGTVDICRACHCPGESIRHIVSGCSRLANGEYLHRHNLVARIIHQQLALKYNLVDTEVPYYKYVPDPVLENGHVTLYWDRSIITDRTIVANKPDIVVIDRLERRTVIVDIAVPHDENLVKAENDKKIKYLDLAHEVVDMWDVDSAVIVPIVVTANGLIAKSLDQHLMRLSLGSWIKGLIQKAVLLDTARIVRKFLSLEP

SEQ ID NO: 11205 - protein, 1106 aa, Noctua pronuba
MRWTQSINENVMRSYYGATEGGNNRTAYRVRMLSLFQVLEPAVNVSAQRLSDQVRVIQRNRMLDDTVLDRLRTEMQSSHVITPSAQAVVLPQSNTIPNRANDESNDMVTNVSTQCNEEIRSALEGAIREYRSMQPDLRPRIPRLPMHNKNRALVAVLDSQLSNYFDNCEDLTDAHSILYCAAVAACRVAHVKFSDDRATRPKPAVPAWQYRIERRIGGARALIGKLICFREGNTRPRVMRFVRRAFSGTDISPRDYMSRVTERIDFLKQKVYAWANRIRRYKRRVDRYTQNRTFQRDERWVYRAWERPDQGVADTRLPDDDAMCSFWRSIWSVPISHTEDEWTREVERACDPVQEMGAITISPQDVVCAVRPLPNWKSPGPDGLHNFWIKWFTRSHARLATLFQSALESGSLPEFLTTGITHLLHKSGSTAEPKNYRPITCLPTVYKVLTSILRTKISKHINDNSIMSPSQNGCGNGSRGTKELLLIDMAISQQVRRFRRDLSTCWIDYKKAYDSVPHTWLMRVLELYKVDTTLRTFLMLCMGQWRTVLRYPGCRQIQKDSEPIRIERGIFQGDSLSPLWFCLALNPLSTLLEDSGLGYRLRRGGQVISHLLYMDDLKLFAPNDLQLMELLKVTETFSSAIRMEFGVDKCAVMHVKRGEIVESVRTQLSDSINLRSLSATETYKYLGMSEALGINVADMKQSLKERFFGRLKKVFNSLLSGGNKVRAFNGWVMPVLMYSFGILKWTQIELDALDRRVRTLLTAYRMHHPRSSVMRLYIPRRCGGRGFLNAKTLHNREICSLREYFLEADVGMHRDVVAVDKGLTPLSLAKENWRKPVVLDTNDRREVWQSKELHGRFFRALHGPDVDLSASVAWLRSGDLFGETEGFVCAIMDEVMMTNNYRRFIVKDGTVDICRACHRPGESIRHIISGCSRLANGEYLHRHNLVARIIHQQLALKYNLVESEVPYYKYVPDPVLENGCVTLYWDRSIITDRTIEANKPDIVVVDRSERRAMIVDITVPHDENLVKAEKDKQIKYLDLAHEVVDLWDVDSAIIVPIVVSAHGLIAKSFDQHLRRLSLGGWIKGLIQKAVLLDTARIVRRFLSLEP

SEQ ID NO: 11206 - protein, 962 aa, Noctua pronuba
MHKKNKALVCALDSQLSTCFDSSKDLADTHSILYCGAVAACRVAHVKFPNNDRATRPKLAVPAWQSRIERRIGEARALIGKLICFREGNTRPRVMRFVRRAFSGTGISFRDYLACVTERIDFLKQKICAWASRIRRYKRRVERYTQNRTFQSDERWVYRAWERPDQGVTDTRLPDDDAMCLFWRSIWSVPVSHTEGDWTREVEQACDPILEMGAIIISPQDVACAVRPLPNWKSPGPDGLHNFWIKWFQRSHARLASQFQSALESGSLPQFLTTGITHLLHKSGSTAEPKNYRPITCLPTVYKVLTSILRAKINHHIDSNSIMSASQNGCRNGSRGTKELLLIDMAISQQVRRSRRDLSTCWIDYKKAYDSVPHTWLMRVLELYKVDATLRTFLKSCMGHWRTVLRYPGCRQIQGNSEPIRIERGIFQGDSLSPLWFCLALNPLSTLLEGSGLGYRLRRGGQVISHLLYMDDLKLFAPNNLQLMKLLKVTETFSSAIRMEFGVDKCAVMHVKRGEIMESVGTQLSDSIQLRSLSSTDTYKYLGMSEALGINTADMKQSLRERFFGRLNKVLSSLLSGGNKVRAFNGWVMPVLMYSFGILKWTQTELDALDRRVRALLTANRMHHPRSSVMRLYIPRKCGGRGFLNAKTLHNREVCSLREYFLEADVGMHRDVVSVDKGLTPLSLANENWRKPRVLDTNDRKEVWQGKELHGRFYRALHGPDVDFLASVSWLRFGDLFGETEGFVCAIMDEVMMTNNYRKYIVKDGTVDICRACHRPGESIRHIISGCSRLANGEYLHRHNLVARIIHQQLALKYNLVESEVPYYKYAPDPVLDNGNITLYWDRSIITDRTIVANKPDIVVIDRLERRAMIVDITVPHDENLVKAEKDKQFKYLDLAHEVVDMWDVNTAVIVPIVVSANGLIAKSLDQHLKRLALGSWIKGLIQKAVLLDTARIVRRFLSQEP

SEQ ID NO: 11207 - protein, 844 aa, Noctua pronuba
MRFVRRAFSGTGIGFRDYLARVTERIDFLKQKICAWANRIRRYKRRVERYTQNRTFQSDERWVYRAWERPDQGVTDTRLPDDDAMCLFWRSIWSVPVSHTEGDWTREVEQACDPIPEMGAIIISPQDVACAVRPLPNWKSPGPDGLHNFWIKWFQRSHARLASQFQSALESGSLPQFLTTGITQLLHKSGSTAEPKNYRPITCLPTVYKVLTSILRAKINQHIESNSIMSTSQNGCKNGSRGTKELLLIDMAISQQVRRSRKDLSTCWIDYKKAYDSVPHTWLMRVLELYKVDATLRTFLRSCMGCWRTVLRYPGCRQIQRNSEPIRIERGIFQGDSLSPLWFCLALNPLSTLLEGSGLGYRLRRGGQVISHLLYMDDLKLFAPNNLQLMKLLKVTETFSSAIRMEFGVDKCAVMHVKRGEIMESVGTQLSDSIHLRSLSSTETYKYLGMSEALGINTADMKQSLRERFFGRLNKVLGSLLSGGNKVRAFNGWVMPVLMYSFGILKWTQTELDALDRRVRALLTANRMHHPRSSVMRLYIPRKCGGRGFLNAKTLHNREVCSLREYFLEADVGMHRDVVSLDKGLTPLSLANENWRKPKVLVTNDRKEVWQSKELHGRFYRALHGPDVDFLESVSWLRFGDLFGETEGFVCAIMDEVMMTNNYRKYIVKDGTVDICRACHRPGESIRHIISGCSRLANGEYLHRHNLVARIIHQQLALKYNLVESEVPYYKYAPDPVLDNGNITLYLDRSIITDRTIVANKPDIVVIDRLERRAMIVDITVPHDENLVKAEKDKQFKYLDLAREVVDMWDVSTAVIVPIVVSANGLIAKSLDQHLRRLALGSWI

SEQ ID NO: 11208 - protein, 1197 aa, Noctua pronuba
MLTRAAARRARLSPPDPSLSSASPLPESSSIVSAVTPAVAVASSSSDEYFSPPTTPPPVRRRRGRRPPDGLGPRGPPASDRVPALGGSVQRMRWTQSINENVMRSYYGATEGGNNRTAYRVRMLSLFRVLEPAVNVSAQRLSDQVRVIQRNRMLDDTVLDRLRTEMQSSHVITPSAQAVVLPQSNTIPNRADDESNDMVTNVSTQCNEEIRSALEGAIREYRSMQPDLRPRIPRLPMHNKNRALVAVLDSQLSNYFDNCEDLTDAHSILYCAAVAACRVAHVKFSDDRATRPKPAVPAWQYRIERRIGGARALIGKLICFREGNTRPRVMRFVRRAFSGTDINPRDYMSRVTERIDFLKQKVYAWANRIRRYKRRVDRYTQNRTFQRDERWVYRAWERPDQGVADTRLPDDDAMCSFWRSIWSVPVSHTEDEWTREVERACDPVQEMGAITISPQDVVCAVRPLPNWKSPGPDGLHNFWIKWFTRSHARLATLFQSALESGSLPEFLTTGITHLLHKSGSTAEPKNYRPITCLPTVYKVLTSILRTKISKHINDNSIMSPSQNGCRNGSRGTKGLLLIDMAISQQVRRFRRDLSTCWIDYKKAYDSVPHTWLMRVLELYKVDTTLRTFLMSCMGQWRTVLRYPGCRQIQRDSEPIRIERGIFQGDSLSPLWFCLALNPLSTLLEDSGLGYRLRRGGQVISHLLYMDDLKLFAPNDLQLMELLKVTETFSSAIRMEFGVDKCAVMHVKRGEIVESVRTQLSDSINLRSLSATETYKYLGMSEALGINVADMKQSLKERFFGRLKKVFNSLLSGGNKVRAFNGWVMPVLMYSFGILKWTQTELDALDRRVRTLLTAYRMHHPRSSVMRLYIPRRCGGRGFLNAKTLHNREICNLREYFLEADVGMHRDVVAVDKGLTPLSLAKENWRKPVVLDTNDRREVWQSKELHGRFFRALHGPDVDLSASVAWLRSGDLFGETEGFVCAIMDEVMMTNNYRRFIVKDGTVDICRACHRPGESIRHIISGCSRLANGEYLHRHNLVARIIHQQLALKYNLVESEVPYYKYVPDPVLENGCVTLYWDRSIITDRTIVANKPDIVVVDRSERRAMIVDITVPHDENLVKAEKDKQIKYLDLAHEVVDLWDVDSAIIVPIVVSAHGLIAKSFDQHLRRLSLGGWIKGLIQKAVLLDTARIVRRFLSLEP

SEQ ID NO: 11209 - protein, 1204 aa, Noctua pronuba
MITRSRAKQQKAHPPSPGSSLSSASQPPGRATSVSSVSPVAAVASSSSDEFFSPPSTPSPPRRRGRGRPPAGLGPRGQQAPTRVPAAGGNVSRMRWTQSINENVMRAYYGATEGGSNLTAYRGRMLSLFQVLEPGVSVSAQRLSDQVRVIQRNHMLDDTVLDRLRFDSRSNLVTPASPMIAVQLQNVSSAPPRSDHDGEEDDDEVISVSTQCNAQLRSALEGAFREYRSIPPELRPRLPRLPMHKKNKALVCALDSQLSTCFDSSKDLADTHSILYCGAVAACRVAHVKFPNNDRATRPKLAVPAWQRRIERRIGEARALIGKLICFREGNTRPRVMRFVRRAFSGTGISFRDYLARVTERIDFLKQKICAWANRIRRYKRRVERYTQNRTFQSDERWVYRAWERPDQGVTDTRLPDADAMCLFWRSIWSVPVSHTEGDWTREVEQACDPIPEMGAIIISPQDVACAVRPLPNWKSPGPDGLHNFWIKWFQRSHARLASQFQSALESGSLPQFLTTGITHLLHKSGSTAEPKNYRPITCLPTVYKVLTSILRAKINHHIDSNSIMSASQNGCRNGSRGTKELLLIDMAISQQVRRSRRDLSTCWIDYKKAYDSVPHTWLMRVLELYKVDATLRTFLKSCMGHWRTVLRYPGCRQIQGNSEQIRIERGIFQGDSLSPLWFCLALNPLSTLLEGSGLGYRLRRGGQVISHLLYMDDLKLFAPNNLQLMKLLKVTETFSSAIRMEFGVDKCAVMHVKRGEIMESVGTQLSDSIHLRSLSSTETYKYLGMSEALGINTTDMKQSLRERFFGRLNKVLGSLLSGGNKVRAFNGWVMPVLMYSFGILKWTQTELDALDRRVRALLTANRMHHPRSSVMRLYIPRKCGGRGFLNAKTLHNREVCSLREYFLEADVGMHRDVVSVDKGLTPLSLANENWRKPRVLDTNDRKEVWQGKELHGRFYRALHGPDVDFLASVSWLRFGDLFGETEGFVCAIMDEVMMTNNYRKYIVKDGTVDICRACHRPGESIRHIISGCSRLANGEYLHRHNLVARIIHQQLALKYNLVESEVPYYKYAPDPVLDDGNITLYWDRSIITDRTIVANKPDIVVIDRLERRAMIVDITVPHDENLVKAEKDKQFKYLDLAREVVDMWDVSTAVIVPIVVSANGLIAKSLDQHLRRLSLGSWIKRLIQKAVLLDTARIVRRFLSQEP

SEQ ID NO: 11210 - protein, 1200 aa, Tinea trinotella
MLTRSRARNQSAQLTSSGSSLSSASQPPRSTPTVSPVISVAAVASSSSDECFSPPTTPPSARRRGGGRPPASLEPRGPSASGGVPATSGRVQRMRWTQSINENVMRSYFGATEGGISLTAYRGRMLTLFQVLEPAVNVSAQRLSDQVRVIQRNRMLDDVVLDRLRLESRSSHVSPVSPPVAVQLQPSALPRPNNIQENDDDVTISVSNQYNEQLRSALEDAFREYRSTPPGLRPRIPRLPMHKKNRALVCALDSQLVNHFKSSKDLADTHSILYCAAVAVCRVAHVQFPNNDRAARLAVPAWQCRIERRIGEARALIGKLISFREGNTRPRVMRFVRRAFSGTDISSRDYQTRVTERIDFLKQKIYAWANRIRRYKRRVERYTQNRTFQSNERWVYRAWERSDQDVSDMCLPDDDAMSLFWRNIWSVPVGHTEGEWTREVERACDLIPEMGAIIISPQDVACAVRPLSNWKSPGLDGLHNFWIKYFQRSHARLAAQFQSALELGSLPQFLTTGITHLLHKSGSTAEPKNYRPITCLPTVYKVLTSILRAKIDKHIDTNCIMSASQNGCRSGSRGTKELLLIDVAISQQVRRSRRDLSTCWIDYKKAYDSVPHTWLMRVLELYKVDAALRTFLVSCMGQWRTVLHYPGCRRILGNGEPIKIERGIFQGDSLSPLWFCLALNPLSTLLDGSGQGYRLRRDGQVISHLLYMDDLKLFAPNNLQLMKLLKVTETFSSAISMEFGVDKCAIMHVKRGEIMESVGTQLSDSIHLRSLCSTETYKYLGMSEALGINAVDVKQSLRDRFFGRLNKVLNSLLSGGNKVRAFNGWVMPVLMYSFGILKWTQTELDALDRRVRTLLTANRMHHPRSSVMRLYIPRKCGGRGFLNAKTLHNREVCSLREYFLKTDVGMHRDVVAVDKGLTSLSLANENWRKPVVLDANDRREVWQSKELHGRFYRALHGPDVDFLASVSWLRFGDLFGETEGFVCAIMDEVMMTNNYRKYIVKDGTVDICRACHRPGESIRHIISGCSRLANGDYLHRHNLVARIIHQQLALKYNLVESEVPYYRYVPDPVLENGNITLYWDRSIITDRTIVANKPDIVVIDRLERRTIIVDVAVPHDENLVKAEKDKQIKYLDLAREVVDMWEVDTAIIVPIVVTANGLIAKSLDEHLKRLSLGSWIKRLIQKAVLLDTARIVRRFLSQEP

SEQ ID NO: 11211 - protein, 1200 aa, Tinea trinotella
MLTRSRALHQSAQLISSGSSLSSASQPPGSTPTVSQVISVAAVASSSSDECFSPPMTPPSARRRGGGRPPASLEPRGPSASGGVPATSGRVQRMRWTQSINENVMRSYFGATEGGISLTAYRGRMLTLFQVLEPAVNVSAQRLSDQVRVIQRNRMLDDVVLDRLRLESRSSHVSAVSPPVAVQLQPSALPRPNNIEENDDDVTISVSNQYNEQLRSALEDAFREYRSTPPGLRPQIPRLPMHKKNRALVCALDSQLANYFESSKDLADTHSILYCAAVAVCRVAHVKFPNNDRAARLAVPAWQCRIERRIGEARALIGKLISFREGNTRPRVMRFVRRAFSGTDISSRDYQTRVTERIDFLKQKIYAWANRIRRYKRRVERYTQNRTFQSNERWVYRAWERPDQDVSDTCIPDDDAMSLFWRNIWSVPVGHTEGEWTREVERACDLIPEMGAINISPQDVACAVRPLPNWKSPGLDGLHNFWLKCFQRSHARLAAQFQSALELGSLPQFLTTGITHLLHKSGSTAEPKNYRPITCLPTVYKVLASILRAKINKHIDTNCIMSASQNGCRSGSRGTKELLLIDIAISQQVRRSRRDLSTCWIDYKKAYDSVPHTWLMRVLELYKVDAALRTFLVSCMGQWRTVLHYPGCRRILGNGEPIKIKRGIFQGDSLSPLWFCLALNPLSTLLDGSGQGYRLRRDGQVISHLLYMDDLKLFAPNNLQLMKLLKVTETFSSAISMEFGADKCATMHVKRGEIMESVGIQLSDSIHLRSLCSTETYKYLGMSEALGINAVDVKQSLKDRFFGRLNKVLNSLLSGGNKVRAFNGWVMPVLMYSFGILKWTQTELDALDRRVRTLLTANRMHHPRSSVMRLYIPRKCGGRGFLNAKTLHNREVCSLREYFLKTDVGMHRDVVAVDKGLTSLSLANENWRKPVVLDINDRREVWQSKELHGRFFRALHGPDVDFLASVSWLRFSDLFGETEGFVCAIMDEVMMTNNYRKYIVKDGTVDICRACHRPGESIRHIISGCSRLANGDYLHRHNLVARIIHQQLALKYNLVESEVPYYRYVPDPVLENGNITLYWDRSIITDRTIVANKPDIVVIDRLERRTIIVDVAVPHDENLVKAEKDKQIKYLDLAREVVDMWEVDAAIIVPIVVTANGLIAKSLDKHLKRLSLGSWIKRLIQKAVLLDTARIVRRFLAQEP

SEQ ID NO: 11212 - protein, 868 aa, Spilosoma lubricipeda
MRFVKQAFLGTTISPQQYMSCVTERIDFLKQKVYAWANRIRRYRKRIDRYNQNRMFQRNEKWVYRKWENLSPCMSDGQVPDENATNSFWRSIWSVPVVHTEGDWYRDVERSCESLLPMELINIDKEDVSCAVRSLPNWKAPGPDGLHNFWLKWFRSSHACLASQFQTALDSGSLPQFLTTGITHLLYKSGSAMDPKNFRPITCLPTLYKLLTSILRLKITTHINQNSILSVSHNGCRSGTRGTKELLIIDMTISQQVRRNRKNLARCWIDYKKAYDSVPHTWLLKVLELYKIDTTLCTFLKSCMGQWRTVLRYPGCRQTAVNDVPIKIERGIFQGDSLSPLWFCLALNPLSTLLESSGLGYRLQKDAALISHLFYMDDLKLFAPTKLQLTALLRVTENFSNSIKMEFCVDKCAVMHVKKGVIVESEGIELSDSTKLRFLSATETYKYLGFSQSLGIPEPDMKQSLRERFFGRLKKVLKSLLSGGNKVRAYNGWVMPVLMYSFGILRWTQTELDAIDRRVRTLLTAFRMHHPRSSVMRLYIPRKLGGRGLLNAKTLHNREIYNLREYFLHTDVGVHRSVVTVDTGLTPLALAKENWRKPVVLSTNDRREVWKGKELHGRFYRALNGPDIDFKASASWLRYGDLFGETEGFVCAIMDEVIMTNNYRKYILKDGTVDICRACHRPGESIRHIISGCSRLANGEYLHRHNQVARIVHQQLALKYHLVSSEVPYYRYVPDPVLENGRATLYWDRSIITDRTIVANKPDIVVIDRLERRAMIVDIAVPHDENLVKVEKEKQIKYLDLSHEIVDMWNVDSAIIVPIVVSAHGLIAKSLDQHLKRLTLQGWIKGLMQKAVLLDTARIVRRFLSLEP

SEQ ID NO: 11213 - protein, 1196 aa, Spilosoma lubricipeda
MLTRARARALLPSSDSSLRSALPSSDARTEVPTVAEASSSSSSDEFFSPPTSPIPVRRQGRDRPPTSLGSRGPLTSNRAPATGGDVRRMKWTQSINENVMRAYFRATELGTNLTAYRVRLVSLFQELEPAVNVSAQRLSDQVRAIQRCHLLDDTVLERICSDIRNSLTVPSSPHVVDVVTNSTPQNEDVSELVDSEIISVSTLYNDKIRSTLEDVIREYRCVNFNNRPRLPRLPIHKRNLALVSALDSLLPDYFGNSEDLSDTHSILYCAAIAVCRVAGIKFAENITTTRPENTVPAWQCRIERRIAGARTLIGKLISFRSGNTRPKVMRFVKQAFLGTTISPQQYMSCVTERIDFLKQKVYAWANRIRRYRKRIDRYNQNRMFQRNEKWVYRKWENLSPCMSDGQVPDENATNSFWRSIWSVPVAHTEGDWYRDVERSCESLLPMELINIDKEDVSCAVRSLPNWKAPGPDGLHNFWLKWFRSSHACLASQFQTALDSGSLPQFLTTGITHLLYKSGSAMDPKNFRPITCLPTLYKLLTSILRLKITTHINQNSILSVSQNGCRSGTRGTKELLIIDMTISQQVRRNRKSLATCWIDYKKAFDSVPHTWLLKVLELYKIDTTLCTFLKSCMRQWRTVLRYPGCRQTAVNDVPIKIERGIFQGDSLSPLWFCLALNPLSTLLEGSGLGYRLQKEAPVISHLFYMDDLKVFAPTKLQLTALLRVTENFSNSIKMEFGIDKCAVMHVKKGVIVESEGIELSDSTRLRSLSVTETYKYLGFSQSLGIPESDMKQSLRERFFGRLKKVLKSLLSGGNRVRAYNGWVMPVLMYSFGILRWTQTELDALDRRVRTLLTAFRMHHPRSSVMRLYIPRKFGGRGLLNVKTLHNREIYNLREYFLHTDVGVHRSVVAMDTGLTPLALAKENWRKPVVLGTNERREVWKGKELHGRFYRALNGPDIDFKASTSWLRYGDLFGETEGFVCAIMDEVIMTNNYRKYILKDGTVDICRACHRPGESIRHIISGCSRLANGEYLHRHNQVARIVHQQLALKYKLVNSEVPYYRYVPDPVLENGRATLYWDRSIITDRTIVANKPDIVVIDRSERRAMIVDIAVPHDENLVKVEKEKQIKYLDLSHEIVDMWDVDSVIIVPIVVSVHGLIAKSLDQHLKRLTLDGWIKGLMQKAVLLDTARIVRRFLSLEP

SEQ ID NO: 11214 - protein, 1196 aa, Spilosoma lubricipeda
MLTRARARALLPSSDSSLRSALPSSDARTEVPTVAEASSSSSSDEFFSPPTSPTPVRRQGRDRPPTSLGSRGPLTSNRAPAAGGDVRRMKWTQSINENVMRAYFRATELGTNLTAYRVRLVSLFQELEPAVNVSAQRLSDQVRAIQRCHLLDDTVLERICSDIRNSLTVPSSPHVVDVVTNSTPQNEDVSELVDSEIISVSTLYSDKIRSTLEDVIREYRYVNFNNRPRLPRLPIHKRNLALVSALDSLLPDYFGNSEDLSDTHSILYCAAIAVCRVAGIKFAENITTTRPENTVPAWQCRIERRIAGARTLIGKLISFRSGNTRPKVMRFVKQAFLGTTISPQQYMSCVTERIDFLKQKVYAWANRIRRYRKRIDRYNQNRMFQRNEKWVYRKWENLSPCMSDGQVPDENATNSFWRSIWSVPVAHTEGDWYRDVERSCESLLPMELINIDKEDVSCAVRSLPNWKAPGPDGLHNFWLKWFRSSHACLASQFQTALDSGSLPQFLTTGITHLLYKSGSAMDPKNFRPITCLPTLYKLLTSILRLKITTHINQNSILSVSQNGCRSGTRGTKELLIIDMTISQQVRRNRKNLATCWIDYKKAYDSVPHTWLLKVLELYKIDTTLCTFLKSCMGQWRTVLRYPGCRQTAVNDVPIKIERGIFQGDSLSPLWFCLALNPLSTLLESSGLGYRLQKDAALISHLFYMDDLKLFAPTKLQLTALLRVTENFSNSIKMEFCVDKCAVMHVKKGVIVESEGIELSDSTKLRFLSATETYKYLGFSQSLGIPEPDMKQSLRERFFGRLKKVLKSLLSGGNKVRAYNGWVMPVLMYSFGILRWTQTELDAIDRRVRTLLTAFRMHHPRSSVMRLYIPRKLGGRGLLNAKTLHNREIYNLREYFLHTDVGVHRSVVTVDTGLTPLALAKENWRKPVVLSTNDRREVWKGKELHGRFYRALNGPDIDFKASASWLRYGDLFGETEGFVCAIMDEVIMTNNYRKYILKDGTVDICRACHRPGESIRHIISGCSRLANGEYLHRHNQVARIVHQQLALKYHLVSSEVPYYRYVPDPVLENGRATLYWDRSIITDRTIVANKPDIVVIDRLERRAMIVDIAVPHDENLVKVEKEKQIKYLDLSHEIVDMWNVDSAIIVPIVVSAHGLIAKSLDQHLKRLTLEGWIKGLMQKAVLLDTARIVRRFLSLEP

SEQ ID NO: 11215 - protein, 1107 aa, Autographa pulchrina
MKWTQGINENVMRAYYGATEGGTNLTAYRARMLSLFQGLEPDVNVSAQRLSDQVRVIQRNHRLDDATLDRLRSEVQRSPAASTPSPAVVPVIGSPPTNPADGEEEDGAITVSTQCSEHIRSTLEDTIREFRSTPPGLRPRLPRLPMHNRNKAIMGVLDSLLLVYFGSSEDLSDTHSILYCAALAACRVANVKINNINLDTRPKPAVPAWQCRIERRVAEARALIGKLIAFKDGNSRPRVMRFVRRAFTGTNISPSEYTARVTERIDFFKQKVCAWASRIRRYKCRVDRFHQNRMFQRDQRWVFRTWERPVLGMDDRRLPDEDATNSFWRNIWSVPVSHSEGVWMRDVEESCEPIQEMRAITIGPQDVANAIRPMSNWKAPGPDGLQNFWLKWFRSSHGCLASQFQYAIESDALPQFFTTGSTHLLHKTGSTTDPKNYRPITCLPTIYKLLTSILRVKINEHIDSHSIMSASQNGCRNGSRGTKELLLIDMTICQQVRRSKKNLSTCWIDYKKAYDSVPHSWLMRVLELYKINTTLRAFLSSCMRRWTTVLRYPGCRDIQQSGEPIRIERGIFQGDSLSPLWFCLALNPLSTLLENSRLGYSLRRGSQVISHLLYMDDLKLFASNELQLMGLLKITESFSNSIRMEFGVDKCAVMHVKQGGIVESQGIQLSDSINLRSLSAADTYKYLGMSEALGIDVADMKQSLLTRFFGRLNKVLKSLLSGGNRVRAFNGWVMPVLMYSFGILKWTQTELDALDRRVRTLLTANRMHHPRSSVMRLYIPRKCGGRGFLNAKTLHNREVCNLREYFLQVDVGMHRDVVVVDKGFTPLSLGKENWHKPVVLSVKDRKDVWQSKELHGRFYRSLHGPDVDFLASVAWLRFGDLFGETEGFVCAIMDEVIMTNNYRKYIIKDGTVDICRACHCPGESIRHIISGCSRLANGEYLHRHNQVARIIHQQLALRYKLVEAEVPYYRYVPDPVLDNGHVTLYWDRSIITDRTIVANKPDIVVIDRSERRAMIVDVTIPHDENLVKAEKEKQMKYLDLAHEVVDMWEVDSAIIVPIVITANGIIAKSLDQHLKRLSLGIWVKGLIQKAVLLDTARIVRRFLSLEP

SEQ ID NO: 11216 - protein, 983 aa, Autographa pulchrina
MMIREFRSTPPGLRPRLPRLPMHNRNKAIMGVLDSLLLVYFGSSEDLSDTHSILYCAALTACRVSNVKINNINLDTRPKPAVPAWQCRIERRVAEARALIGKLIAFKDGNSRPRVMRFVRRAFTGTNISPSEYTARVTERIDFFKQKVCAWASRIRRYKCRVDRFHQNRMFQRDQRWVFRTWERPVLGMDDRRLPDEDATNSFWRNIWSVPVSHSEGDWMRDVEESCEPIQEMGAITISPQDVANAIRPMSNWKAPGPDGLQNFWLKWFRSSHGCLASQFQYAIESDALPQFFTTGSTHLLHKTGSTTDPKNYRPITCLPTIYKLLTSILRVKINEHIDSHSIMSASQNGCRNGSRGTKELLLIDMTICQQVRRSKKNLSTCWIDYKKAYDSVPHSWLMRVLELYKINTTLRAFLSSCMRRWTTVLRYPGCRDIQQSGEPIRIERGIFQGDSLSPLWFCLALNPLSTLLENSRLGYSLRRGSQVISHLLYMDDLKLFASNELQLMGLLKITESFSNSIRMEFGVDKCAVMHVKQGGIVESQGKQLSDSINLRSLSAADTYKYLGMSEALGINVADMKQSLLTRFFGRLNKVLKSLLSGGNRVRAFNGWVMPVLMYSFGILKWTQTELDALDRRVRTLLTANRMHHPRSSVMRLYIPRKCGGRGFLNAKTLHNREVCNLREYFLQVDVGMHRDVVAVDKGFTPLSLGKENWHKPVVLSVKDRRDVWQSKELHGRFYRSLHGPDVDFLASVAWLRFGDLFGETEGFVCAIMDEVIMTNNYRKYIIKDGTVDICRACHCPGESIRHIISGCSRLANGEYLHRHNQVARIIHQQLALKYKLVEAEVPYYRYVPDPVLDNGHVTLYWDRSIITDRTIVANKPDIVVIDRSERRAMIVDVTIPHDENLVKAEKEKQMKYLDLAHEVVDMWEVDSAIIVPIVITANGIIAKSLDQHLKRLSLDIWVKGLIQKAVLLDTARIVRRFLSLEP

SEQ ID NO: 11217 - protein, 1196 aa, Ochropleura plecta
MITRLAARQHARLPPPDSPLSSASPPPEPSLIVSAVTPAVAVASSSSDEYFSPPTTPACRRGGRRPPDGLGLRGPPASDRVPAPGGSVQRMRWTSSINENVMRSYYGATEGGNNLTAYRVRMLSLFQVLEPAVNVSAQRLSDQVRVIQRNRMLDDTVLDRLRTEMQSSQVITSSSQAVVPPQSHQLVSHADEVSNDMATNVSTQCNEEMRIALEGAIREYRYISPELRPRLPRLPMHNKNRALVAVLDSQLSNYFDNCENLTDAHSILYCAAVAACRVAHVKFPDDGATRPKPAVPFWQCRIERRIGVARALIGKLICFREGNTRPRVMRFVRRAFAGTDISPPDYMSHIIERIDFLKQKVYAWANRIRRYKRRVERYTLNRTFQSDERWVYRAWERPDQGVSDTHLPDDDAMCLFWRNIWSVPVSHTEGEWTREVERACDPIPEMGALTISPQDVACAVRPLPNWKSPGPDGLHNFWLKWIQRSHARLATLFQTALESGSLPKFLTTGITHLLHKSGSTTEPKNYRPITCLPTIYKVLTSILRAKITKHIDDNSIMSASQNGCRNGSRGTKELLLIDMAISQQVRRSRRHLSTCWIDYKKAYDSVPHTWLMRVLELYKVDATLRTFLSSCMRQWNTVLRYPGCRQIQRNSEPIRIERGIFQGDSLSPLWFCLALNPLSTLLEDSGLGYRLRRGGRVISHLLYMDDLKLFAPNDSQLMELLKVTETFSSAISMEFGVDKCAVMHVKRGEIVESVGTQLSDSIHLRSLSANETYKYLGMSEALGINVADMKQSLKERFFGRLRKVFNSLLSGGNKVRAFNGWVMPVLMYSFGILKWTQTELDALDRKVRTLLTAYRMHHPRSSVMRLYIPRSCGGRGFLNAKTLHNREICSLREYFLEADVGMHRDVVTVDKGFTPLSLAKENWRKPVVLDTNDRREVWQSKELHGRFFRALHGPDVDQPASVAWLRSGDLFGETEGFVCAIMDEVMMTNNYRRFIVKDGTVDICRACHRPGESIRHIISGCSRLANGEYLHRHNLVARIIHQQLALKYSLVESEVPYYRYEPDPVLEHGNITLYWDRSIITDRTIVANKPDIVVVDRSERRAMIVDITVPHDENLVKAEKDKQIKYIDLAREVVDMWDVDSAIIVPIVVSANGLIAKSLDQHLRRLSLGSWIKGLIQKAVLLDTARIVRRFLSLEP

SEQ ID NO: 11218 - protein, 1197 aa, Ochropleura plecta
MLTRSQARSARHPPPGSSLSSASPPPEPSLVVSAVTPAVAVASSSSDEYFSPPTTPPPVRRRGRHRPPDGLGPRGPPASDRVPAPGGSVQRMRWTQSINENVMRSYYGATEGGNNLTAYRVRMLSLFQVLEPAVNVSAQRLSDQVRVIQRNRMLDDTVLDRLRTEMQSSQVITSSSQAVAPPQPHQLVNRANEVSNDMATNVSTQCSEEMRSTLEGAIREYRYMSPELRPRLPRLPMHNKNRSLVAALDSQLSNYFDNCENLTDAHSILYCAAVAVCRVAHVKFPDDRATRPKPAVPFWQCRIERRIGAARALIGKLICFREGNTRPRVMRFVRRAFSGTDITPPDYMSRIAERIDFLKQKVYAWANRIRRYKRRVERYTQNRTFQSDERWVYRAWERPDQGVSDTHLPDDNAMCLFWRSIWSVPVSHTEGEWTREVERACDPIPEMGALTISPQDVACAVRPLPNWKCPGPDGLHNFWIKWIQRSHVRLAALFQTALESGSLPKFLTTGITHLLHKSGSTAEPKNYRPITCLPTLYKVLTSILRAKITKHIDDNSIMSASQNGCRNGSRGTKELLLIDMAISQQVRRSRRHLSTCWIDYKKAYDSVPHTWLMRVLELYKIDATLRTFLISCMRQWSTVLRYPGCRQIQRNSEPIKIERGIFQGDSLIPLWFCLALNPLSTLLENSGLGYRLRRGGQVISHLLYMDDLKLFAPNDLQLMELLKVTETFSSSIRMEFGVDKCAVMHVKRGKIVESVGTQLSDSINLRSLSATETYKYLGMSEALGINVADMKQSLKERFFGRLRKVFNSLLSGGNKVRAFNGWVMPVLMYSFGILKWTQTELDALDRKVRTLLTAFRMHHPRSSVMRLYIPRSCGGRGFLNAKTLHNREIYSLREYFLETDVGMHRDVVAVDKGLTPLSLAKENWHKPVVLDTNDRREVWQSKELHGRFFRALHGPDVDQPASVAWLRSGDLFGETEGFVCAIMDEVMMTNNYRRFIVKDGTVDICRACHRPGESIRHIISGCSRLANGEYLHRHNLVARIIHQQLALKYSLVESEVPYYRYEPDPVLEHGNITLYWDRSIITDRTIVANKPDIVVVDRSERRAMIVDITVPHDENLVKAEKDKQIKYIDLAREVVDMWDVDSAIIVPIVVSANGLIAKSLDQHLRRLSLGSWIKGLIQKAVLLDTARIIRRFLSLEP

SEQ ID NO: 11219 - protein, 1200 aa, Ochropleura plecta
MKMITRSAARRDARLPPPGPSLSSASPPPEPSLVVSAVTSAVAVASSSSDEYFSPSTTPPPARRRGGRRPPDGLGLRGPPASDRVPAPGGSVQRMRWTSSINENVMRSYYGATEGGNNLTAYRVRMLSLFQVLEPAVNVSAQRLSDQVRVIQRNRMLDDTVLDRLRTEMQSSQVIISSSQAVVPPQSHQLVSRADEVSNDMATNVSTQCSEEMRSALEGAIREYRYMSPELRPRLPRLPMHNKNRALVAVLDSQLSNYFDKCENLTDAHSILYCAAVAACRVAHVKFPDDGATRPKPAVPFWQCRIERRIGVARALIGKLICFKEGNTRPRVMRFVRRAFAGTDISPPDYMSRITERIDFLKQKVYAWANRIRRYKRRVERYTLNRTFQSDERWVYRAWERPDQGVSDTHLPDDDAMCLFWRSIWSVPVSHTEGEWTREVERACDPIPEMGALTISPQDVACAVRPLPNWKSPGPDGLHNFWIKWIQRSHVRLAALFQSALESGSLPKFLTTGITHLLHKSGSTAEPKNYRPITCLPTLYKVLTSILRAKITKHIDDNSIMSASQNGCRNGSRGTKELLLIDMAISQQVRRSRRHLSTCWIDYKKAYDSVPHTWLMRVLDLYKIDATLRTFLISCMRQWSTVLRYPGCRQIQRNSEPIRIERGIFQGDSLSPLWFCLALNPLSTLLENSGLGYRLKRGGQVISHLLYMDDLKLFAPNDLQLMELLKVTETFSSAIRMEFGVDKCAVMHVKRGEIVESVGTQLSDSINLRSLSATETYKYLGMSEALGINVADMKQLLKERFFGRLRKVFNSLLSGGNKVRAFNGWVMPVLMYSFGILKWTQTELDALDRKVRTLLTAFRMHHPRSSIMRLYIPRSCGGRGFLNAKTLHNREICSLREYFLETDVGMHRDVVAVDKGLTPLSLAKENWRKPVVLDTNDRREVWQSKELHGRFFRALHGPDVDQSASVAWLRSGDLFGETEGFVCAIMDEVMMTNNYRRFIVKDGTVDICRACHRPGESIRHIISGCSRLANGEYLHRHNLVARIIHQQLALKYNLVEAEVPYYRYEPDPVLEHGYITLYWDRSIITDRTVVANKPDIVVVDRSERRAMIVDITVPHDENLVKAEKDKQIKYIDLAREVVDMWDVDSAIIVPIVVSANGLIAKSLDQYLRRLSLGSWIKGLIQKAVLLDTARIVRRFLSLEP

SEQ ID NO: 11220 - protein, 868 aa, Hecatera dysodea
MRFVRRAFSGTDISPRDYLTRVTERIDFLKQKVYAWANRIRRYKRRVERYTQNRTFQRNERWVYRAWERPDQGVTDTRLPDDEAMLSFWRNIWSVPVSHTEGDWTREVERACDPIPEMGAINISPQDVARAVRPLPNWKSPGPDGLHNFWIKWFKGSHARLAAQFQAALGSGSLPNFLTTGITHLLHKSGSTAEPKNYRPITCLPTVYKVLTSILRAKINNHIDSNSIISASQNGCRNGSRGTKELLLIDVAISQQVRRSRRDLSTCWIDYKKAYDSVPHTWLMRVLELYKVDAVLRTFLMSCMGQWRTVLHYPGCRQTQANSEPIRIERGIFQGDSLSPLWFCLALNPLSTLLEGSGQGYRLRRGGQVISHLLYMDDLKLFAPNNLQLMKLLKVTETFSSDISMEFGVDKCAVMHVKRGEIMESVGTQLSDSIHLRSLCSTETYKYLGMSEALGINATGVKQSLKERFFGRLNKVLNSLLSGGNKVRAFNGWVMPVLMYSFGILKWTQTELDALDRRVRSLLTANRMHHPRSSVMRLYIPRKCGGRGFLNAKTLHNREVCSLREYFLEADVGMHRDVVAVDKGLTPLSLANENWRKPVVLDINDRREVWKSKELHWRFYRVLHGPDVDFLASVAWLRFGDLFGETEGFICAITDEVMMTNNYRKYIVKDGTVDICRACHRPGESIRHIISGCSSLANGDYLHRHNLVARIIHQQLALKYNLVESEVPYYRYAPDPVLENGNCTLYWDRSIITDRTIVANKPDIVVIDRLERRAMIVDIAVLHDENLVKAEKDKQSKYLDLAHEVVDMWNVNTAVIVPIVVTANGIIAKSLDQHLKRLSLGSWIKGLIQKAVLLDTARIVRRFLSREP

SEQ ID NO: 11221 - protein, 1200 aa, Hecatera dysodea
MLTRSRTRAQTTQSTSSGSSLSSASQPPGPTPAVSPEIPVAAVASSSSDEYFSPPTTPPPARRRGRGRPPTSLGPRGPPASDRVPAIGGSVQRMRWTQSINENVMRSYFGATEGGTNLTAYRGRMLSLFQVLEPAVNVSAQRLSDQVRVIQRNRMLDDAVLDRLRLESRSSRVSPASPPAAVQIQPSISPRPDHVSEDVDDGAITVSNQCNERLRSALEDAFREYRSTPPGLRPRLPRLPMHNKNRALVCALDSQLENCFNSSKDLADTHSILYCAAAAACRVAHVKFPSSDRAARPAVPAWQCRIERRIGEARALIGKLICFREGNTRRRVMRFVRRAFSGTDISPRDYLTRVTERIDFLKQKVYAWASRIRRYKRRVERYTQNRTFQSNERWVYRAWERPDQVVTDTHLPDDDAMCSFWRSIWSVPVSHTEGDWTREVERTCDPIPEMGAITISPQDVARAVRPLPNWKSPGPDGLHNFWIKWFTRSHARLASQFQSALESRSLPQFLTTGITHLLHKSGSTAEPKNYRPITCLPTVYKVLTSILRAKINDHIESNSIMSTSQNGCRNGARGTKELLLIDVAISQQVRRSRKDLSTCWIDYKKAYDSVPHTWLMRVLELYKVNTVLRTFLMSCMGQWRTVLHYPGCRQTQANSEPIRIERGIFQGDSLSPLWFCLALNPLSTLLEGSGQGYRLRRGGQVISHLLYMDDLKLFAPNNLQLMKLLKVTETFSSDISMEFGVDKCAVMHVKRGEIMESVGTQLSDSIYLRSLCSTETYKYLGMSEALGINATSVKQSLKERFFGRLNKVLNSLLSGGNKVRAFNGWVMPVLMYSFGILKWTQTELDALDRRVRSLLTANRMHHPRSSVMRLYIPRKCGGRGFLNAKTLHNREVCSLREYFLEADVGMHRDVVAVDKGLTPLSLANENWRKPVVLDTNDRREVWQSKELHGRFYRVLHGPDVDFLASVAWLRFGDLFGETEGFICAITDEVMMTNNYRKYIVKDGTVDICRACHRPGESIRHIISGCSSLANGDYLHRHNLVARIIHQQLALKYNLVESEVPYYRYVPDPVLENGNCTLYWDRSIITDRTIVANKPDIVVIDRLERRAMIVDIAVPHDENLVKAEKDKQSKYLDLAREVVDMWNVNTAVIVPIIVTANGIIAKSLDQHLKRLSLGSWIKGLIQKAVLLDTARIVRRFLSREP

SEQ ID NO: 11222 - protein, 1200 aa, Hecatera dysodea
MLTRSRTRAQTTQSTSSGSSLSSASQPPGPTPAVSPEIPVAAVASSSSDEYFSPPTTPPPARRRGRGRPPTSLGPRGPPASDRVPAIGGSVQRMRWTQSINENVMRSYFGATEGGTNLTAYRGRMLSLFQVLEPAVNVSAQRLSDQVRVIQRNRMLDDAVLDRLRLESRSSRVSPASPPAAVQIQPSISPRPDHVSEDVDDGAITVSNQCNERLRSALEDAFREYRSTPPGLRPRLPRLPMHNKNRALVCALDSQLENCFNSSKDLADTHSILYCAAAAACRVAHVKFPSSDRAARPAVPAWQCRIERRIGEARALIGKLICFREGNTRRRVMRFVRRAFSGTDISPRDYLTRVTERIDFLKQKVYAWASRIRRYKRRVERYTQNRTFQSNERWVYRAWERPDQVVTDTHLPDDDAMCSFWRSIWSVPVSHTEGDWTREVERTCDPIPEMGAITISPQDVARAVRPLPNWKSPGPDGLHNFWIKWFTRSHARLASRFQSALESRSLPQFLTTGITHLLHKSGSTAEPKNYRPITCLPTVYKVLTSILRAKINDHIESNSIMSTSQNGCRNGARGTKELLLIDVAISQQVRRSRKDLSTCWIDYKKAYDSVPHTWLMRVLELYKVNTVLRTFLMSCMGQWRTVLHYPGCRQTQANSEPIRIERGIFQGDSLSPLWFCLALNPLSTLLEGSGQGYRLRRGGQVISHLLYMDDLKLFAPNNLQLMKLLKVTETFSSDISMEFGVDKCAVMHVKRGEIMESVGTQLSDSIYLRSLCSTETYKYLGMSEALGINATSVKQSLKERFFGRLNKVLNSLLSGGNKVRAFNGWVMPVLMYSFGILKWTQTELDALDRRVRSLLTANRMHHPRSSVMRLYIPRKCGGRGFLNAKTLHNREVCSLREYFLEADVGMHRDVVAVDKGLTPLSLANENWRKPVVLDTNDRREVWQSKELHGRFYRVLHGPDVDFLASVAWLRFGDLFGETEGFICAITDEVMMTNNYRKYIVKDGTVDICRACHRPGESIRHIISGCSSLANGDYLHRHNLVARIIHQQLALKYNLVESEVPYYRYVPDPVLENGNCTLYWDRSIITDRTIVANKPDIVVIDRLERRAMIVDIAVPHDENLVKAEKDKQSKYLDLAREVVDMWNVNTAVIVPIIVTANGIIAKSLDQHLKRLSLGSWIKGLIQKAVLLDTARIVRRFLSREP

SEQ ID NO: 11223 - protein, 1196 aa, Hecatera dysodea
MLTRAAARRARLPPPASSLSSASPPPEPSPTVSAATPAVAVASSSSDEYFSPPTSPPPARRRRGRRPPDGLGPRGPPVSDRVPAPGGSVQRMRWTQTINENVMRSYYGATEGGTNLTAYRGRMLSLFQVLEPAVNVSAQRLSDQVRVIQRNRMLDDSVLDRLRTEICSHVIVPSPQTVAPPQLTQIPCHADEENNDRVMNVSTQCNDELRSALESAIREYRYVSPELRPRIPRLPMHNKNRALVAALDSQLSNYFDNCGDLTDAHSIMYCAAVAACRVAHVKMPSDRVTRPKVAVPAWQCRIERRIGGARALIGKLICFREGNTRPRVMRFVRRAFSGTDISPSDYLSRVTERIDFLKQKVYAWANRIRRYKRRVERYTQNRTFRSNERWVYKAWERPDQDVTDMHPPDDDAMCSFWRNIWSLPVSHTEGDWIREVERACDPLPEMGAIIISPQDVARAVRPLPNWKSPGPDGLHNFWIKWFKGSHACLASRYQAALESGSLPEFFMTGVTHLLHKSGSTTEPKNYRPITCLPTVYKVLTSILRDKINQHINSNNIMSASQNGCRNGSRGTKELLLIDMVISQQVRRSRKDLSTCWIDYKKAYDSVPHSWLMRVLELYKIDTTLRTFLMSCMGQWRTVLRYPGCRNIQRNSEPVRIERGIFQGDSLSPLWFCLALNPLSTLLENSGLGYRLRRGGQVISHLLYMDDLKLFAPTNLQLMELLKVTETFSNAIRMEFGVDKCAVMHVKRGEIMESVGTQLSDSINLRSLSSTETYKYLGMSEALGINVTDMKQSLRERFFGRLKKVLNSLLSGGNKVRAFNGWVMPVLMYSFGVLKWTQTELDALDRRVRTLLTAYRMHHPRSSVMRLYIPRKCGGRGFLNAKTLHNREICSLREYFLAVDVGMHRDVVAVDKGLTPLSLANENWRKPAVLDTNDRRAVWQSKELHGRFFRALHGPDVDQLASVAWLRFGDLFGETEGFVCAIMDEVIMTRNYRRFIVKDGTVDICRACHRPGESIRHIVSGCSSLANGDYLHRHNLVARIIHQQLALKYSLVESEVPYYRYVPDPVLDNGNITLYWDRSIITDRTIVANKPDIVVVDRIVRRAMIVDITVPHDENLVKAEKDKQIKYLDLAREVVDMWDVDSAIIVPIVVSVNGLIAKSLDQHLRRLTLGGWIKGLIQKAVLLDTARIVRRFLSLEP

SEQ ID NO: 11224 - protein, 1200 aa, Hecatera dysodea
MLTRSRTRCQNTRVTPSDSSLSSASQPPGPTPPVSPEIPVAAVASSSSDEYFSPPTTPPPARRRGRGRPPNSLGPRGPPASDRVPAIGGSVQRMRWTHSINENVMRSYFGATEGGTNLTAYRGRMLSLFQVLEPAVNVSAQRLSDQVRVIQRNRMLDDAVLDRLRLESRSSRVSPASPPAAVQIQPSISPRPDHVGEDVDDGTISVSTQCNERLRSALEDAFREYRSTPPELRPRLPRLPMHNKNRALVCALDSQLSIYFDSSENLTDTHSILYCGAAAACRVAHVKLPNSDRVARPAVPAWQCRIERRIAEARALIGKLICFREGNTRRRVMRFVRRAFSGTDISPRDYLTRVTERIDFLKQKVYAWANRIRRYKRRVERYTQNRIFQNNERWVYRAWERPDQGVTDTRLPDDEAMLSFWRNIWSVPVSHTEGDWTREVERACDSIPEMGAINISPQDVARAVRPLPNWKSPGPDGLHNFWIKWLTRSHARLASQFQSALESRSLPQFFTTGITHLLHKSGSTAEPKNYRPITCLPTVYKVLTSILRAKINDHIESNSIMYTSQNGCRSGARGTKELLLIDVAISQQVRRSRKDLSTCWIDYKKAYDSVPHTWLMRVLELYKVDAVLRAFLMSCMGQWRTVLHYPGCRQTQANSEPIRIERGIFQGDSLSPLWFCLALNPLSTLLEGSGQGYRLRRGGQVISHLLYMDDLKLFAPNNLQLMKLLKVTETFSSDISMEFGVDKCAVMHVKRGEIMESVGTQLSDSIHLRSLCSTETYKYLGMSEALGINATSVKQSLKERFFGRLNKVLNSLLSGGNKVRAFNGWVMPVLMYSFGILKWTQTELDALDRRVRSLLTANRMHHPRSSVMRLYIPRKCGGRGFLNAKTLHNREVCSLREYFLEADVGMHRDVVAVDKGFTPLSLANENWRKPVVLDTNDRREVWQSKELHGRFYRVLHGPDVDFLASVAWLRFGDLFGETEGFICAITDEVMMTNNYRKYIVKDGTVDICRACHRPGESIRHIISGCSSLANGDYLHRHNLVARIIHQQLALQYNLVESEVPYYRYAPDPVLKNGNCTLYWDRSIITDRTIVANKPDIVVIDRLERRAMIVDIAVPHDENLVKAEKDKQSKYLDLAREVVDMWDVNTAVIVPIVVTANGIIAKSLDQHLKRLSLGSWIKGLIQKAVLLDTARIVRRFLSREP

SEQ ID NO: 11225 - protein, 1046 aa, Hecatera dysodea
MLDDAVLDRLRLESRSSRVSPASPPAAVQIQPSIAPRPDHVSEDVDDGTISVSTQCNERLRSALEDAFREYRSTPPELRPRLPRLPMHNKNRALVCALDSQLSIYFDSSENLTDTHSILYCGAAAACRVAHVKLPNSDRVARPAVPAWQCRIERRIAEARALIGKLICFREGNTRRRVMRFVRRAFSGTDISSRDYLTRVTERIDFLKQKVYAWANRIRRYKRRVERYTQNRIFQNNERWVYRAWERPDQGVTDTRQPDDEAMLSFWRNIWSVPVSHTEGDWTREVERACDSIPEMGAINISPQDVARAVRPLPNWKSPGPDGLHNFWIKWLTRSHARLASQFQSALESRSLPQFFTTGITHLLHKSGSTAEPKNYRPITCLPTVYKVLTSILRAKINDHIESNSIMSTSQNGCRSGARGTKELLLIDVAISQQVRRSRKDLSTCWIDYKKAYDSVPHTWLMRVLELYKVDAVLRAFLMSCMGQWRTVLHYPGCRQTQANSEPIRIERGIFQGDSLSPLWFCLALNPLSTLLEGSGQGYRLRRGGQVISHLLYMDDLKLFAPNNLQLMKLLKVTETFSSDISMEFGVDKCAVMHVKRGEIMESVGTQLSDSIHLRSLCSTETYKYLGMSEALGINATSVKQSLKERFFGRLNKVLNSLLSGGNKVRAFNGWVMPVLMYSFGILKWTQTELDALDRRVRSLLTANRMHHPRSSVMRLYIPRKCGGRGFLNVKTLHNREVCSLREYFLEADVGMHRDVVAVDKGFTPLSLANENWRKPVVLDTNDRREVWQSKELHGRFYRVLHGPDVDFLASVAWLRFGDLFGETEGFICAITDEVMMTNNYRKYIVKDGTVDICRACHRPGESIRHIISGCSSLANGDYLHRHNLVARIIHQQLALKYNLVESEVPYYRYAPDPVLENGNCTLYWDRSIITDRTIVANKPDIVVIDRLERRAMIVDIAVPHDENLVKAEKDKQSKYLDLAREVVDMWDVNTAVIVPIVVTANGIIAKSLDQHLKRLSLGSWIKGLIQKAVLLDTARIVRRFLSREP

SEQ ID NO: 11226 - protein, 1200 aa, Mythimna impura
MLTRAAARRARLPPPASSLSSASPPPEPSPTVSAVTPAVAVASSSSDEYFSPPTSPPPARRRRGRRPPSGLGPRGPPASDRVPAPGGSVQRMRWTQSINENVMRAYYGATEGGNNLTAYRVRMLSLFQVLEPAVNVSAQRLSDQVRVIQRNHMLDDTVLDRLRTEMSNHTIAPSSQSVVPVMVPPSYHLSGHVDEEITDMVTHVSTQCNNELRSALECAIREYRNMPLELRPRLPRLPMHNKNKALVAALDLQLSNYFDDCTDLTDTHSIMYCAAVAACRLAHVKFPNCDVATRPKPAVPAWQCRIERRIGGARALIGKLICFREGNTRPRVMRFVRRAFSGTDISPRDYMSRVTERIDFLKQKVYAWANRIRRYKRRVDRYTQNRTFRSNERWVYRAWERPDQGVTDACLPDDDAMSSFWRSIWSVPVSHTEGDWTREVERACDPIPQMGAIDISPQDVARAVRPLPNWKSPGPDGLHNFWIKWFTRSHARLAYQFQSALESGSLPQFLTTGITHLLHKSGSTAEPKNYRPITCLPTVYKVLTSILRSKINSHIDKNLIMSPSQNGCRNGSRGTKELLLIDMTISQQVRRSRKDLSTCWIDYKKAYDSVPHTWLMRVLELYKIDTTLRTFLMSCMRQWSTVLRYPGCRHTQRNSEPVRIERGIFQGDSLSPLWFCLALNPLSTLLENSGLGYRLKRGGQVISHLLYMDDLKLFAPNNLQLMELLKVTETFSSAIRMEFGVDKCAVMHVKRGEVVESVGTQLTDFINLRSLSPTETYKYLGMSEALGINITDMKQTLKERFFGRLKKVFNSLLSGGNKVRAFNGWVMPVLMYSFGVLKWTQTELDALDRKVRTLLTAYRMHHPRSSVMRLYIPRKCGGRGFLNAKTLHNREVCSLREYFLAADVGMHRDVVTVDKGLTPLSLANENWRKPVVLDTNDRREVWQSKELHGRFFRALHGPDVDQLASVAWLRSGDLFGETEGFVCAIMDEVIMTNNYRRFIVKDGTVDICRACHRPGESIRHIISGCSRLANGEYLHRHNLVARIIHQQLALKYSLVESEVPYYRYEPDPVLDNGHITLYWDRSIITDRTIVANKPDIVVVDRSERRAMIVDISVPHDENLVKAEKDKQIKYIDLAREVVDMWDVDSAIIVPIVVSGNGLIAKSLDQHLRRLALGDWIKGLIQKAVLLDTARIVRRFLSLEP

SEQ ID NO: 11227 - protein, 1200 aa, Mythimna impura
MLTRAAARRARLPPPASSLSSASPPPESSPTVSAVTPAVAVASSSSDEYFSPPTSPPPARRRRGRRPPSGLGPRGPPASDRVPAPGGSVQRMRWTQSINENVMRAYYGATEGGNNLTAYRVRMLSLFQVLEPAVNVSAQRLSDQVRVIQRNHMLDDTVLDRLRTEMSNHAIAPSSQPVVPVMVPPSYHLSDHADEEITDMVTHVSTQCNNELRSALECAIREYRNMPLELRPRLPRLPMHNKNKALVAALDLQLSNYFDDCEDLTDTHSIMYCAAVAACRVAHVKFPSCDVSTRPKPAVPAWQCRIERRIGGARALIGKLICFREGNTRPRVMRFVRRAFSGTDISPRDYMSRVTERIDFLKQKVYAWANRIRRYKRRVERYTQNRTFRSNERWVYRAWERPDQGVTDTRLPDDDAMSSFWRSIWSVPVSHTEGDWTREVERACDPIPQMGAIDISPQDVARAVRPLPNWKSPGPDGLHNFWIKWFTRSHARLAYQFQSALESGSLPQFLTTGITHLLHKSGSTAEPKNYRPITCLPTVYKVLTSILRSKINSHIDKNLIMSPSQNGCRNGSRGTKELLLIDMTISQQVRRFRKDLSTCWIDYKKAYDSVPHTWLMRVLELYKIDTTLRTFLMSCMRQWSTVLRYPGCRHIQRNSEPVRIERGIFQGDSLSPLWFCLALNPLSTLLENSGLGYRLKRGGQVISHLLYMDDLKLFAPNNLQLMELLKVTETFSSAIRMEFGVDKCAVMHVKRGEVVESVGTQLTDSINLRSLSPTETYKYLGMSEALGINITDMKQSLKERFFGRLKKVFNSLLSGGNKVRAFNGWVMPVLMYSFGVLKWTQTELDALDRRVRTLLTAYRMHHPRSSVMRLYIPRKCGGRGFLNAKTLHNREVCSLREYFLATDVGMHRDVVTVDKGLTPLSLANENWRKPVVLDTNDRREVWQSKELHGRFFRAFHGPDVDQLASVAWLRFGDLFGETEGFVCAIMDEVIMTNNYRRFIVKDGTVDICRACHRPGESIRHIISGCSRLANGEYLHRHNLVARIIHQQLALKYSLVESEVPYYRYEPDPVLDNGHITLYWDRSIITDRTIVANKPDIVVVDRSERRAMIVDISVPHDENLVKAEKDKQIKYIDLAREVVDMWDVDSAIIVPIVVSANGLIAKSLDQHLRRLALGGWIKALIQKAVLLDTARIVRRFLSLEP

SEQ ID NO: 11228 - protein, 1200 aa, Mythimna impura
MLTRSRAQKLHTHPTSSGSSLSSASQPPGPAPTVSPEIPVAAVASSSSDEYFSPPMTPPPARRRGRGRPPASLGPRGPPASDRVPAAGGSVQRMRWTSSINENVMRSYFGATEGGINLTAYRGRMLSLFQVLEPAVNVSVQRLSDQVRVIQRNRMLDDAVLDRLRLESQSSRVSPATTPAAVQRLPTASPRPDQVGDADDDAAISVSTQCNDRLRGALEDAFREYRSTPPGLRPRLHRLPMHKRNRALVCALDSQLSNCFDSSKDLTDTHSILYCAAVAACRVAHVKFPNCDRATRPAVPAWQCRIEHRIGEARALIGKLICFREGNTRPRVMRFVRRAFSGTDISPRDYLPYVTERIDFLKQKIYAWANRIRRYKRRVERYTRNRTFQSNERWVYRDWERSDQGVTDTRLPDDDAMCSFWRSIWSAPVSHTEGDWIREVERACDLLPEMGAITISPQDVARAVRPLPNWKSPGPDGLHNFWVKWFQRSHARLASQFQSALESGSLPQFLTTGITHLLHKSGSTAEPKNYRPITCLPTVYKVLTSILRAKINSHIETNSIMSASQNGCRNGSRGTKELLLIDIAISQQVRRSRKNLSACWIDYKKAYDSVPHTWLMRVLELYKVDATLRTFLMSCMGQWRTVLHYPGCRQIQENNEPIRIERGIFQGDSLSPLWFCLALNPLSTLLEGSGLGYRLKRGGQVISHLLYMDDLKLFAPNNLQLVELLKVTETFSSAIRMEFGVDKCAVIHVKRGEIMESVGIQLSDSIHLRSLCSTETYKYLGMSESLGINTDDVKQSLKERFFGRLNKVLNSLLSGGNKVRAFNGWVMPVLMYSFGILKWTQTELDALDRRVRTLLTANRMHHPRSSVMRLYIPRKCGGRGFLNAKTLHNREVCSLREYFLKTDVGMHRDVVAVDKGLTPLSLANENWRKPIVLDTNDRREVWQSKELHGRFYRALHGPDVDLLASVSWLRFGDLFGETEGFVFAIMDEVMMTNNYRKYIVKDGTVDICRACHRPGESIRHIISGCSHLANGDYLHRHNLVARIIHQQLALKYNLVESEVPYYRYVPDPVLDNGNITLYWDRSIITDRTIVANKPDIVVIDRLERRTMIVDIAVPHDENLVKAEKDKQTKYLDLAREVVDMWEVDRAIIVPIVVTANGLIAKSLEQHLRRLSLGSWIKGLIQKAVLLDTARIVRRFLSQEP

SEQ ID NO: 11229 - protein, 1200 aa, Mythimna impura
MLTRAAARRARPPPPDSSLSSASPPPEPSPIVSAVTSAAAVASSSSDEYFSPPTTPPPARRRGGRRPPSGLGPRGPPASDRVPAPGGSVQRMRWTRSINENVMRSYYGATEGGNNLTAYRVRMLSLFQVLEPAVNVSAQRLSDQVRVIQRNHMLDDTVLDRLRTEMGSHAIASSSQTVAPSQVSPSNHLPNHADEESTDMVTHVSTQCSNELRSALECAIREYRKMPLELRPRLPRLPMCNKNKALVAALDSQLSNYFDDCEDLTDTHSIMYCAAVAACRVAHVKFPNSDVATRPKPAVPAWQCRIERRIGGARALIGKLICFREGNTRPRVMRFVRRAFSGTDISPRDYMSCVTERIDFLKQKVYAWANRIRRYKRRVERYTQNRTFRSNERWVYRAWEQPDQGGADTRLPDDDAMSSFWRNIWSVPVSHTEGGWTREVERACEPIPEMGAITISPQDVARAVRPLPNWKSPGPDGLHNFWIKWLQRSHARLASQYQTALESGSLPEFLTTGVTHLLHKSGSTAEPKNYRPITCLPTVYKVLTSILRAKINHHVDNNAIMSASQNGCRNGSRGTKELLLIDMAISQQVRRSRKDLSTCWIDYKKAYDSVPHTWLMRVLELYKIDATLRTFLMSCMRQWRTVLRYPGCRHIQRNSEPVRIERGIFQGDSLSPLWFCLALNPLSTLLENSGLGYRLKRGGQVISHLLYMDDLKLFAPNNLQLMELLKVTETFSSAIRMEFGVDKCAVMHVKRGEIVESVGTQLSDSINLRSLSPTETYKYLGMSEALGINATDMKQTLRERFFGRLKKVFNSLLSGGNKVRAFNGWVMPVLMYSFGVLKWTQTELDALDRRVRTLLTAYRMHHPRSSIMRLYIPRKCGGRGFLNAKTLHNREVCSLREYFLTADVGMHRDVVAVDKGLTPLSLANESWRKPVVLDTKDRREVWQSKELHGRFFRALHGPDVDQLASVAWLRVGDLFGETEGFVCAIMDEVIMTNNYRRFIVKDGTVDICRACHRPGESIRHIISGCSRLANGEYLHRHNLVARIIHQQLALNYSLVESEVPYYRYVPDPVLDNGDITLYWDRSIITDRTIVANKPDIVVVDRRERRTMIVDISVPHDENLVKAEKDKQIKYIDLAREVVDMWDVDSAIIVPIVVSANGLIAKSLDQHLRRLALGGWIKGLIQKAVLLDTARIVRRFLSLEP

SEQ ID NO: 11230 - protein, 1200 aa, Mythimna impura
MLTRSRAREQETHPTSSGSSLSSASQPPGPAPAVSPVIPAAAVASSSSDEYFSPPTTPPPARRRGRGRPPASLRPRGPPASDRVPAAGGSVQRMRWTQSINENVMRSYFGATEGGSNLTAYRGRMLSLFQVLEPTVNVSAQRLSDQVRVIQRNHMLDDAVLDRLRLESQRSRASSATPPAAVQLQPSALPRPDHVGDADDDAAISVSTQCNERLRSALEDAFREYRSTPPGLRPRLPRLPMHKRNRALVCALDSQLSNCFDSSKDLADTHSILYCAAAAACRVAHVKFPNCDRATRPAVPAWQRRIERRIGEARALIGKLICFREGNTRPRVMRFVRRAFLGTDISPQNYLPCVTERIDFLKQKVYAWASRIRRYKRRVERYTQNRTFQSNERWVYRTWERPDQDVTDTRLPDDDAMCSFWRRIWSVPVSHIEGDWIREVERTCDLLPEMGAITISPQDVARAVRPLPNWKSPGPDGLHNFWIKWFQGSHARLASQFQSALESGSLPEFLTTGITHLLHKSGSTADPKNYRPITCLPTVYKVLTSILRAKINTHIETNSIMSASQNGCRNVSRGTKELLLIDMAISQQVRRSRKDLSTCWIDYKKAYDSVPHTWLMRVLELYKVDTTLRTFLMSCMRQWRTVLHYPGCRQIRENSEPIRIERGIFQGDSLSPLWFCLALNPLSTLLEGSGLGYRLKRGGQVISHLLYMDDLKLFALNNLHLMELLKVTETFSNAIRMEFGVDKCAVMHVKRGEIMESVGTQLSDSIYLRSLCSTETYKYLGMSEALGINAADVKQSLKERFFGRLNRVLKSLLSGGNKVRAFNGWVMPVLMYSFGILKWTQTELDALDRKVRTLLTANRMHHPRSSVMRLYIPRKCGGRGFLNAKTLHNREVCSLREYFLETDVGMHRDVVVVDKGLTPLSLANGNWRKPIILDTNDRREVWQSKELHGRFYRALHGPDVDLLASVSWLRFGDLFGETEGFVCAIMDEVVMTNNYRKYIVKDGTADICRACHRPGESIRHIISGCSHLANGDYLHRHNLVAKNIHQQLALKYNLVESEVPYYKYVPDPVLDNGSITLYWDRSIITDRTIVANKPDIVVIDRLERRTVIVDIAVPHDDNLVKAEKDKQTKYLDLAREVVDMWEVDTAVIVPIVVTANGLISKSLDQHLRRLSLGSWIKGLIQKAVLLDTARIVRRFLSQEP

SEQ ID NO: 11231 - protein, 1200 aa, Mythimna impura
MLTRAAARRARPPPPASSLSSASPPPEPCLTVSAVTPAVAAASSSSDEYYSPPTTPPPTRRRGERRPPACLGSRGPPASDRVPATGGCVSRMRWTQSINENVMRAYYGATEGGNNLTAYRVRMLSLFQVLEPAVNVSAQRLSDQVRVIQRNHMLDDTVLDRLRTEMGSHAIASSSQTAVPSQVSPSNHLPNHADEESTDMVTHVSTQCSNELRSALECAIREYRNMPLELRPRLPRLPMCNKNKALVAALDSQLSNYFDDCEDLTDTHSIMYCAAVAACRVAHVKFPNSDVATRPKPAVPAWQCRIERRIGGARALIGKLICFREGNTRPRVMRFVRRAFSGTDISPRDYMSCVTERIDFLKQKVYAWANRIRRYKRRVERYTQNRTFRSNERWVYRAWEQPDQSVTDTRLPDDDAMSSFWRNIWSVPVSHTEGGWTREVERACEPIPEMGAITISPQDVARAVRPLPNWKSPGPDGLHNFWIKWLQRSHARLASQYQTALESGSLPEFLTTGVTHLLHKSGSTAEPKNYRPITCLPTVYKVLTSILRAKINHHVDNNAIMSASQNGCRNGSRGTKELLLIDMAISQQVRRSQKDLSTCWIDYKKAYDSVPHTWLMRVLELYKIDTTLRTFLMSCMRQWRTVLRYPGCRHIQRNSEPVRIERGIFQGDSLSPLWFCLALNPLSTLLENSGLGYRLKRGGQVISHLLYMDDLKLFAPNNLQLMELLKVTETFSSAIRMEFGVDKCAVMHVKRGEIVESVGTQLSDSINLRSLSPTETYKYLGMSEALGINATDMKQTLRERFFGRLKKVFNSLLSGGKKVRAFNGWVMPVLMYSFGVLKWTQTELDALDRRVRTLLTAYRMHHPRSSVMRLYIPRKCGGRGFLNAKTLHNREVCSLREYFLAADVGMHRDVVAVDKGLTPLSLANESWRKPVVLDTNDRREVWQSKELHGRFFRALHGSDVDQLASVAWLRVGDLFGETEGFVCAIMDEVIMTNNYRRFIVKDGTVDICRACHRPGESIRHIISGCSRLANGEYLHRHNLVARIIHQQIALKYSLVESEVPYYRYMPDPVLDNGDITLYWDRSIITDRTIVANKPDIVVVDRRERRTMIVDISVPHDENLVKAEKDKQIKYIDLAREVVDMWDVDSAIIVPIVVSANGLIAKSLDQHLRRLALGGWIKGLIQKAVLLDTARIVRRFLSLEP

SEQ ID NO: 11232 - protein, 1200 aa, Mythimna impura
MLTRSRAQKLHTHPTSSGSSLSSASQPPGPAPTVSPEIPVAAVASSSSDEYFSPPTTPPPARRRGRGRPPASLGPRGPPASDRVPAAGGSVQRMRWTSSINENVMRSYFGATEGGINLTAYRSRMLSLFQVLEPAVNVSVQRLSDQVRVIQRNRMLDDAVLDRLRLESQSSRVSPATTPAAVQRLPTASPRPVQVGDADDDAAISVSTQCNDRLRGALEDAFREYRSTKPGLRPRLPRLPMHKRNRALVCALDSQLSNCFDSSKYLTDTHSILYCAAVAACRVAHVKFPNCDRATRPAVPAWQCRIEHRIGEARALIGKLICFREGNTRPRVMRFVRRAFSGTDISPRDYLPCVTERIDFLKQKIYAWANRIRRYKRRVERYTRNRTFQSNERWVYRDWERSDQGVTDTRLPDDDAMRSFWRSIWSAPVSHTEGDWIREVERACDLLPEMGAITISPQDVARAVRPLPNWKSPGPDGLHNFWVKWFQRSHARLASQFQSALESGSLPQFLTTGITHLLHKSGSTAEPKNYRPITCLPTVYKVLTSILRAKINSHIETNSIMSASQNGCRNGSRGTKELLLIDIAISQQVRRSRKNLSACWIDYKKAYDSVPHTWLMRVLELYKVDATLRTFLMSCMGQWRTVLQYPGCRQIQENNEPIRIERGIFQGDSLSPLWFCLALNPLSTLLEGSGLGYRLKRGGQVISHLLYMDDLKLFAPNNLQLVELLKVTETFSSAIRMGFGVDKCAVIHVKRGEIMESVGIQLSDSIHLRSLCSTETYKYLVMSESLGINTDDVKQSLKERFFGRLNKVLNSLLSGGNKVRAFNGWVMPVLMYSFGILKWTQTELDALDRRVRTLLTANRMHHPRSSVMRLYIPRKCGGRGFLNAKTLHNREVCSLREYFLKTDVGMHRDVVAVDKGLTPLSLANENWRKPIVLDTNDRREVWQSKELHGRFYRALHGPDVDLLASVSWLRFGDLFGETEGFVFAIMDEVMMTNNYRKYIVKDGTVDICRACHRPGESIRHIISGCSHLANGDYLHRHNLVARIIHQQLALKYNLVESEVPYYRYVPDPVLDNGNITLYWDRSIITDRTIVANKPDIVVIDRLERRTMIVDIAVPHDENLVKAEKDKQTKYLDLAHEVVDMWEVDKAIIVPIVVTASGLIAKSLEQHLRRLSLGSWIKGLIQKAVLLDTARIVRRFLSQEP

SEQ ID NO: 11233 - protein, 1201 aa, Phlogophora meticulosa
MLTRSRARVLNAPITSSGSSLSSASQLPGPAPDVSPVTPAAAVASSSSDEYYSPPTSPSPVRRCGRGRPPASLGLRGPPASARVPASGGSVQRMRWTQSINENVMRSYYGATEGGTNLTAYRSRMLSLFQVLEPAVNVSAQRLSDQVRVIQRNHMLDDTVLDRLRLNSRSNRVMPASPLVAVQLPSLPIVSPRPDYVGEEDDDAAIPVSSQCVRLRSALEDAFREYRSTPPELRQRLPRLPMHKKNKALMCALDSLLSNSFDNSKDLADTHSILYCAAAAACRVANVKFPNSKKATRPAVPAWQCRIERRIGEARVLIGKLICFREGNTRPRVMRFVRRAFSGTDISSRDYLTRVTERIDFLKQKICAWANRIRRYKRRVERYTQNRTFRSDERWVYRAWERPDQGVIDTCLPDDEAMYSFWRSIWSVPVSHTEGDWTREVERACEPLPVMGTINISPQDVACAVCPLPNWKSPGPDGLHNFWIKWLKSSHARLATQFQSALESGSLPQFLTTGITHLLHKSGSTAEPKNYRPITCLPTVYKVLTSILRSKINNHIETSSIMSVSQNGCKNGSRGTKELLLIDMAISQQVRRSRKDLSTCWIDYKKAYDSVPHTWLMRVLELYKIDATLRTFLTSCMRQWRTVLHYPGCRQFRENSEPIRIERGIFQGDSLSPLWFCLALNPLSTQLEGSGLGYRLRRGTQVISHLLYMDDLKLFAPNNLQLMELLKVTETFSNAIRMDFGVDKCAVMHVKRGGIVESAGTQLSDSIYLRSLSSTETYKYLGMSEALGINAADMKQSLKERFFCRLNKVLNSLLSGGNKVRAFNGWVMPVLMYSFGILKWTQTELDALDRRVRTLLTANHMHHLRSSVMRLYISRKCGGRGFLNAKTLHNREVCSLRKYFIEADVGMHRDVVAVDKGLTPLSLANENWRKPIVLDTTDRMEIWKSKELHGRFYRVLHGPDVDLLASISWLRFGDLFGETEGFVCAIMDEVIMTNNYRKYIVKDGTVDICRACHRPGESIRHIISGCSRLANGEYLHRHNLVARIIHQQLALKYNLVELEVPYYKYVPDPVLENGNITLYWDRSIITDRTIVANKPDIVVTDRSERRTMIVDITVPHDENLVKAEKEKQMKYLDLAREVVDMWEVNTAVIVPIVVTANGIIAKSLDQHLRRLSLGSWIKGLIQKAVLLETARIVRRFLSQEP

SEQ ID NO: 11234 - protein, 1198 aa, Phlogophora meticulosa
MLTRSAARRARPPPPASSLSSASSPPKPSTIVSTVKPAVPVASSSSDEYFSPPTSPPPARRRRGRRPPDGLGPRGPPASDRVPAPGGSVQRMRWTQSINENVMRSYYGATEGGSNLTAYRVRMLSLFQVLEPAVNVSAQRLSDQVRVIQRNHMLDDVVLDRLRTEMQSSRVITSPSHTVVPPQYNIVLSSFADGEGSDKVTNVSTQYNEELRSALEGAIREYRFMLPALRPRLPRLPMHNKNRALVAALDSQLSNYFDNCDDLTDAHSILYCAAVAACRVAHVKFPYDIATRPKPAVPAWQCRIERRIAGARALIGKLVCYREGNTRPRVMRYVRRAFLGTDISPRDYMSRVTERIDFLKQKVYAWASRIRRYKRRVERYTQNRTFQSNERWVYRAWERPVQGVTDTHLPDDDVMCSFWRNIWSVPVSHTEGDWTREVERACDPIPQMGAITISPQDVARAVRPLPNWKSPGPDGLHNFWIKWLQKSHARLASQFQSALETGSLPQFLTTGITHLLHKSGSTAEPKNYRPITCLPTVYKVLTSILRVKINNHIDSNSIMSASQNGCRNGSRGTKELLLIDTAISQQVRRSRKDLSTCWIDYKKAYDSVPHTWLKRVLELYKVDATLRTFLTSCMGQWRTVLRYPGCRQIQRNSEPIRIERGIFQGDSLSPLWFCLALNPLSTLLEDSGLGYRLKRGGQVVSHLLYMDDLKLFAPSDLQLMELLTVTKTFSSAIRMEFGVDKCAVMHVKRGKIVESVGTQLPDFINFRALSPIETYKYLGMSEALGINAADMKQSLKERFFGRLKKVCNSLLSGGNKVRAFNGWVMPVLMFSFGILKWTQTELDALDRRVRTFLTASRMHHPRSSVMRLYIPRKCGGRGFLNAKTLHNREICSLRDYFLETDVGMHRDVVTVDQGLTPLSLAKENWRKPVVLDTNDRKEVWQSKELHGRFFQALHGPDVDQLASVSWLRFGDLFGETEGFVCAIMDEVIMTNNYRRFIVKDGTVDICRACHRPGESIRHIISGCSRLANEEYLHRHNLVARIIHQQLALKYSLVESEVPYYKYVPDPVLENGSVTLYWDRSIITDRTIVANKPDIVVMDRIERRATIIDVTVPHDGNLVKAEKDKQIKYLDLAREVVDMWDVDSAIVVPIVVSANGLIAKSLDQHLRRLALGSWIKGLIQKAVLLDTARIVRRFLSLEP

SEQ ID NO: 11235 - protein, 1209 aa, Xestia xanthographa
MITRSRAKQHQEAHPPSPGSSLSSASQPSGRATPVSIVSPVAAVASSSSDEFFSPPSTPSPSPRRGRRRGRGRPPAGLGPRGQQAPSRVPAAGGNVSRIRWTQSMNENVMRAYYGATEGGINLTAYRGQMLSLFQVLEPGVSASAQRLSDQVRVIQRNHMLDDTVLDRLRSESRSNLVTPASPLIAVQVQNVSSAPPRSDRDGEEDDSEVISVSTQCNAQLRSALESAFREYRSTPPELRPRLPRLPMHNKNKALVCALDSQLSNCFDSSKDLADTHSILYCGAMAACRVARVKFPNNDRATRPKLTAPAWQCRIERRIGEARALIGKLICFREGNTRPRVMRFVRRAFSGTDISFRDYLARVAERIDSLKQKICAWASRIRRYKRRVERYTQNRTFQSDERWVYRAWERPDQGVTDMRLPDDSAMCSFWRSIWSVPVSHTEGDWTREVEQACDPIPEMGAIVISPQDVARAVRPLPNWKSPGPDGLHNFWIKWFQRSHACLASQFQSALESGSLPQFLTTGITHLLHKSGSVAEPKNYRPITCLPTVYKVLTSILRAKINQHIESNSIMSASQNGCRNGSRGTKELLLIDMAISQQVRRSRKNLSTCWIDYKKAYDSVPHTWLMRVLELYKVDATLRTFLMSCMGQWRTVLRYPGCRQIQGNSEPIRIERGIFQGDSLSPLWFCLALNPLSTLLERSGLGYLLRRDGQVISHLLYMDDLKLFAPNNLQLMKLLKVTETFSSAIRMEFGVDKCAVMHVKRGEIMESVGTQLSDSIHLRPLSSTETYKYLGVSEALGINTADMKQSLRERFFGRLNKVLGSLLSGGNKVRAFNGWVMPVLMYSFGILKWTQTELDALDRRVRTLLTANRMHHPRSSVMRLYIPRKCGGRGFLNAKTLHNREVCSLREYFLEADGEMHRDVVSVDKGLTPLSLANENWRKPKVLDTNDRKVEWQGKELHGRFYRALHGPDVDFLASVSWLRFGDLFGETEGFVCAIMDEVMMTNNYRKYIVKDGTVDICRACHRPGESIRHIISGCSSLANGEYLHRHNLVARIIHQQLALKYNLVESEVPYYKYAPDPVLDNGHITLYWDRPITTDRTVVANRPDIVVIDRLECRTMIVDITIPHDENLVKAEKDKQFKYLDLAREVVDMWDVDTAVIVPIVVSANGLIAKSLDQHLRRLSLGSWIKGLIQKAVLLDTARIVRRFLSQEP

SEQ ID NO: 11236 - protein, 1000 aa, Xestia xanthographa
MVTNVTTQCNVEMRSALEGAIREYRFMQPDLRPRIPRLPMHNKNRALVAVLDSQLSNYFDNCEDLTDVHSILYCAAVAACRVAHVKFPSDRATRPKPAVPAWQYRIERRIGGARALIGKLVCFREGNTRPRVMRFVRQAFSGTDISPRDYMSRVTERIDFLKQKVYAWANRIRRYKRRVDRYTQNRTFQKDERWVYRAWERPDQGVADTHLPDDDAMCSFWRSIWSVPVSHAEGEWTRVIERACDPISEMGAITISPQDVARAVRPLPNWKSPGPDGLHNFWIKWFTRSHARLATLFQSALESGSLPEFLTTGITHLLHKSGSTAKPKNYRPITCLPTVYKVLTSILRTKISKHIDDNSVMSASQNGCRNGSRGTKELLLIDMAISHQVRRSRKDPSTCWIDYKKAYDSVPHTWLMRVLELFKVDATLRTFLMSCMGQWRTVLRYPGCRQIQRNSEPIRIERGIFQGDSLSPLWFCLALNPLRTLLEDSGLGYRLRKDGQVISHLLYMDDLKLFAPNDLRLMELLKVTETFSNAIRMEFGVDKCAVMHVKRGEIVESVGTQLSDSITLRSLSATETYKYLGMSEALGVNVADMKQSLKERFFGRLKKVLNSLLSGGNKVRAFNGWVMPVLMYSFGILKWTQTELDALDTKVRKLLTAYRMHHPRSSVMRLYIPRKCGGRGFLNAKTLHNREICSLREYFLGTDVGMHRDVVTMDKGLTPLSLAKENWRKPPVLDTNDRREVWQSKELHGRFFRVLHGPDVDLSASVAWLRSGDLFGETEGFVCAIMDEVMMTNNYRRFIVKDGTVDICRACHRPGESIRHIISGCSRLANGEYLHRHNLVARIIHQQLALKYNLVESEVPYYRYVPDPVLDNGCITLYWDQSIITDRTIVANKPDIVVVDRSERRAMIVDITVPHDENLVKAEKDKQIKYLDLAREVVDMWEVDSAIIVPIVVSAHGLIAKSLDQYLRRLSLGSWIKGLIQKAVLLDTARIVRRFLFLEP

SEQ ID NO: 11237 - protein, 1198 aa, Xestia xanthographa
MLTRSAAARRARLPPPDSSLSSASPPPEPSPIVSAVTPAVAVASSSSDEYFSPPTTPPPARRRGGRRPPDGLGPRGPPASDRVPAPGGSVQRMRWTQSINENVMRAYYGATEGGNNLTAYRVRMLSLFQVLEPAVNVSAQRLSDQVRVIQRNRMLDDTVLDRLRTEIQSNHVIATPSQAVVPPQSSIIPNCNNDVSNDMVTNVSTQCNVEMRSALEGAIQEYRFMQPDLRPRIPRLPMHNKNRALVAVLDSQLSNYFDNCEDLIDVHSILYCAAVAACRVAHVKFPSDRATRPKPAVPAWQYRIERRIGGARALIGKLVCFREGKTRPRVMRFVRQAFSGTDISPRDYMSRVTERIDFLKQKVYAWANRIRRYKRRVDRYTQNRTFQKDERWVYRAWERPDQGVADTHLPDDDAMCSFWRSIWSVPVSHSEGEWTRVIERACDPISEMGALAISPQDVARAVRPLLNWKSPGPDGLHNFWIKWFTRSHARLATLFQSALESGSLPEFLTTGITHLLHKSGSTAEPKNYRPITCLPTVYKVLTSILRTKISKHIDDNSVMSASQNGCRNGSRGTKELLLIDMAISHQVRRSRKNLSTCWIDYKKAYDSVPHTWLMRVLELYKVDATLRTFLMSCMGQWRTVLRYPGCQQIQRNSEPIRIERGIFQGDSLSPLWFCLALNPLSTLLEDSGLGYRLRKDGQVISHLLYMDDLKLFAPNDLRLMELLKVTETFSNAIRMEFGVDKCAVMHVKRGEIVESVGTQLSDSITLRSLSATETYKYLGMSEALGVNVADMKQSLKERFFGRLKKVLNSLLSGGNKVRAFNGWVMPVLMYSFGILKWTQTELDALDTKVRKLLTAYRMHHPRSSVMRLYIPRKCGGRGFLNAKTLHNREICSLREYFLGTDVGMHRDVVTMDKGLTPLSLAKENWRKPPVLDTNDRREVWQSKELHGRFFRALHGPDVDLSASVAWLRSGDLFGETEGFVCAIMDEVMMTNNYRRFIVKDGTVDICRACHRPGESIRHIISGCSRLANGEYLHRHNLVARIIHQQLALKYNLVESEVPYYRYVPDPVLDNGCITLYWDQSIITDRTIVANKPDIVVVDRSERRAMIVDITVPHDENLVKAEKDKQIKYLDLAREVVDMWEVDSAIIVPIVVSAHGLIAKSLDQYLRRLSLGSWIKGLIQKAVLLDTARIVRRFLSLEP

SEQ ID NO: 11238 - protein, 1204 aa, Cosmia trapezina
MMQTRAKTRIQAHPPSPDSSLSSASQPVRASTVSAVSPVAAVASSSSDEFFSPPSSPTPPRRRGRGRPPAGLGPRGQPAPNRVPAAGGNVSRMRWTQSINENVMRAYYGATEGGINLTAYRGRMLSLFQVLEPAVNVSAQRLSDQVRVIQHNHRLDNATLDRLRSEMQSSSASNPPPSQNVMHVPAEIPLRANQRDEEENARAISADNLCNVEIRSALEDAIREYRFTSPDLRPRLPRLPMNKKNRALVCALDALLPNFIESSADLCDTHSILYCTAVAACRVACVKFPNTDRATRPKPAAPAWQCRIERRINEARVLIGKLICFREGNTRPRVMRFVRRAFSGTNVSPQEYVSRVTERIDFLKQKVYAWANRIRRYRRRVDRYSQNRMFQSDERWVYRAWERPIPTQGVTDVRPPDNETMSAFWRSIWSVPVSHTEGDWMRIVEQACDSIPNMDAVTISPLDVACAVRPLPNWKSPGPDGLHNFWIKWLQRSHACLASQFQSSLETGSLPLLFTTGVTHLLHKSGSTAEPKNYRPITCLPTVYKVLTSILRAKIAHHIYNNSIMSVSQNGCRNGSRGTKELLLIDMTISQQVRRSRKDLSTCWIDYKKAYDSVPHTWLIRVLELYKIDATLRTFLMSCMGQWKTVLLYPGCRRIPGIDEPIRIERGIFQGDSLSPLWFCLALNPLSTLLEDSGLGYRLRRGGQVISHLLYMDDLKLFAPNNLRLMELLKVTENFSSAIRMEFGVDKCAVMHVKRGEIMESVGTQLSDSIHLRSLSSTETYKYLGMSEALGINVADMKQSLKERFFGRLKKVFNSLLSGGNKVRAFNGWVMPVLMYSFGVLKWTQTELDALDRRVRTLLTAYRMHHPRSSVMRLYIPRKCGGRGFLNAKTLHNREICSLREYFLEADVGMHRDVVAVDKGLTPLSLAKENWRKPAVLDTNDRKEVWQGKELHGRFFRALHGPDVDFLASVSWLRFGDLFGETEGFVCAIMDEVIMTNNYRKYIVKDGTVDICRACHHPGESIRHIVSGCSRLANGEYLHRHNLVARIIHQQLALQYNLVESEVPYYRYVPDPVLENGQATLYWDRSIITDRTIVANKPDIVVIDRRERRAIIVDIAVPHDENLVKAEKDKKIKYLDLAHEVVDMWDVDSAIIVPIIVTVNGLIAQSLDQHLRRLSLRGWIKGLIQKAVLLDTARIVRRFLSLEP

SEQ ID NO: 11239 - protein, 1202 aa, Cosmia trapezina
MKMLTRSATRRARLPPPDSSLSSASPPPVPSLTVSAVSTPATVVASSSSDEYFSPPTTPPPVRRRGGRRPPDGLGPRGPPASDRVPAPGGSVQRMRWTRAINENVMRSYYGATEGGNNLTAYRVRMHSLFQVLEPALNVSAQRLSDQVRVIQRNHMLDDTVLDRLRSEMQSSRVIAPLSQTIVAPPPPQCNTNQADEGSDDTAANVSTQCNEELRSALEGAIQEYRFVSPELRPRLPRLPMHNKNRALVAALDSQLSNYFDDCEDLTDTHSILYCAAVAACRVAHVKFANDSRATRPKPAVPAWQCRIERRIGGARALIGKLICFREGNTRPRVMRFVRRAFSGTDVSPQDYMSRVTERIDFLRQKVYAWANRIRRYKRRVDRYTQNRTFHSDERWVYRGWERPDQGVTDTRLPDDDAMCSFWRSIWSVPVGHTEGDWAREVERACDPIPEMGAITICPQDVARAVRPLPNWKSPGPDGLHNFWIKWFPGSHARLAAQYQSALQSGSLPQFLTTGITHLLHKSGSTAEPKNYRPITCLPTVYKVLTSILRAKINEHIDTNSIMSVSQNGSRNGSRGTKELLLIDMAISQQVRRSRKDLSTCWIDYKKAYDSVPHTWLMRVLELYKVDATLRTFLMSCMGQWRTVLRYPGCRNIQRNSEPIRIERGIFQGDSLSPLWFCLALNPLSTLLEDSGLGYRLRRGGQVISHLLYMDDLKLFAPNNLQLMELLKVTETFSSAIRIEFGVDKCAVMHVKRGEIVESVGTQLSDSINLRTLSAAETYKYLGMSEALGINVADMKQSLKERFFGRLKKVFNSLLSGGNKVRAFNGWVMPVLMYSFGILKWTQTELDALDRRVRTLLTAYRMHHPRSSVMRLYIPRKCGGRGFLNAKTLHNREICSLREYFLEADVGMHRDVVAVDKGFTPLSLAKENWRKPVVLDTNDRMEVWQSKELHGRFFRALHGPDVDLLASVAWLRSGDLFGETEGFVCAIMDEVIMTNNYRRFIVKDGTVDICRACHRPGESIRHIISGCSRLANEEYLHRHNLVARIIHQQLALKYSLVESEVPYYRYVPDPVLENGNITLYWDRSIITDRTIVANKPDIVVVDRTERRAMVVDITVPHDGNLVKAEKDKQIKYLDLAREVVDMWDVDSAIIVPIVVSANGLIAKSLDQHLRRLSLGSWIKGLIQKAVLLDTARIVRRFLSLEP

SEQ ID NO: 11240 - protein, 1205 aa, Cosmia trapezina
MLTRSRAQHLRNTHPTSSGSSLSSASQLPEPAPDVSQVIPAAAVASSSSDEYFSPPTTPPPVRRRGRGRPPASLGPRGPPASDRVPAPGGSVQRMRWTQTVNENVMRAYFGATEGGSNLTAYRGRMLSLFQVLEPAVNVSAQRLSDQVRVIQRNHMLDDVVLDRLRLESRNSRVTSDSPMVAVQLQNLPSASPRPDRVGEEDDSGAISVSSQCNVQLRSALEDAFREYRSTPPGLRPRLPRLPMHKKNKALVCALDSQLSNCFDGSKDLADTHSILYCAAVAACRVAHVKFHNNDRVTRPKPAVPTWQCRIERRIGEARALIGKLICFREGNTRPRVMRFVRRAFSGMDISPRDYLTCVTERIDFLKQKICAWANRIRRYRRRVERYTQNRTFQSDERWVYRAWERPDQGVADMQLPDDDAMCSFWRSIWSVPVSHTEGDWTREVERACDHIPQMGALTISPQDVARAVRPLPNWKSPGPDGLHNFWIKWFQRSHARLASQFQSALQSGSLPQFLTTGITHLLHKSGSTAEPRNYRPITCLPTVYKVLTSILRAKINKHIDTNSIMSASQNGCGNGSRGTKELLLIDMTISQQVRRSRKDLSTCWIDYKKAYDSVPHTWLMRVLELYKIDATLCTFLMSCMGQWRTVLRYPGCRNIQRNSEPIRIERGIFQGDSLSPLWFCLALNPLSTLLEDSGLGYRLRRGGQVISHLLYMDDLKLFAPNNLQLMELLKVTETFSSAIRMEFGVDKCAVMHVKRGEIVESVRTQLSDSIHLRSLSSLETYKYLGMSEALGINAADMKQSLRERFFGRLNKVLNSLLSGGNKVRAFNGWVMPVLMYSFGILKWTQTELDALDRRVRTLLTANRMHHPRSSVMRLYIPRKCGGRGFLNAKTLHNREVCSLREYFLEADVGMHREVVSVDKGLTPLSLANENWRKPIVLDTNDRREVWQSKELHGRFYRVLHGPDVDFLASVSWLRFGDLFGETEGFVFAIMDEVMMTNNYRKYIVKDGTVDICRACHRPGESIRHIISGCSRLANGDYLHRHNLVARIIHQQLALKYSLVESEVPYYRYVPDPVLENGNITLYWDRSIITDRTIVANKPDIVVIDRLERRTVIVDIAVPHDENLVKAEKDKQIKYLDLAREVVDMWDVDTAIIVPIVVTANGIIAKSLDQHLRRLSLGGWIKGLIQKAVLLDTARIVRRFLSQQP

SEQ ID NO: 11241 - protein, 1108 aa, Cosmia trapezina
MKWTRAINENVMRSYYGATEGGNNLTAYRVRMHSLFQVLEPALNVSAQRLSDQVRVIQRNHMLDDTVLDRLRNEMQSSRVIAPLSQTIVAPPPPQCNTTQADEGSDGTAANVSTQCNEELRSALEGAIQEYRFVSPELRPRLPRLPMHNKNRALVAALDSQLSNYFDDCEDLTDTHSILYCAAVAACRVAHVKFANDSRATRPKPAVPAWQCRIERRIGGARALIGKLICFREGNTRPRVMRFVRRAFSGTDVSPQDYMSRVTERIDFLRQKVYAWANRIRRYKRRVDRYTQNRTFQSDERWVYRGWERPDQGVTDTRLPDDDAMCSFWRSIWSVPVSHTEGDWAREVRRACDPIPEMGAITICPQDVARAVRPLPNWKSPGPDGLHNFWIKWFLGSHARLAAQYQSALQSGSLPQFLTTGITHLLHKSGSTTEPKNYRPITCLPTVYKVLTSILRAKINEHIDTNSIMSASQNGSRNGSRGTKELLLIDMAISQQVRRSRRDLSTCWIDYKKAYDSVPHTWLMRVLELYKVDATLRTFLMSCMGQWRTVLRYPGCRNIQRNSEPIRIERGIFQGDSLSPLWFCLALNPLSTLLEDSGLGYRLRRGGQVISHLLYMDDLKLFAPSNLQLMELLKVTETFSSAIRMEFGVDKCAVMHVKRGEIVESVGTQLPDSIHLRTLSAAETYKYLGMSEALGINVADMKQSLKERFFGRLKKVFNSLLSGGNKVRAFNGWVMPVLMYSFGILKWTQTELDALDRRVRTLLTAYRMHHPRSSVMRLYIPRKCGGRGFLNAKTLHNREICSLREYFLETDVGMHRDVVAVDKGLTPLSLAKENWRKPVVLDANDRMEVWQSKELHGRFLRALHGPDVNFLASVAWLRSGDLFGETEGFVCAIMDEVIMTNNYRRFIVKDGTVDICRACHRPGESIRHIISGCSRLANEEYLHRHNLVARIIHQQLALKYSLVESEVPYYRYVPDPVLENGHITLYWDRSIITDRTIVANKPDIVVVDRTERRAMIVDITVPHDGNLVKAEKDKQIKYIDLAREVVDMWDVDSAVIVPIVVSANGLIAKSLDQHLRRLSLGSWIKGLIQKAVLLDTARIVRRFLSLEP

SEQ ID NO: 11242 - protein, 1205 aa, Cosmia trapezina
MLTRSRAQHLRNTHPTSSGSSLSSASQLPEPAPDVSQVIPAAAVASSSSDEYFSPPTTPPPVRRRGRGRPPASLGPRGPPASDRVPAPGGSVQRMRWTQTVNENVMRAYFGATEGGSNLTAYRGRMLSLFQVLEPAVNVSAQRLSDQVRVIQRNHMLDDVVLDRLRLESRNSRVTSDSPMVAVQLQNLPSASPRPDRVGEEDDSGAISVSSQCNVQLRSALEDAFREYRSAPPGLRPRLPRLPMHKKNKALVCALDSQLSNCFDGSKDLADTHSILYCAAVAACRVAHVKFHNNDRVTRPKPAVPTWQCRIERRIGEARALIGKLICFREGNTRPRVMRFVRRAFSGMDISPRDYLTCVTERIDFLKQKICAWANRIRRYRRRVERYTQNRTFQSDERWVYRAWERPDQGVADTRLPDDDAMCSFWRSIWSVPVSHTEGDWTREVERACDHIPKMGALTISPQDVARAVRPLPNWKSPGPDGLHNFWIKWFQRSHARLASQFQSALQSGSLPQFLTTGITHLLHKSGSTAEPKNYRPITCLPTVYKVLTSILRAKINKHIDTNSIMSASQNGCGNGSRGTKELLLIDMTINQQVRRSRKDLSTCWIDYKKAYDSVPHTWLMRVLELYKIDATLRTFLMSCMGQWRTVLRYPGCRNIQRNSEPIRIERGIFQGDSLSPLWFCLALNPLSTLLEDSGLGYRLRRGGQVISHLLYMDDLKLFAPNNLQLMELLKVTETFSSAIRMEFGVDKCAVMHVKRGEIVESVRTQLSDSIHLRSLSSLETYKYLGMSEALGINAADMKQSLRERFFGRLNKVLNSLLSGGNKVRAFNGWVMPVLMYSFGILKWTQTELDALDRRVRTLLTANRMHHPRSSVMRLYIPRKCGGRGFLNAKTLHNREVCSLREYFLEADVGMHREVVSVDKGLTPLSLANENWRKPIVLDTNDRREVWQSKELHGRFYRVLHGPDVDFLASVSWLRFGDLFGETEGFVFAIMDEVMMTNNYRKYIVKDGTVDICRACHRPGESIRHIISGCSRLANGDYLHRHNLVARIIHQQLALKYSLVESEVPYYRYVPDPVLENGNITLYWDRSIITDRTIVANKPDIVVIDRLERRTVIVDIAVPHDENLVKAEKDKQIKYLDLAREVVDMWDVDTAIIVPIVVTANGIIAKSLDQHLRRLSLGGWIKGLIQKAVLLDTARIVRRFLSQQP

SEQ ID NO: 11243 - protein, 1200 aa, Cosmia trapezina
MLTRSATRKARLPPPDSSLSSASPPPVPSLTVSAVSTPAAVVASSSSDEYFSPPTTPPPARRRGGRRPPDGLGPRGPPASDRVPAPGGSVQRMRWTRAINENVMRSYYGATEGGNNLTAYRVRMHSLFQVLEPALNVSAQRLSDQVRVIQRNHMLDDTVLDRLRSEMQSSRVIAPLSQTIVAPPPPQCNTSQADEGSDGTAANVSTQCNEELRSALEGAIQEYRFVSPELRPRLPRLPMHNKNRALVAALDSQLSNYFDDCEDLTDTHSILYCAAVAACRVAHVKFANDSRATRPKPAVPAWQCRIERRIGGARTLIGKLICFREGNTRPRVMRFVRRAFSGTDVSPQDYMSRVTERIDFLRQKVYAWANRIRRYKRRVDRYTQNRTFQSDERWVYRGWERPDQGVTDTRLPDDDAMCSFWRSIWSVPVSHTEGDWAREVRRACDPIPEMGAITICPQDVARAVRPLPNWKSPGPDGLHNFWIKWFLGSHARLAAQYQSALQSGSLPQFLTTGITHLLHKSGSTTEPKNYRPITCLPTVYKVLTSILRAKINEHIDTNSIMSASQNGSRNGSRGTKELLLIDMAISQQVRRSRRDLSTCWIDYKKAYDSVPHTWLMRVLELYKVDATLRTFLMSCMGQWRTVLRYPGCRNIQRNSEPIRIERGIFQGDSLSPLWFCLALNPLSTLLEDSGLGYRLRRGGQVISHLLYMDDLKLFAPSNLQLMELLKVTETFSSAIRMEFGVDKCAVMHVKRGEIVESVGTQLSDSINLRTLSAAETYKYLGMSEALGINVADMKQSLKERFFGRLKKVFNSLLSGGNKVRAFNGWVMPVLMYSFGILKWTQTELDALDRKVRTLLTAYRMHHPRSSVMRLYIPRKCGGRGFLNAKTLHNREICSLREYFLETDVGMHRDVVAVDKGLTPLSLAKENWRKPVVLDANDRMEVWQSKELHGRFFRALHGPDVNLLASVAWLRSGDLFGETEGFVCAIMDEVIMTNNYQRFIVKDGTVDICRACHRPGESIRHIISGCSRLANEEYLHRHNLVARIIHQQLALKYSLVESEVPYYRYVPDPVLENGHITLYWDRSIITDRTIVANKPDIVVVDRTERRAMIVDITVPHDGNLVKAEKDKQIKYIDLAREVVDMWDVDSAVIVPIVVSANGLIAKSLDQHLRRLSLGSWIKGLIQKAVLLDTARIVRRFLSLEP

SEQ ID NO: 11244 - protein, 1230 aa, Mamestra brassicae
MNSNPKTTKKKNNSTKIELKNIIIWRRNCNIEDMLTRSRARHLATHPSPSASSLSSASPPPEPSPTVSAVTPAVAVASSSSDEYFSPPTTPPPARQRRGRRPPDGLGPRGPPASDRVPAPGGSVQRMRWTQSINESVMRSYFGATKGGTNLTAYRGRMLSLFQVLEPAVNVSAQRLSDQVRVIQRNRMLVDSVLDRLRMEMCGHVITPPSQTVAPPQSQISSHADEESNDRVTNVSTQCNEELRSALECAIREYRYVPPELRPRLPRLPMHNKNRALVAALDSQLSNYFDDCEDLTDAHSIMYCAAVAACRVAHVKITNDRVTRPKPAVSAWQCRIERRIGGARALIGKLICFREGNTRPRVMRFVRRAFSGTDISPRDYMSRVTERIDFLKQKVYAWANRIRRYRRRVERYTQNRTFRSNERWVYRVWEQPDHGVTDTRLPDDDAMCSFWRNIWSVPVSHTEGGWIREVERACDPLPEMGAITISPQDVARAVRPLPNWKSPGPDGLHKFWIKWLQRSHARLASQYQTALESGSLPEFLTTGVTHLLHKSGSTAEPKNYRPITCLPTVYKVLTSILRAKINNHINSNNIMSVSQNGCRNGSRGTKELLLIDMAISQQVRRSRKDLSTCWIDYKKAYDSVPHTWLMRVLELYKIDTMLRTFLMSCMGQWRTVLRYPGCRNIQRNSEPVRIERGIFQGDSLSPLWFCLALNPLSTLLENSGLGYRLKRGGQVLSHLLYMDDLKLFALSNLQLMELLKVTETFSSAIRMEFGVDKCAVMHVKRGEIMESVGTQLSDSINLRSLSSTETYKYLGMSEALGINVTDMKQSLKERFFGRLKKVFNSLLSGGNKVRAFNGWVMPVLMHSFGVLKWTQTELDALDRRVRTLLTAYRMHHPRSSVMRLYIPRKCGGRGFLNAKTLYNREICSLREYFLAVDVGMHRDVVAVDKGLTPLSLANENWRKPAVLDTNDRRAVWQSKELHGRYFRALHGPDVDQLASVAWLRFGDLFGETEGFVCAIMDEVIMTNNYRRFIVKDGTVDICRACHRPGESIRHIVSGCSRLANGEYLHRHNLVARIIHQQLALKYSLVESEVPYYRHAPDPVLDNGNITLYWDRSIITDRTIVANKPDIVVVDRIERRAMIVDITVPYDENLVKAEKDKQIKYIDLAREVVDMWDVDSAIIVPIVVSANGLIATSLDQHLRRLSLGSWIKGLIQKAVLLDTARIVRRFLSLEP

SEQ ID NO: 11245 - protein, 929 aa, Mamestra brassicae
MYCAAVAACRVAHVKMTNDRVTRPKPAVPAWQCRIERRIGGARALIGKLICFREGNTRPRVMRFVRRAFSGTVISPRDYMSRVTERIDFLKQKVYAWANRIRRYRRRVERYTQNRTFRSNERWVYRVWEQPDQGVTDTRLPDDDAMCSFWRNIWSVPVSHTEGGWIREVERACDPLPEMGAITISPQDVARAVRPLPNWKSPGPDGLHNFWIKWLQRSHARLASQYQTALESGSLPEFLTTGVTHLLHKSGSTAEAKNYRPITCLPTVYKVLTSILRAKINNHINSNNIMSVSQNGCRNGSRGTKELLLIDMAISQQVRRSRKDLSTCWIDYKKAYDSVPHTWLMRVLELYKIDTMLRTFLMSCMGQWRTGLRYPGCRNIQRNSEPVRIERGIFQGDSLSPLWFCLALNPLSTLLENSGLGYRLKRGGQVISHLLYMDDLKLFAPSNLQLMELLKVTETFSSAIRMEFGVDKCAVMHVKRGEIMESVGTQLSDSINLRSLSSTETYKYLGMSEALGINVTDMKQSLRERFFGRLKKVFNSLLSGGNKVRAFNGWVMPVLMHSFGVLKWTQTELDALDRRVRTLLTAYRMHHPRSSVMRLYIPRKCGGRGFLNAKTLHNREICSLREYFLAVDVGMHRDVVTVDKGLTPLSLANENWRKPAVLDTNDRRAVWQSKELHGRFFRALHGPDVDQLASVAWLRFGDLFGETEGFVCAIMDEVIMTNNYRRFIVKDGTVDICRACHRPGESIRHIVSGCSRLANGEYLHRHNLVARIIHQQLALKYSLVESEVPYYRYAPDPVLDNGNITLYWDRSIITDRTIVANKPDIVVVDRIERRAMIVDITVPHDENLVKAEKDKQIKYIDLAREVVDMWDVDSAIIVPIVVSANGLIATSLDQHLRRLSLGSWIKGLIQKAVLLDTARIVRRFLSLEP

SEQ ID NO: 11246 - protein, 868 aa, Noctua fimbriata
MRFVRRAFSGTDISPRDYMSRITERIDFLKQKVYAWANRIRRYKRRVDRYTQNRTFQRDERWVYRAWERPDQGVADTRLPDDDAMCSFWRSIWSVPVSHTEGEWTQGVERTCDLVPEMGAITISPQDVVRAVRPLPNWKSPGPDGLHNFWIKWFTRSHARLAILFQSALESGSLPEFLTTGITHLLHKSGSTAEPKNYRPITCLPTVYKVLTSILRAKINKHIDDNSIMSASQNACRNGSRGTKELLLIDMAISQQVRRSRSDLSTCWIDYKKAYDSVPHTWLMRVLELYKVDATLRTFLMSCMGQWRTVLRYPGCRQIQRNSEPIRIERGIFQGDSLSPLWFCLALNPLSTLLEDSGLGYRLRRGGQVISHLLYMDDLKLFAPNDLQLMELLKVTETFSSAIRMEFGVDKCAVMHVKRGEIVESVGTQLSDSINLRSLSATETYKYLGMSEALGINVADMKQSLKERFFGRLKKVFNSLLSGGNKVRAFNGWVMPVLMYSFGILKWTQTELDALDRRVRTLLTAYRMHHPRSSVMRLYIPRKCGGRGFLNAKTLHNREICSLREYFLETDVGMHRDVVAVDKGLTPLSLAKENWRKPLVLDTNDRMEVWQSKELHGRFFRALHGPDVDLSASVAWLRCGDLFGETEGFVCAIMDEVMMTTNYRRFIVKDGTVDICRACHRPGESIRHIISGCSRLANGEYLHRHNLVARIIHQQLALKYNLVESEVPYYKYVPDPVLENGSITLYWDQSIITDRTIVANKPDIVVVDRSERRTMIVDITVPHDENLVKAEKDKKIKYLDLAREVVDMWDVDSAIIVPIVVSAHGLIAKSLDQYLRRLSLGSWIKGLIQKAVLLDTARIVRRFLSLEP

SEQ ID NO: 11247 - protein, 1198 aa, Noctua fimbriata
MLTRSAARRARLSPPDPSLSSASPPPESSPVVSAVTPAVAVASSSSDEYFSPPTTPPPVRRRGGRRPPDGLGPRGPPASDRVPAPGGSVQRMRWTQSINANVMRAYYGATEGGNNLTAYRVRMLSLFQVLEPAVNVSAQRLSDQVRVIQRNRMLDDTVLDRLRTEMQSSHVIATPPPQAVVPPQSTIIPNRDNGVSNDMVTNVSTQCNEEMRSALEGAIREYRFMQPDLRPRVPRLPMHNKNRALVAVLDSQLSNYFDNCEDLTDAHSILYCAAVAACRVAHVKFYDDRATRPKPVVPPWQYRIERRIGGARALIGKLICFREGNTRPRVMRFVRRAFSGTDISPRDYMSRITERIDFLKQKVYAWASRIRRYKRRVDRYTQNRTFQRDERWVYRAWERPDQGVADTRIPDDDAMCSFWRSIWSVPVSHTEGEWTREVERACDLVPEMGAITISPQDVVRAVRPLPNWKSPGPDGLHNFWIKWFTRSHARLAILFQSALESGSLPEFLTTGITHLLHKSGSTAEPKNYRPITCLPTVYKVLTSILRAKINKHIDDNSIMSASQNGCRNGSRGTKELLLIDMAISQQVRRSRSDLSTCWIDYKKAYDSVPHTWLMRVLELYKVDATLRTFLMSCMGQWRTVLRYPGCRQIQRNSEPIRIERGIFQGDSLSPLWFCLALNPLSTLLEDSGLGYRLRRGGQVISHLLYMDDLKLFAPNDLQLMELLKVTETFSSAIRMEFGVDKCAVMHVKRGEIVESVGTQLSDSINLRSLSATETYKYLGMSEALGINVADMKQSLKERFFGRLKKVFNSLLSGGNKVRAFNGWVMPVLMYSFGILKWTQTELDALDRRVRTLLTAYRMDHPRSSVMRLYIPRKCGGRGFLNAKTLHNREICSLREYFLETDVGMHRDVVAVDKGLTPLSLAKENWRKPLVLDTNDRMEVWQSKELHGRFFRALHGPDVDLSASVAWLRCGDLFGETEGFVCAIMDEVMMTNNYRRFIVKDGTVDICRACHRPGESIRHIISGCSRLANGEYLHRHNLVARIIHQQLALKYNLVESEVPYYKYVPDPVLENGSITLYWDQSIITDRTIVANKPDIVVVDRSERRTMIVDITVPHDEKLVKAEKDKKIKYLDLAREVVDMWDVDSAIIVPIVVSAHGLIAKSLDQYLRRLSLGSWIKGLIQKAVLLDTARIVRRFLSLEP

SEQ ID NO: 11248 - protein, 1197 aa, Noctua fimbriata
MLTRAAAKRARLSPPDPSLSSASPPPESSPVVSAVTPAVAVASSSSDEYFSPPTTPPPVRRRGGRRPPDGLGPRGPPASDRVPAPGGSVQRMRWTQSINENVMRSYYGATEGGNNLTAYRVRMLSLFQVLEPAVNVSAQRLSDQVRVIQRNRMLDDTVLDRLRTETQSSHVITPSAQAVVLPQSSTIPNRDNDVSNDMVTNVSTQCNEEMRSALEGAIREYRFMQPDLRPRIPRLPMHNKNRALVAVLDSQLSNYFDNCEDLTDAHSILYCAAVAACRIAHVKFSDDRATRPKPAVPPWQYRIERRIGGARALIGKLICFREGNTRPRVMRFVRRAFSGTDISPRDYMSRITERIDFLKQKVYAWASRIRRYKRRVDRYTQNRTFQRDERWVYRTWERPDQGVADTRIPDDDAMCSFWRSIWSVPVSHTEGEWTREVERACDLVPEMGAITISPQDVVRAVRPLPNWKSPGPDGLHNFWIKWFTRSHARLAILFQSALESGSLPEFLTTGITHLLHKSGSTAEPKNYRPITCLPTVYKVLTSILRAKINKHIDDNSIMSASQNGCRNGSRGTKELLLIDMAISQQVRRSRRDLSTCWIDYKKAYDSVPHTWLMRVLELYKVDATLRTFLMSCMGQWRTVLRYPRCWQIQRNSEPIRIERGIFQGDSLSPLWFCLALNPLSTLLEDSGLGYQLRRGGQVISHLLYMDDLKLFAPNDLQLMELLKVTETFSSAIRMEFGVDKCAVMHVKRGEIVESVGTQLSDSINLRSLSATETYKYLGMSEALGINVADMKQSLKERFFGRLKKVFNSLLSGGNKVRAFNGWVMPVLMYSFGILKWTQTELDALDRRVRTLLTAYRMHHPRSSVMRLYIPRKCGGRGFLNAKTLHNREIRSLREYFLETDVGMHRDVVAMDKGLTPLSLAKENWRKPLVLDTNDRMEVWQSKELHGRFFRALHGPDVDLSASVAWLRSGDLFGETEGFVCAIMDEVMMTNNYRRFIVKDGTVDICRACHRPGESIRHIISGCSRLANGEYLHRHNLVARIIHQQLALKYNLVESEVPYYKYVPDPVLENGSITLYWDQSIITDRTIVANKPDIVVVDRSERRTMIVDITVPHDENLVKAEKDKKIKYLDLAREVVDMWDVDSAIIVPIVVSAHGLIAKSLDQYLRRLSLGSWIKGLIQKAVLLDTARIVRRFLSLEP

SEQ ID NO: 11249 - protein, 1198 aa, Noctua fimbriata
MLTRSAAARRARLLSPDPPLSSASPPPESSPIVSAVTPAVAVASSSSDEYFSPPTTPPPVRRRGGRRPPDGLGPRGPPASDRVPAPGGSVQRMRWTQSINENVMRSYYGATEGGNNLTAYRVRMLSLFQVLEPAVNVSAQRLSDQVRVIQRNRMLDDTVLDRLRTEMQSSHVITPSAQAVVLPQSSTITNRDNDVSNDMVTNVSTQCNEEMRSALEGAIREYRFMQPDLRPRIPRLPMHNKNRALVAVLDSQLSNYFDNCEDLTDAHSILYCAAVAACRVAHVKFFDDRATRPKPVVPSWQYRIERRIGGARALIGKLICFREGNTRPRVMRFVRRAFSGTDISPRDYMSRITERIDFLKQKVYAWASRIRRYKRRVDRYTQNRTFQRDERWLYRTWERPDQGVADTRIPDDDAMCSFWRSIWSVPVSHTEGEWTREVERACDLVPEMGAITISPQDVVRAVRPLPNWKSPGPDGLHNFWIKWFTRSHARLAILFQSALESGSLPEFLTTGITHLLHKSGSTAEPKNYRPITCLPTVYKVLTSILRAKINKHIDDNSIMSASQNGCRNGSRGTKELLLIDMAISQQVRRSRRDLSTCWIDYKKAYDSVPHTWLMRVLELYKVDATLRTFLMSCMGQWRTVLRYPGCRQIQRNSEPIRIERGIFQGDSLSPLWFCLALNPLSTLLEDSGLGYQLRRGGQVISHLLYMDDLKLFAPNDLQLMELLKVTETFSSAIRMEFGVDKCAVMHVKRGEIVESVGTQLSDSINLRSLSATETYKYLGMSEALGINVADMKQSLKERFFGRLKKVFNSLLSGGNKVRAFNGWVMPVLMYSFGILKWTQTELDALDRRVRTLLTAYRMHHPRSSVMRLYIPRKCGGRGFLNAKTLHNREICSLREYFLETDVGMHRDVVAMDKGLTPLSLAKENWRKPLVLDTNDRMEVWQSKELHGRFFRALHGPDVDLSASVAWLRSGNLFGETEGFVCAIMDEVMMTNNYRRFIVKDGTVDICRACHRPGESIRHIISGCSRLANGEYLHRHNLVARIIHQQLALKYNLVESEVPYYKYVPDPVLENGSITLYWDQSIITDRTIVANKPDIVVVDRSERRTMIVDITVPHDENLVKAEKDKKIKYLDLAREVVDMWDVDSAIIVPIVVSAHGLIAKNLDQYLRRLSLGSWIKGLIQKAVLLDTARIVRRFLSLEP

SEQ ID NO: 11250 - protein, 1207 aa, Atethmia centrago
MLTRSRARRLRQDTHPTSSVSSLSSASQLPEPAPDVSPVIPAAAVASSSSDEYFSPPTTPPPVRPRGRGRPPASLGLRGPLASDRVPAPGGSVQRMRWTQALNENVMRAYFGATEGGSNLTAYRGRMLSLFQVLEPAVNVSAQRLSDQVRVIQRKHMLDNVVLDRLRIESRNSHVSPASPLVAVQMQNLPGGSPRPDHADEEDDDEGISVSSQCNVRLRSALDDAFREYRSTPPGLRPRLPRLPMHKKNKALVCALDSQLSNYFDSSKDLTDTHSILYCAAVAACRVAQVKFPNSDRAPRPKPAVPAWQSRIERRIGETRALIGKLICFREGNTRPRVMRFVKRAFAGTDIRSSRDYLTRVTERIHFLKQKICAWANRIRRYRRRSERYTQNRTFQNDERWVYRTWERPDQGVADTRLPDDDAICSFWRNIWSVPVNHTEGDWTKRIERACDLIPEMGALTILPQDVAHAVRPLPNWKSPGPDGLHNFWIKWFQRSHARLASQFQSALESGSLPLFLTTGITHLLHKSGSTAEPKNYRPITCLPTVYKVLTSILRAKINKHIETNLIMSASQNGCKNGSRGTKELLLIDIAISQQVRRSRKDLSTCWIDYKKAYDSVPHTWLMRVLELYKVDATLRTFLMSCMRQWRTVLCYPGCRYIQRNSEPIRIKRGIFQGDSLSPLWFCLALNPLSTLLENSGLGYRLRRGGQVISHLLYMDDLKLFAPNNLQLMELLKVTKTFSSAIRMEFGVDKCAVMHVKRGGIVESVGTQLSDSIHLRSLSSTETYKYLGMSEALGINAADMKQSLRERFFGRLNKVLNSLLSGGNKVRAFNGWVMPVLMYSFGILKWTQTELDALDRRVRTLLTANRMHHPRSSVMRLYIPRKCGGRGFLNAKTLHNREICSLREYFLETDVVMHRDVVSVDKGLTPLSLADENWRKPIILDTNDRREVWQSKELHGRFYRVLHGPDVDLLASVSWLRFGDLFGETEGFVFAIMDEVIMTNNYRKYIVKDGTVDICRACHRPGESIRHIISGCSRLANGDYLHRHNLVAKIIHQQLALKYSLVESEVPYYRYAPDPVLENGNITLYWDRSIITDRTIVANKPDIVVIDRLTRRTMIIDIAVPHDENLVKAEKDKQIKYLDLAHEVVDMWDVDTAIIVPIVVTANGIIPKSLDQHLKRLSLGSWIKGLIQRAVLLDTARIVRRFLSQEP

SEQ ID NO: 11251 - protein, 1101 aa, Atethmia centrago
MRAYFGATEGGSNLTAYRDRMLSLFQVLEPAVNVSAQRLSDQVRVIQRNLMLDDVVLDRLRIESRNSHVSPASPLVAVQMQNLPGGSPRPDHADEEDDDEAISVSSQCNVRLRSASEDAFREYRSTPPGLRPRLPRLPMHKKNKTLVCALDSQLSHYFDNSKDVTDTHSILYCAAVAACRVAQFKFPNSDRAPRPKPAVPAWQSRIERRIGETRALIGKLICFREGNTRPRLMRFVKRAFAGTDILSSRDYLTRVTERIDFLKQKICAWANRIRRYRRRMERYTQNHTFQNDERWVYRTWERPDQGVADTRLPDDDAMCSFWQKIWSVPVNHTEGDWTKRIERACYLIPEMRALTILPQDVARAVRPLPNWKSPGPDGLHNFWIKWFQRSHARLVSQFQSALESGSLPLFLTTGITHLLHKSGSTAEPKNYRPITCLLTVYKVLTSILRAKISKHIETNLIMSASQNGCKNGSRGTKELLLIDIAINQQVRRTRKDLSTCWIDYKKAYDSVPHTWLMRVLELYKVDATLRTFLMSCMGQWRTVLCYPGCRYIQRNSEPIRIKRGIFQGDSLSPLWFCLALNPLSTLLENSGLGYRLRRGGQVISHLLYMDDLKLFAPNNLQLMELLKVTKTFSSAIRMEFGVDKCAVMHVKRGEIVESVGTQLSDSIHLRSLSSTETYKYLGMSEALGINAADMKQSLRERFFGRLNKVLNSLLSGGNKVRAFNGWVMLVLMYFFGILKWTQTELDAFDRRVRTLLTAKWMHHPRSSVMRLYILRKCGGRGFLNAKTLHNREICSLREYFLETDVVMHRDVVSVDKGLTPLSLADENWRKPIVLDTNDRREVWQSKELHGRFYRVLHGPDVDILASVSWLRFGDLFGETEGFVFAIMDEVIMTNNYRKYIMKDGTVDICRACHRPGESIRHIISGCSRLANGDYLHRHNLVARIIHQQLALKYSLVESEVTYYRYAPDPVLENGNITLYWDRSIITDRTIVANKPDIVVIDRLTRRTMIIDIAVLHDENLVKAEKDKQIKYLDLAHEVVDMWDVDTAIIVPIVVTANGIIAMSLDQHLKRLSLGSWIKGLIQRAVLLDTARIVRRFLSQEP

SEQ ID NO: 11252 - protein, 1198 aa, Atethmia centrago
MLTRSAAVRARLPPPDSSLSSASPPPVPSPTVCAVTTPTAAVASSSSDEYFSPPTTPPPVRRRGGRRPPDGLGSRGPPASDRVPAPGGSVKRMRWTQSVNENVMRSYYGATEGGNNLTAYRVRMLSLFQVLEPAVNVSAQRLSDQVRVIQRNHMLDDTVLDRLRSEMQRSHIIVPPSQTVVLSPQLSTNQADEGSDDRATNVSTQCNVELRSALEDAIREYRLMSPELRPRLPRLPMHKKNRALVAALDSQLSNYFDDCEDLTDTHSILYCAAVAVCRVAHVKFAKDSRTTRPKPTVPAWQCRIESRIGGARALIGKLICFREGNTRPRVMRFVRRAFSGTDIGPQDYMTRVTERIDFLKQKVYAWANRIRRYKRRVERYTQNRTFQSDERWVYRGWERPDQDVTDTRLPDDDVMCSFWRSIWSVPVSHTEGDWARKVERACDPIPEMGAITICPQDVARAVRPLPNWKSPGPDGLHNFWLKWFLRSHARLAAQYQTALESGSLPQFLTTGVTHLLHKSGSTAEPKNYRPITCLPTVYKLLTSILRAKINKHIDTNSIMSASQNGCRNGSRGTKELLLIDMIISQQVRHSRKDLSTCWIDYKKAYDSVPHTWLMRVLELYKVDATLRTFLISCMGQWRTVLRYPGCRNIQRNSEPIRIERGIFQGDSLSPLWFCLALNPLSTLLKDSGLGYRMRRGGQVISHLLYMDDLKLFASNNLQLMELLKITESFSSAIRMEFGVDKCAVMHVKRGKIVESVGTQLSDSINLRTLSASETYKYLGMSEALGINVTDMKQSLKERFFGRLKKVFNSLLSGGNKVRAFNGWVMPVLMYSFGILKWTQTELDALDRRVRTLLTAYRMHHPRSSVMRLYIPRKCGGRGFLNAKTLHNREVCSLREYFLEADVGMHRDVVAVDKGLTPLSLAKENWRKLVVLDTNDRREVWQSKELHGRFFRALHEPDVDFQASVAWLRFGDLFGETEGFVCAIMDEVIMTKNYRRFIVKDGTVDVCRACHRPGESIRHIISGCSRLANEEYLHRHNLVARIIHQQLALKYSLVESEVPYYRYVPDPVLDNGNITLYWDRSIITDRTIVANKPDIVVVDRTERRAMIVDITVPHDGNLVKAEKDKQIKYLDLAREVVDMWDVDSAIIVPIVVSANGLIAKSLDQHLKRLTLDGWIKSLIQKAVLLDTARIVRRFLSLES

SEQ ID NO: 11253 - protein, 868 aa, Atethmia centrago
MRFVRRAFSGTDIGPQDYMTRVTERIDFLKQKVYAWANRIRRYKRRVERYTQNRTFQSDERWVYRGWERPDQDVTDTRLPDDDVMCSFWRSIWSVPVSHTEGDWARKVERACDPIPEMGAITICPQDVARAVRPLPNWKSPGPDGLHNFWLKWFLRSHARLAAQYQTALESGSLPQFLTTGVTHLLHKSGSTAEPKNYRPITCLPTVYKLLTSILRAKINKHIDTNSIMSASQNGCRNGSRGTKELLLIDMTISQQVRRSRKDLSTCWIDYKKAYDSVPHTWLMRVLELYKVDATLRTFLISCMGQWRTVLRYPGCRNIQRNSEPIRIERGIFQGDSLSPLWFCLALNPLSTLLEDSGLGYRMRRGGQVISHLLYMDDLKLFASNNLQLMELLKITESFSSAIRMEFGVDKCAVMHVKRGKIVESVDTQLSDSINLRTLSASETYKYLGMSEALGINVTDMKQSLKERFFGRLKKVFNSLLSGGNKVRAFNGWVMPVLMYSFGILKWTQTELDALDRRVRTLLTAYRMHHPRSSVMRLYIPRKCGGRGFLNAKILHNREVCRLREYFLEADVGMHRDVVAVDKGLTPLSLAKENWRKLVVLDTNDRREVWQSKELHGRFFRALHEPDVDFQASVAWLRFGDLFGETEGFVCAIMDEVIMTKNYRRFIVKDGTVDVCRACHRPGESIRHIISGCSRLANEEYLHRHNLVARIIHQQLALKYSLVESEVPYYRYVPDPVLDNGNITLYWDRSIITDRTIVANKPDIVVVDRTERRAMIVDITIPHDGNLVKAEKDKQIKYLDLAREVVDMWDVDSAIIVPIVVSANGLIAKSLDQHLKRLTLDGWIKGLIQKAVLLDTARIVRRFLSLEP

SEQ ID NO: 11254 - protein, 1198 aa, Mesoligia furuncula
MLTRSALRKARLPPPDSSLSSASPPPVPSLTVSAVTTPAVAVASSSSDEYFSPLTTPPPARRRGGRRPPDGLGPRGPLASDRVPAPGGSVQRMRWTRSINENVMRSYYGATKGGNNLTAYRVRMLSLLQVLEPAVNVSAQRLSDQVRVIQRNHMLDDTVLDRLRNEMQSSHVIAPQPQTAVLLPQCNKNHADEGSNDRATNVSTQCNEELRSALEDAIREYRFMSPEHRPRLPRLPMHNKNRALVAALDSQLSNYFDDCEDLTDTHSILYCAAVAVCRVAHVKFANDSRATRPKPAIPAWQCRIERRIGVARALIGKLICFREGNTRPRVMRFVRRAFLGTDISPQDYMSCVTERIDFLKQKVYAWANRIRRYKRRVERYIQNRTFQSDERWVYRSWEQPDQSVADTCLPDDEAICSFWRSIWSVPVSHTEGDWAREVERACDPIPEMGAITICPQDVARAVRPLPNWKSPGPERLHNFGIKWFLRAHARLASQFQTALESGSLPQFLTTGITHLLHKSGSTTEPKNYRPITCLPTVYKVLTSILRAKIDKHINTNSIMSVSQNGCKNGSRGTKELLLIDMAISQQVRRSRKDLSTCWIDYKKAYDSVPHTWLMRVLELYKIDATLRTFLMSCMGQWRTVLRYPGCRNIQRNSEPIRIERGIFQGDSLSALWFCLALNPLSTLLENSGLGYRLRRGGQVISHLLYMDDLKLFAPNNLQLMELLKVTQTFSSAIRMEFGVDKCAVMHVKRGEIVESVGTQLSDSTNLRALSASETYKYLGMSEALGINVTDMKQSLKERFFGRLKKVLNSLLSGGNKVRAFNGWVMPVLMYSFGILKWTQTELDALDRRVRTLLTANRMHHPRSSVMRLYIPRKCGGRGFLNAKTLHNREICSLREYFLETDVGMHRDVVAVDKGLTPLSLAKENWRKPVVLDTNDRMEVWQSKELHGRFFRALHGPDVDLLASVAWLRFGDLFGETEGFVCAIMDEVMMTNNYRIFIVKDGTVDICRACHRPGESIRHIISGCSRLANGEYLHRHNLVARIIHQQLALKYSLVESEVPYYRYVPDPVLENGNISLYWDRTIITDRTIVANKPDIVVVDRSERRVMFVDITVPHDENLVKAEKDKQIKYLDLAREVVDMWDVDSAIIVPIVVTANGLIAKSLDQHLRRLSLGSWIKGLIQKAVLLDTARIVRRFLSLEP

SEQ ID NO: 11255 - protein, 1198 aa, Mesoligia furuncula
MLTRSALRKARLPPPDSSLSSASPPPVPSLTVSAVTTPAVAVASSSSDEYFSPPTTPPPARRRGGRRPPDGLGPRGPPASDRVPAPGGSVQRMRWTRSINENVMRSYYGATEGGNNLTAYRVRMLSLFQELEPAVNVSAQRLSDQVRVIQRNHMLDDTVLDRLRNEMQSSHVIAPQPQTAVLLPQCNTIHADEGSNDRATNVSTQYNEELRSALEDAIREYRFMSPEHRPRLPRLPMHNKNRAMVAALDSQLSNYFDDCEDLTDTHSILYCAAVAVCRVAHVKFANDSRATRPKPAIPAWQCRIERRIGGARALIGKLICFREGNTRRRVMRFVRRAFLGTDISPQDYMSCVTERIDFLKQKVYAWANRIRRYKRRVERYTQNRTFQSDERWVYRSWERPDQSVADTCLPDDEAMCSFWRSIWSVPVSHTEGDWAREVERACDPIPEMGAITICPQDVARAVRPLPNWKSPGPDGLHNFWIKWFLRSHARLASQFQTALESGSLPQFLTTGITHLLHKSGSTTEPKNYRPITCLPTVYKVLTSILRAKIDKHINTNSIMSVSQNGCKNGSRGTKELLLIDMAISQQVRRSRKDLSTCWIDYKKAYDSVPHTWLMRVLELYKIDATLRTFLMSCMGQWRTVLRYPGCRNIQRNSEPIRIERGIFQGDSLSPLWFCLALNPLSTLLEDSGLGYRLRRGGQVISHLLYMDDLKLFAPNNLQLMELLKVTQTFSSAIRMEFGVDKCAVMHVKRGEIVESVGTQLSDSTNLRALSASETYKYLGMSEALGINVTDMKQSLKERFFGRLKKVLNSLLSGGNKVRAFNGWVMPVLMYSFGILKWTQTEIDALDRRVRTLLTANRMHHPRSSVMRLYIPRKCGGRGFLNAKTLHNREICSLREYFLETDVGMHRDVVAVDKGLTPLSLAKENWRKPVVLDTNDRMEVWQSKELHGRFFRALHGPDVDLLASVAWLRFGDLFGETEGFVCAIMDEVMMTNNYRRFIVKDGTVDICRACHRPGESIRHIISGCSRLANGEYLHRHNLVARIIHQQLALKYSLVESEVPYYRYVPDPVLENGNISLYWDRSIITDRTIVANKPDIVVVDRSERRAMIVDITVPHDENLVKAEKDKQIKYLDLAREVVDMWDVDSAIIVPIVVTANGLIAKSLDQHLRRLSLGSWIKGLIQKAVLLDTARIVRRFLSLEP

SEQ ID NO: 11256 - protein, 1178 aa, Mesoligia furuncula
MSLLPRIQSFFISDTIEWCNNNNNKLSDEYFSPPTTPPPARRRGGRRPPDGLGPRGPPASDRVPAPGGSVQRMRWTQSINENGMRSYYGATEGGNNLTAYRVRMLSLFQVLEPAVNVSAQRLSDQVWVIQRNHMLDDTVLDRLRNETQSSHVIAPQSQTAVVLPQSNTNHADEGSNDRATNVSTQCNEELRSTLEDAIQEYRFMSPELRPRLPRLPMHNKNRALVAVLDSQLSNYFDGCEDLTDTHSILYCAAVAACRVAHVKFPNDSRATRPKPAVPAWQCRIERRIGGARALIGKLTCFREGNTRPRVMRFVRRAFLGTDISPQDYMSCVTERIDFLKQKVYAWANRIRRYKRRVERYTQNRTFQSDERWVYRDWERPDQSVTDTCLPDDDAMCSFWRSIWSVPVSHTESDWTREVERACDPIPEMGAITICPQDVARAVRPLPNWKSPGPDGLHNFWIKWFTRSHARLASQFQTALESGSLPQFLTTGITHLLHKSGSTAEPKNYRPITCLPTVYKVLTSILRVKIDNHINTNSIMSASQNGCINGSRGTKELLLIDMAISQQVRRFRKDLSTCWIDYKKAYDSVPHTWLMRVLELYKIDTTLRTFLMSCMGQWRTVLRYPGCRNIQRNSEPIRIERGIFQGDSLSPLWFCLALNPLSTLLEDSGLGYRLRRGGQVISHLLYMDDLKLFAPNNLQLMELLKITETFSSAIRMEFGVDKCAVMHVKRGEIVESVGTQLSDSTNLRALSASETYKYLGMSEALGINVSDMKQSLKERFFGRLKKVFNSLLSGGNKVRAFNGWVMPVLMYSFGILKWTQTELDAVDRKVRTLLTANRMHHPRSSVMRLYIPRKCGGRGFLNAKTLHNREICSLREYFLEIDVGMHRDVVAVDKGLTPLSLGKENWRKPVVLDTNDRMEVWQSKELHGRFFRALHGPDVDLLASVAWLRFGDLFGETEGFVCAIMDEVMMTNNYRRFIVKDGTVDICRACHRPGESIRHIISGCSRLANGEYLHRHNLVARIIHQQLALKYSLVESEVPYYRYVPDPVLENGNITLYWDRSIITDRTIVANKPDIVVVDRSERRAMIVDITVPHDENLVKAEKDKQIKYLDLAHEVVDMWDVDSAIIVPIVVTANGLIAKSLDQHLKRLSLGSWIKGLIQKAVLLDTARIVRRFLSLEP

SEQ ID NO: 11257 - protein, 1198 aa, Mesoligia furuncula
MLTRSALRKARLPPPDSSLSSASPPPVPSLTVSAVTTPAVAVASSSSDEYFSPPTTPPPARRRGGRRPPDGLGPRGPPASDRVPAPGGSVQRMRWTRSINENVMRSYYGATEGGNNLTAYRVRMLSLFQVLEPAVNVSAQRLSDQVRVIQRNHMLDDTVLDRLRNEMQSSHVIAPQPQTAVLLPQCNTNHADEGSNGRATNVSTQCNEELRSALEDAIREYRFMSPEHRPRLPRLPMHNKNRALVAALDSQLSNYFDDCEDLTDTHSILYCAAVAVCRVAHVKFANDSRATRPKPAIPAWQCRIERRIGGARALIGKLICFREGNTRPRVMRFVRRAFLGTDISPQDYMSCVTERIDFLKQKVYAWANRIRRYKRRVERYTQNRTFQSDERWVYRSWERPDQSVADTCLPDDEAMCSFWRSIWSVPVSHTEGDWAREVERACDPIPEMGAITICPQDVARAVRPLPNWKSPGPDGLHNFWIKWFLRSHARLASQFQTALESGSLPQFLTTGITHLLHKSGSTTEPKNYRPITCLPTVYKVLTSILRAKIDKHINTNSIMSVSQNGCKNGSRGTKELLLIDMAISQQVRRSRKDLSTCWIDYKKAYDSVPHTWLMRVLELYKIDATLRTFLMSCMGQWRTVLRYPGCRNIQRNSEPIRIERGIFQGDSLSPLWFCLALNPLSTLLEDSGLGYRLRRGGQVISHLLYMDDLKLFAPNNLQLMELLKVTQTFSSAIRMEFGVDKCAVMHVKRGEIVESVGTQLSDSTNLTALSASETYKYLGMSEALGINVTDMKQSLKERFFGRLKKVLNSLLSGGNKVRAFNGWVMPVLMYSFGILKWTQTELDALDRRVRTLLTANRMHHPRSSVMRLYIPRKFGGRGFLNAKTLHNREICSLREYFLETDVGMHRDVVAVDKGLTPLSLAKENWRKPVVLDTNDRMEVWQSKELHGRFFRALHGPDVDLLASVAWLRFGDLFGETEGFVCAIMDEVMMTNNYRRFIVKDGTVDICRACHRPGESIRHIISGCSRLANGEYLHRHNLVARIIHQQLALKYSLVESEVPYYRYVPDPVLENGNISLYWDRSIITDRTIVANKPDIVVVDRSERRAMIVDITVPHDENLVKAEKDKQIKYLDLAREVVDMWDVDSAIIVPIVVTANGLIAKSLDQHLRRLSLGSWIKGLIQKAVLLDTARIVRRFLSLEP

SEQ ID NO: 11258 - protein, 1199 aa, Spilarctia lutea
MLTRARRRAQLSPPDSSLRSALPSPEEAIEVPAGAEASSSSSSDEFFSPPTSPIPVRRQGRGRPPTSLGSRGPLTSNRAPAAGGDVRRMKWTHSINENVMRAYFRATELGTNLTAYRVRLVSLFQELEPAVNVSAQRLSDQVRAIQRCHLLDDAALERIRSDIRNSLTVPSSSHVLNVVTNSTPQVPQNDDISELVDSEIISVSTQYNDRIRSTLEDAIREYRYVNLNNRPRLSRLPMHKRNLALVSALDSLLPKYFSNSEDLSDTHSILYCAAIAVCRVAGVKFTEYTTTTRQENTLPAWQYRIERRIAEARTLIGKLMSFRSGNTRPRVMRFVKRAFLGTTISPQEYMSCVTERIDFLKQKVYAWANRIRRYRKRVDRYNQNRMFQRNEKWVYRKWENLSPCVSDGQVPDENATNSFWRNMWSVPVTHTEGDWYRDVERSCESLLPMEPISIDEEDVSCAVRSLPNWKAPGPDGLHNFWLKWFRSSHACLASQFQTALDSGSLPQFLTTGITHLLYKSGDAMDPKNFRPITCLPTLYKLLTSILRLKITTHINHNSILSISQNGCRSGTRGTKELLIIDMTISQQVRRNRKSLATCWIDYKKAFDSVPHTWLLKVLELYKIDTTLCTFLRVCMGQWRTALRYPGCRQSAMNDVLIKIERGIFQGDSLSPLWFCLALNPLSTLLEGSGLGYRLQKDDRVISHLFYMDDLKLLAPTKLQLTALLKVTENFSNSIKMEFGVDKCAVMYVKKGEIVESEGIELSDSTKLRSLSATETYKYLGFSQSLGMPESDMKQTLRERFFSRLKKVLKSLLSGGNKVRACNGWVMPVLMYSFGVLRWTQTELDAIDRRIRTLLTAFRMHHPRSSVMRLYIPRRLGGRGLLNIKTLHNREVYNLREYFLQTDVGVHRSVVTVDTGLTPLALAKENWRKPVVLSINDRREVWKGKVLHGRFYRALNGPDIDFKGSTSWLRYSDLFGETEGFVCAIMDEVIMTNNYRKYILKDGTVDICRACHRPGESIRHIISGCSRLANGEYLHRHNQVARIVHQQLALKYNLVISEVPYYRYVPDPVLENGRATLYWDRSIITDRTIVANKPDIVVIDRLERRAMIVDIAVPHDENLVKVEKEKQIKYLDLSHEIVDMWNVDSVIIVPIVVSAHGLIAKSLDQHLKRLTLGGWIKGLIQKAVLLDTARIVRRFLSLEP

SEQ ID NO: 11259 - protein, 1197 aa, Spilarctia lutea
MLTRARRRALITSPDSSLRSALPSPEEAIEVPAGAEASSSSSSDEFFSPPTSPIPVRRQGRDRPPTSLGSRGPLTSNRAPATGGDVRRMKWTHSINENVMRAYFRATELGTNLTAYRVRLVSLFQELEPAVNVSAQRLSDQVRAIQRCHLLDDAVLERIRSDVRNTLTIPSSSHTVDVVVNTPQLPDNHDVDEQRESEIISVSTQCNDRIRIALEDAIQEYRYVNYNNRPRLPRLPIHKRNLALVGALNSLLPDYFGNSENLSDTHSILYCAAIAVCRVVGVKFIERITTRTKNTVPAWQYRIERRIAETRTLIGKLISFKSGNTRPRVMRFVKQAFLGTTISPQQYMSSVTERIDFLKQKVCAWANRIRRYKKRGDRFNQNRMFQTNEKWVYRKWEAPNPCDRDGHLPDENATNTFWRNIWSVPVTHTDGDWMRDVKRSCESITNMEPVRINKEDVSCAVRSLPNWKAPGPDGLHNFWLKWFRSSHACLASQFQAALDSGSLPQFLTTGITHLLYKSGGTMDPKNFRPITCLPTLYKLLSSILRIKITTHINHNSILSISQNGCRSGTRGTKELLIIDMTISQQVRRNRRNLATCWIDYKKAYDSVPHTWLLKVLELYKIDKTLCTFLKSCMGQWRTVLRYPGCRQSPMTDVLIKIERGIFQGDSLSPLWFCLALNPLSTLLEGSELGYGLRKDDRVISHLLYMDDLKLLAPTKLQLTALLKITENFSNSIKMEFGVDKCAVMYVKKGLIVESEGVELSDSTKLRSLSVTEGYKYLGFTQSLGIPESDMKQALRERFFGRLKKVLKSLLSGGNKVRAYNGWVMPVLMYSFGILRWTQTELDALDRGVRTLLTAFRMHHPRSSVMRLYIPRKLGGRGLLNIKTLHNREIYNLREYFLHTDVGMHRSVVAVDTGLTPLALAKENWRKPVVLSTDDRREVWKGKELHGRFYRALHGPDIDFKTSTSWLRYGDLFGETEGFVCAIMDEVIMTNNYRKYILKDGTVDICRACHRPGESIRHIISGCSRLANGEYLHRHNQVARIVHQQLALKYNLVISEVPYYRYVPDPVLENGRATLYWDRSIITDRTIVANKPDIVVIDRLERRAIIIDIAVPHDENLVKVEKEKQIKYLDLSHEIVDMWNVDSVIIVPIVVSVHGLIARSLDQHLKRLTLDGWIKGLIQKAVLLDTARIVRRFLSLEP

SEQ ID NO: 11260 - protein, 1199 aa, Spilarctia lutea
MITRARSRALLPPSDSSRSSALPSSEARTEAPTVAEASSSSSSDEFFSPPTSPTPVRRQGRCRPPDSLGPRGPLTSNRAPATGGNVHRMKWTHSINENVMRAYFRATELGTNLTAYRVRLVSLFQELEPAVNVSAQRLSDQVRAIQRCHLLDDAALERIRSDIRNSLTVPSSSHVVDVVTNTTPQVPQNEDVSELVDSEIMSVSNQYNDRIRSTLEDAIREYRYVNFNNRPRLSRLPIHKRNLALVSALDSLLPDYFSNSEDLSDAHSILYCAAIAVCRVAGVKFAENTTTTRQENTVPAWQCRIERRIAEARTLIGKLISFRSGNMRPRVMRFVKRAFLGTTISPQEYMSCVTERIDFLKQKVYAWANRIRRYRKRVDRYNQNRMFQRNEKWVYRKWENLRPCLSDGQVPDENATNSFWHSIWSVPVTHTEGDWYRDVERSCESLLPMEPISINEEDVSCAVRSLPNWKAPGPDGLHNFWLKWFRSSHACLASQFQTALDSGSLPQFLTTGITHLLYKSGDAMDPKNFRPITCLPTLYKLLTSILRLKITTHINHNSILSISQNGCRSGTRGTKELLIIDMTISQQVRRNRKSLATCWIDYKKAFDSVPHTWLLRVLELYKIDTTLCTFLKLCMGQWRTALRYPECRQSAMNDVLIKIERGIFQGDSLSPLWFCLALNPLSTLLEGSGLGYRFQKDDRGISHLLYMDDLKLLAPTKLQLTGLLKVTENFSNSIKMEFGVDKCAVMYVKKGEIVESEGIELSDATKLRSLSVTETYKYLGFSQSLGIPEPDMKQTLRERFFSRLKKVLKSLLSGGNKVRACNGWVMPVLMYSFGVLRWTQTELDAIDRRVRTLLTAFRMHHPRSSVMRLYIPRKLGGRGLLNIKTLHNREVYNLREYFLQTDVGVHRSVVTVDTGLTPLALAKENWRKPVVLSTNDRREVWKGKVLHGRFYRALNGPDIDFKASTSWLRYGDLFGETEGFVCAIMDEVIMTSNYRKYILKDGTVDICRACHRPGESIRHIVSGCSRLANGEYLHRHNQVARIVHQQLALKYNLVSSEVPYYRYVPDPVLENGRATLYWDRSIITDRTIVANKPDIVVMDRLERRAMIVDIAVPHDENLVKVEKEKQIKYLDLSHEIVDMWNVDSAIIVPIVVSAHGLIAKSLDQHLKRLTLGGWIKGLIQKAVLLDTARIVRRFLSLEP

SEQ ID NO: 11261 - protein, 988 aa, Xestia c-nigrum
MRSALEGAIREYRFMTPELRPRLPRLPMHSKNKMLMAVLDSQLSNYFDSCEDLTDIHSILYCAAVAACRVAHVKFSDDRATRPKPAVPAWQYRIEQRIGGARALIGKLICFREGNTRPRVMRFVRRAFSGTDISPRDYMFRVTERIDFLKQKVYAWASRIRRYKRRVDRYTQNRTFQRDERWVYRAWERPDQGVADTRLPDDDAMCSFWRSIWSVPVSHAEGEWTRVVERACDPVPEMGAITISPQDVACAVRPLPNWKSPGPDGLHNFWIKWFTRSHARLATLFQSALESGSLPEFLTTGITHLLHKSGSTAEPKNYRPITCLPTVYKVLTSILRAKITKHIDENSVMSASQNGCRNGSRGTKELLLIDMAISQQVRRSRKDLSTCWIDYKKAYDSVPHTWLRRVLELYKVDATLRTFLMSCMGQWRTVLRYPGCRQIQRNSEPIRIERGIFQGDSLSPLWFCLALNPLSTLLEDSGLGYRLRKDGRVISHLLYMDDLKLFAPNDFQLMELLKVTETFSSAIRMEFGVDKCAVMHVKRGGIVESVGTQLSDSINLRSLSATETYKYLGMSEALGISVADMKQSLKERFFGRLKKVFNSLLSGGNKVRAFNGWVMPVLMYSFGILKWTQTELDALDTKVRKLLTAYRMHHPRSSVMRLYIPRKCGGRGFLNAKTLHNREICSLREYFLAADVGMHRDVVAMDKGLTPLSLAKENWRIPVVFTTDDRRKEWQSKELHGRFYRALHGPDVDFQASVSWLRSGDLFGETEGFVCAIMDEVMMTNNYRRFIVKDGTVDICRACHRPGESIRHIISGCSRLANGEYLHRHNLVARIIHQQLPLKYNLVESEVPYYRYVPDPVLVNGSITLYWDQSIITDRTVIANRPDIVVMDRSERRAMIVDITVPHDENLVKAEKDKQIKYLDLAREVVDMWEVDSAIIVPIVVSAHGLIAKSLDQHLRRLSLGSWIKGLIQKAVLLDTARIVRRFLSLEP

SEQ ID NO: 11262 - protein, 1199 aa, Griposia aprilina
MMLTRSAKRRAHPPPPDSSLSSASPPPVSSPTVSAVTTPAAVVASSSSDEYFSPPTTPPPVRRRGGHRPPDGLGPRGPPASDRVPAPGGSVQRMRWTRSINENVMRSYYGATEGGNNLTAYRVRMLSLFQVLEPAVNVSAQRLSDQVRVIQRNHMLDDTVLDRLRNEMQSSHVIAPPSQTVVVLPQSNTSQADEESDDRATNVSTQCNDELRSALEDAIREYRFISPELRPRLPRLPMHNKNRVLVAALDAQLSNYFDDCVDLTDTHSILYCAAVAACRVAHIKFANDSRPTRPKPAVPAWQCRIERRIGGARALIGKLICFREGNTRPRVMRFVRRAFAGTNISPQDYMSCVTERIDFLKQKVYAWANRIRRYKRRVERYTQNRTFQRDERWVYRGWERPDQGVADTCLPDDDAMCSFWRNIWSVPVSHTEGDWGREVERACDPIPEMGAISICPQDVTRAVRPLPNWKSPGPDGLQNFWIKWFGRSHARLAAQYQVAIESGSLPQFLTTGVTHLLHKSGSTAEPKNYRPITCLPTVYKVLTSIWRAKINKHIDTNSIMSPSQNGCRNGSRGTKELLLIDMAISQQVRRSRKDLSTCWIDYKKAYDSVPHTWLVRVLELYKVDATLRTFLKSCMGQWRTILHYPGCRNIQRDNEPIRIERGIFQGDSLSPLWFCLALNPLSTLLEDSGLGYRLRRGGQVISHLLYMDDLKLFAPNNLQLMELLKVTETFSSAIRMEFGVDKCAVMHVKRGEIVESVGTQLSYSINLRALSASDTYKYLGMSEALGINGTDMKQSLKERFFGRLKKVFNSLLSGGNKVRAFNGWVMPVLMYSFGILKWTQTELDALDRKVRTLLTANRMHHPRSSVMRLYIPRKCGGRGFLNAKTLHNREICSLREYFLEADVGMHTDVVKVDKGLTPLSLAKENWRKPVVLDTNDRMEVWQSKELHGRFFRALHGPDVDQLASVAWLRFGDLFGETEGFVCAIMDEVILTNNYRRHIMKDGTVDVCRACHRPGESIRHIISGCSRLANEEYLHRHNLVARIIHQQLALKYSLVESEVPYYRYVPDPVLENGHITLYWDRSIITDRTIVANKPDIVVVDRLERRAMIVDITVPHDGNLVKAEKDKQIKYLDLAREVVDMWDVDSAIIVPIVVTANGLIAKSLDQHLRRLSLGSWIKGLIQKAVLLDTARIVRRFLSLEP

SEQ ID NO: 11263 - protein, 1199 aa, Griposia aprilina
MMLTRSAKRRAHPPPPDSSLSSASPPPVSSPTVSAVTTPAAVVASSSSDEYFSPPTTPPPVRRRGGHRPPDGLGPRGPPASDRVPAPGGSVQRMRWTRSINENVMRSYYGATEGGNNLTAYRVRMLSLFQVLEPAVNVSAQRLSDQVRVIQRNHMLDDTVLDRLRNEMQSSHVIAPPSQTVVVLPQSKTSQADEESDDRATNVSTQCNDELRNALEDAIREYRFISPELRPRLPRLPMHNKNRVLVAALDAQLSNYFDDCVDLTDTHSILYCAAVAACRVAHIKFANDSRPTRPKPAVPAWQCRIERRIGGARALIGKLICFREGNTRPRVMRFVRRAFAGTNISPQDYMSCVTERIDFLKQKVYAWANRIRRYKRRVERYTQNRTFQRDERWVYRGWERPDQGVADTCLPDDDAMCSFWRNIWSVPVSHTEGDWGREVERACDPIPEMGAISICPQDVTRAVRPLPNWKSPGPDGLQNFWIKWFGRSHACLAAQYQVAIESGSLPQFLTTGVTHLLHKSGSTAEPKNYRPITCLPTVYKVLTSILRAKINKHIDTNSIMSPSQNGCRNGSRGTKELLLIDMAISQQVRRSRKDLSTCWIDYKKAYDSVPHTWLVRVLELYKVDATLRTFLKSCMGQWRTILHYPGCRNIQRDNEPIRIERGIFQGDSLSPLWFCLALNPLSTLLEDSGLGYRLRRGGQVISHLLYMDDLKLFAPNNLQLMELLKVTETFSSAIRMEFGVDKCAVMHVKRGEIVESVGTQLSYSINLRALSASDTYKYLGMSEALGINGTDMKQSLKERFFGRLKKVFNSLLSGGNKVRAFNGWVMPVLMYSFGILKWTQTELDALDRKVRTLLTANRMHHPRSSVMRLYIPRKCGGRGFLNAKTLHNREICSLREYFLEADVGMHTDVVKVDKGLTPLSLAKENWRKPVVLDTNDRMEVWQSKELHGRFFRALHEPDVDQLASVAWLRFGDLFGETEGFVCAIMDEVILTNNYRRHIMKDGTVDVCRACHRPGESIRHIISGCSRLANEEYLHRHNLVARIIHQQLALKYSLVESEVPYYRYVPDPVLENGHITLYWDRSIITDRTIVANKPDIVVVDRLERRAMIVDITVPHDGNLVKAEKDKQIKYLDLAREVVDMWDVDSAIIVPIVVTANGLIAKSLDQHLRRLSLGSWIKGLIQKAVLLDTARIVRRFLSLEP

SEQ ID NO: 11264 - protein, 1198 aa, Griposia aprilina
MLTRLAARRARPPPPDSSLSSASLPPVSSPTVSAVTTPAAVVASSSSDEYFSPPTTPPPVRRRGGHRPPDGLGPRGPPASDRVPAPGGSVQRMRWTRSINENVMRSYYGATEGGNNLTAYRVRMLSLFQVLEPAVNVSAQRLSDQVRVIQRNHMLDDTVLDRLRNEMQSSHVIAPPSQTVVVLPQSNTSQADEESDDRATNVSTQCNDELRSALEDAIREYRFISPELRPRLPRLPMHNKNRVLVAALDAQLSNYFDDCVDLTDTHSILYCAAVAACRVAHVKFANDSRATRPKPAVPAWQCRIERRIGEARALIGKLICFREGNTRPRVMRFVRRAFAGTNISPQDYMSCVTERIDFLKQKVYAWANRIRRYKRRVERYTQNRTFQRDERWVYRGWERPDQGVADTCLPDDDAMCSFWRNIWSVPVSHTEGDWTREVERACDPIPEMGAITICPQDVTRAVRPLPNWKSPGPDGLHNFWIKWFGRSHARLAAQYQVALESGSLPQFLTTGVTHLLHKSGSTAEPKNYRPIACLPTVYKVLTSILRDKINKHIDTNYIMSPSQNGCRNGSRGTKELLLIDMAISQQVRRSRKDLSTCWIDYKKAYDSVPHTWLMRVLELYKVEATLRTFLMSCMGQWRTVLHYPACRNTQRNSEPIRIERGIFQGDSLSPLWFCLALNPLSTLLEDSGLGYRLRRGGQVISHLLYMDDLKLFAPNNSQLMDLLKVTETFSSAIRMEFGVDKCAVMHVKRGEIVESVGTQLSGSINLRALSASETYKYLGMSEALGINGTDMKQSLKDRFFGRLKKVFNSLLSGGNKVRAFNGWVMPVLMYSFGILKWTQTELDALDRKVRTLLTANRMHHPRSSVMRLYIPRKCGGRGFLNAKTLHNREICSLREYFLEADVGMHRDVVTVDKGLTPLSLAKENWRKPVVLDTNDRMEVWQSKELHGRFFRALHGPDVDQLASVAWLRFGDLFGETEGFVCAIMDEVMRTNNYRRFIVKDGTVDICRACHRPGESIRHIISGCSRLANEEYLHRHNLVARIIHQQLALKYSLVESEVPYYRYVPDPVLENGHITLYWDRSIITDRTIVANKPDIVMVDRLERRAMIVDITVPHDGNLVKAEKDKQIKYLDLAREVVDMWDVDSAIIVPIVVTANGLIAKSLDQHLRRLSLGSWIKGLIQKAVLLDTARIVRRFLSLEP

SEQ ID NO: 11265 - protein, 1198 aa, Griposia aprilina
MLTRSAARRARPPPPDSSLSSASLPPVSSPTVSAVTTPAAVVASSSSDEYFSPPTTPPPVRRRGGHRPPDGLGPRGPPASDRVPAPGGSVQRMRWTRSINENVMRSYYGATEGGNNLTAYRVRMLSLFQVLEPAVNVSAQRLSDQVRVIQRNHMLDDTVLDRLRNEMQSSHVIAPPSQTVVVLPQSNTSQADKESDDRATNVSTQCNDELRSALEDAIREYRFISPELRPRLPRLPMHNKNRVLVAALDAQLSNYFDDCVDLTDTHSILYCAAVAACRVAHVKFANDSRATRPKPAVPAWQCRIERRIGGARALIGKLICFREGNTRPRVMRFVRRAFAGTNISPQDYMSCVTERIDFLKQKVYAWANRIRRYKRRVERYTQNRTFQRDERWVYRGWERPDQGVADTCLPDDDAMCSFWRNIWSVPVSHTEGDWTREVERACDPIPEMGAITICPQDVTRAVRPLPNWKSPGPDGLHNFWIKWFGRSHARLAAQYQVALESGSLPQFLTTGVTHLLHKSGSTAEPKNYRPIACLPTVYKVLTSILRDKINKHIDTNYIMSPSQNGCRNGSRGTKELLLIDMAISQQVRRSRKDLSTCWIDYKKAYDSVPHTWLMRVLELYKVEATLRTFLMSCMGQWRTVLRYPACRNTQRNSEPIRIERGIFQGDSLSPLWFCLALNPLSTLLEDSGLGYRLRRGGQVISHLLYMDDLKLFAPNNSQLMDLLKVTETFSSAIRMEFGVDKCAVMHVKRGEIVESVGTQLSDSINLRALSASETYKYLGMSEALGINGTDMKQSLKDRFFGRLKKVFNSLLSGGNKVRAFNGWVMPVLMYSFGILKWTQTELDALDRKVRTLLTANRMHHPRSSVMRLYIPRKCGGRGFLNAKTLHNREICSLREYFLEADVGMHRDVVTVDKGLTPLSLAKENWRKPVVLDTNDRMEVWQSKELHGRFFRALHGPDVDQLASVAWLRFGDLFGETEGFVCAIMDEVMMTNNYRRFIVKDGTVDICRACHRPGESIRHIISGCSRLANEEYLHRHNLVARIIHQQLALKYSLVESEVPYYRYVPDPVLENGHITLYWDRSIITDRTIVANKPDIVMVDRLERRAMIVDITVPHDGNLVKAEKDKQIKYLDLAREVVDMWDVDSAIIVPIVVTANGLIAKSLDQHLRRLSLGSWIKGLIQKAVLLDTARIVRRFLSLEP

SEQ ID NO: 11266 - protein, 870 aa, Griposia aprilina
MRFVRQAFSGTNISPREYISCVTERIDFLKQKVYAWANRIRRYRRRVDRYTQNSMFQKDERWVYRAWERPIPTQGVTDVLPPDNDTVSAFWRSIWSVPISHTEGDWMRVVEQACDSIPEMEAISISPLDVARAVRPLPNWKSPGPDGLHNFWIKWLQRSHACLASQFQSALETGSLSLFFTTGVTHLLHKSGSTAEPKNYRPITCLPTVYKVLTSILRAKIAEHIKNNSIMSVSQNGFKNGSRGTKELLLIDMAISQQVRRSRKDLSTCWIDYKKAYDSVPHTWLIKVLELYKIDATLRTFLISCMGQWRTILLYPGCQQIQRTDEPIGIERGIFQGDSLSLLWFCLALNPLSTLLEDSGLGYRLRRGGQVISHLLYMDDLKLLAPNNLRLMELLKVTETFSSAIRMEFGVDKCAVMHVKRGGIMESVGTQLSDSIHLRSLSSTEIHKYLGMSEALGINAADMKQSLRERFSGRLNKVLNSLLSGGNKVRAFNGWVMPVLMYTFDILKWTQTELDALDRKVRTLLTAYRMHHPGSSVMRLYIPRKCGGRGFLNAKTLHNRKICSLREYFLQTDVGMHRDVVAVDKGLTPLSLAKENWRKPAVLDTNDRKEVWQGKELHGRFFRALHGPDVDFLASVSWLRFGDLFGETEGFVCAIMDEVIMTNNYRKYIVKDGTVDICRACHRPGESIRHIVSGCSRLANGEYLHRHNLVARIIHQQLALQYNLVESEVPYYRYVPDPVLENGHTTLYWDRSIITDRTIVANKPDIVVIDRRERRAMIVDIAVPHDENLVKAEKEKKIKYHDLAHEVVDMWGVDSAIIVPIIDSVNGLIAESLDQHLRRLSLRSWVKSLIQRAVLLDTARIVRRFLSLEP

SEQ ID NO: 11267 - protein, 1198 aa, Griposia aprilina
MLTRSAARRARPPPPDSSLSSASLPPVSSPTVSAVTTPAAVVASSSSDEYFSPPTTPPPVRRRGGHRPPDGLGPRGPPASDRVPAPGGSVQRMRWTRSINENVMRSYYGATEGGNNLTAYRVRMLSLFQVLEPAVNVSAQRLSDQVRVIQRNHMLDDTVLDRLRNEMQSSHVIAPPSQTVVVLPQSNTSQADEESDDRATNVSTQCNDELRSALEDAIREYRFISPELRPRLPRLPMHNKNRVLVAALDAQLSNYFDDCLDLTDTHSILYCAAVAACRVAHVKFANDSRATRPKPAVPAWQCRIERRIGEARALIGKLICFREGNTRPRVMRFVRRAFAGTNISPQDYMSCVTERIDFLKQKVYAWANRIRRYKRRVERYTQNRTFQRDERWVYRGWERPDQGVADTCLPDDDAMCSFWRNIWSVPVSHTEGDWTREVERACDPIPEMGAITICPQDVTRAVRPLPNWKSPGPDGLHNFWIKWFGRSHARLAAQYQVALESGSLPQFLTTGVTHLLHKSGSTAEPKNYRPIACLPTVYKVLTSILRDKINKHIDTNYIMSPSQNGCRNGSRGTKELLLIDMAISQQVRRSRKDLSTCWIDYKKAYDSVPHTWLMRVLELYKVEATLRTFLMSCMGQWRTVLHYPACRNTQRNSEPIRIERGIFQGDSLSPLWFCLALNPLSTLLEDSGLGYRLRRGGQVISHLLYMDDLKLFAPNNSQLMDLLKVTETFSSAIRMEFGVDKCAVMHVKRGEIVESVGTQLSDSINLRALSASETYKYLGMSEALGINGTDMKQSLKDRFFGRLKKVFNSLLSGGNKVRAFNGWVMPVLMYSFGILKWTQTELDALDRKVRTLLTANRMHHPRSSVMRLYIPRKCGGRGFLNAKTLHNREICSLREYFLEADVGMHRDVVTVDKGLTPLSLAKENWRKPVVLDTNDRMEVWQSKELHGRFFRALHGPDVDQLASVAWLRFGDLFGETEGFVCAIMDEVMMTNNYRRFIVKDGTVDICRACHRPGESIRHIISGCSRLANEEYLHRHNLVARIIHQQLALKYSLVESEVPYYRYVPDPVLENGHITLYWDRSIITDRTIVANKPDIVMVDRLERRAMIVDITVPHDGNLVKAEKDKQIKYLDLAREVVDMWDVDSAIIVPIVVTANGLIAKSLDQHLRRLSLGSWIKGLIQKAVLLDTARIVRRFLSLEP

SEQ ID NO: 11268 - protein, 1198 aa, Omphaloscelis lunosa
MLTRSAARRARLPPPDSPLSSASSPPVLSPTVNAVMTPAAAVASSSSDEYFSPPTTPPPARRRGRRRPPDGLGPRGPPASDRVPAPGGSVQRMRWTRSINENVMRSYYGATEGGNNLTAYRVRMLSLFQVLEPAVNVSAQRLSDQVRVIQRNHMLDDTVLDRLRSEMQSSHVIASPVRSVIVPSQIITSQADERIDDRATNVSTQWNEELRSALEGAIHEYRFMSPELRPRLPRLPMHNKNRALVAALDSQLSNYFDDCEDLTDTHSILYCAAVAVCRVAHVKFSNDSRATRPKPAVPAWQCRIERRICGARTLIGKLICFREGNTRPRVMRFVRRAFLGTDISPQDYMTRVTERIDFLKQKVYAWANRIRRYKRRVERYTQNRTFQSDERWVYRAWERPNQGVTDTHLPDEDAMCSFWRSIWSVPVSHTEGDWTREVERACDSIPEMGAITICPQDVARAVRPLPNWKSPGPDGLHNFWIKWFVRSHARLAAQYQTALESGSLPQFLTTGVTHLLHKSGSTAEPKNYRPITCLPTVYKVLTSVLRAKINKHIDTNSIMSASQNGCRNGSRGTKELLLIDMAISQQVRRSRKDLSTCWIDYKKAYDSVPHTWLMRVLELYKVDITLRTFLMSCMGQWRTVLRYPGCRNIQRNSEPIRIERGIFQGDSLSPLWFCLALNPLSTLLEDSGLGYRLRRGGQVISHLLYMDDLKLFAPNNLQLMELLKVTETFSSAIRMEFGVDKCAVMHVKRGKIMESVGTQLSDSINLRALSASETYKYLGMSEALGINVTDMKQSLKERFFGRLKKVLNSLLSGGNKVRAFNGWVMPVLMYSFGILKWSQTELDALDRRVRTLLTAYRMHHPRSSVMRLYIPRKCGGRGFLNAKTLHNREICSLREYFLEADVGMHRDVVVVDKGLTPLSLAKENWRKPVVLDTKNRMEIWQSKELHGRYFRALHGPDVDLPASVAWLRCGDLFGETEGFVCAIMDEVMMTNNYRRFIVKDGTVDICRACHRPGESIRHIISGCSRLANEEYLHRHNLVARIIHQQLALKYSLVESEVPYYRYVPDPVLENGNITLYWDRSIITDRTIVANKPDIVVVDRGERSAMIIDITVPHDENLVKAEKDKQIKYLDLAREVVDMWDVDSAIIVPIVVTANGLIAKSLDQHLRRLSLGSWIKGLVQKAVLLDTARIVRRFLSLEP

SEQ ID NO: 11269 - protein, 1197 aa, Sesamia nonagrioides
MLTRSAARRARPPSPDSLLGSASSPPVSSATASAVTTPAAAVASSSSDEYFSPPTTPPPVRRRGGRRPPDRLGPRGPSASDRVPAPGGSVQRMRWTQSINENVMRSYYGATEGGNNLTAYRVRMLSLFQVLEPAVNVSAQRLSDQVRVIQRNHMLDDTVLDRLRNEMQSSRIIAHQSQTAEIPPQPTNYADEGSNDRATNVSTQCNEELINALEAAIREYRFTPAELRPRLPRLPMHNRNRALMAALDAQLSDYFDTCEDLTDTHSILYCAAVAACRVAHVKFPSDSRATRPKPVVPAWQHRIERRIGGARALIGKLICFREGNTRPRVMRFVRRAFAGTNISPQNYMARVTERIDFLKQKVYAWANRIRRYKRRVERYTQNRTFQSNERRVYRDWERPEQGVTDTCLPDDDAMCSFWRSIWSVPVSHTEGDWARDVERACDPIPEMGAITICPQDVACAVRPLPNWKSPGPDGLHNFWIKWFPRSHARLASQFQTALVSGSLPQFLTTGITHLLHKSGSTAEPKNYRPITCLPMVYKVLTSILKTKINKHIDSNSIMSASQNGCKSGSRGTKELLLIDMAISQQVRHSRKDLSTCWIDYRKAYDSVPHTWLMRVLELYKVDATLRTFLMSCMRTWKTVLRYPGCRNIQRNSEPIRIERGIFQGDSLSPLWFCLALNPLSTLLEDSGLGYRLRRGGQVISHLLYMDDLKLFAPNNSQLRELLKITETFSSSIRMEFGVDKCAVMHVKRGEIMESVGTQLTDSINLRALSASETYKYLGMSEALGINVTDMKQSLKERFFGRLKKVLNSLLSGGNKVRAFNGWVMPVLMYSFGILKWTQTELDALDQRVRTLLTANRLHHPRSSVMRLYIPRKCGGRGFLNAKTLHNREVCSLRDYFLVTDVGMHRDVVAADKGLTPLSLAKENWRKPVVLDTNDRMEVWKSKELHGRFFRALHGPDVDLKASVAWLRFGDLFGETEGFVCAIMDEVMMTNNYRRFIVKDGTVDICRACHRPGESIRHIISGCSRLANGEYLHRHNLVARIIHQQLALKYNLVESEVPYYRYTPDPVLENGYITLYWDRSIITDRTIVANKPDIVMVDRSERRAMIVDIAIPHDENLVKAEKDKQIKYLDLAHEVVDMWEVDSAIIVPIVVTANGLIAKSLDQHLRRLSLGSWIKGLIQKAVLLDTARIVRKFLSLEP

SEQ ID NO: 11270 - protein, 1197 aa, Sesamia nonagrioides
MLTRSAARRARPPSPDSLLGSASPPPVSSATASAVTTPAAAVASSSSDEYFSPPTTPPPARRRGGRRPPDRLGPRGPSASDRVPAPGGSVQRMRWTQSINENVMRSYYGATEGGNNLTAYRVRMLSLFQVLEPAVNVSAQRLSDQVRVIQRNHMLDDTVLDRLRNEMQSNRIIAHQSQTAEIPPQPTNYADEGSNDRATNVSTQCNEELINALEAAIREYRFTPAELRPRLPRLPMHNRNRALMAALDAQLSDYFDTCEDLTDTHSILYCAAVAACRVAHVKFPSDSRATRPKPVVPAWQRRIERRISGARALIGKLICFREGNTRPRVMRFVRRAFSGTNTSPQNYLARVTERIDFLKQKVYAWANRIRRYKRRVERYTQNRTFQSNERWVYRAWERSDQGVTDTCLPDDDATCSFWRNIWSVPVSHTEASWTRVVERACDPVPEMGAITICPQDVARAVRPLPNWKSPGPDGLHNFWIKWFSRSHARLASQFQTALESGSLPQFLTTGVTHLLHKSGSTAEPKNYRPITCLPTVYKVLTSILKSKINTHIDSNSIMSASQNGCRSGSRGTKELLLIDMAISQQVRRSRKDLSTCWIDYKKAYDSVPHTWLLRVLELYKVDATLRTFLMTCMRTWRTVLRYPGCRNIQRNSEPIRIERGIFQGDSLSPLWFCLALNPLSTLLEDSGLGYRLRRGGQVISHLLYMDDLKLFAHTDSQLKELLKITETFSSSIRMEFGVDKCAVMHVKRGEIMESVGTQLTSSINLRALSASETYKYLGMSEALGINVTDMKQSLKERFFGRLKKVLNSLLSGGNKVRAFNGWVMPVLMYSFGILKWTQTELDALDQRVRTLLTANRLHHPRSSVMRLYIPRKCGGRGFLNAKTLHNREVCSLSEYFLETDVGMHRDVVAADKGLTPLSLAKENWRKPVVLDTNDRLEVWKSKELHGRFFRALHGPDVDFQASVAWLRFGDLFGETEGFVFAIMDEVMMTNNYRRFIVKDGTVDICRACHRPGESIRHIISGCSRLANGEYLHRHNLVARIIHQQLALKYKLVESEVPYYRYMPDPVLENGHITLYWDRSIITDRTILANKPDIVLVDRTERRAMIVDITIPHDENLVKAEKDKQIKYLDLAHEVVDMWEVDSAIIVSVVVTANGLIAKSLDQHLRRLSLGSWIKGLIQKAVLLDTARIVRKFLSLEP

SEQ ID NO: 11271 - protein, 1020 aa, Sesamia nonagrioides
MLDDTVLDRLRNEMQSSRIIAHQSQTAEIPPQPINYADEGSNDRATNVSTQCNEELINALEAAIREYRFTPAELRPRLPRLPMHNRNRALMAALDAQLSDYFDTCEDLTDTHSILYCAAVAACRVAYVKFPSDSRATRPKPVVPAWQHRIERRIGGARALIGKLICFREGNTRPRVMRFVRRAFAGTNISPQNYMARVTERIDFLKQKVYAWANRIRRYKRRVERYAQNRTFQSNERWVYRDWERPEQGVTDTCLPDDDAMCSFWRSIWSVPVSHTEGDWARDVERACDPIPEMGAITICPQDVACAVRPLPNWKSPGPDGLHNFWIKWFPRSHARLASQFQTALVSGSLPQFLTTGITHLLHKSGSTAEPKNYRPITCLPTVYKVLTSILKTKINKHIDSNSIMSASQNGCKSGSRGTKELLLIDMAISQQFRRSRKDLSICWIDYRKAYDSVPHTWLMRVLELYKVDATLRTFLMSCMKTWRTVLRYPGCRNIQRNSEPIRIERGIFQGDSLSPLWFCLALNPISTLLEDSGLGYRLRRGGQVISHLLYMDDLKLFAHTDSQLKELLKITETFSSSIRMEFGVDKCAVMHVKRGEIMESVGTQLTDSINLRALSASETYKYLGMSEALGINVTDMKQSLKERFFGHLKKVLNSLLSGGNKVRAFNGCVMPVLMYSFGILKWTQTELDALDQRVRKLLTANRLHHPRSSVMRLYIPRKCGGRGFLNAKTLHNREVCSLRDYFLVTDVGMHRDVVAADKGLTPLSLAKENWRKPVVLDTNDRMEVWKSKELHGRFFRALHGPDVDLQASVAWLRFGDLFGETEGFVFAIMDEVMMTNNYRRFIVKDGTVDICRACHRPGKLIRHIISGCSRLANGEYFHRHNLVARIIHQQLALKYNLVESEVPYYRYTPDPVLENGYIMLYWDRSIITDRIIVANKPDIVMVDRSERRAMIVDITIPHDENLVKAEKDKQIKYLDLAHEVVDMWEVDSAIIVPIVVTANGLITKSLDQHLRRLSLGSWL

SEQ ID NO: 11272 - protein, 1101 aa, Sesamia nonagrioides
MRWTQSINENVMRSYYGATEGGNNLTAYRVRMLSLFQVLEPAVNVSAQRLSDQVRVIQRNHMLDDTVLDRLRNEMQSTRIIAHQSQTAEIPPQPTNYADEGSNDRATNVSTQCNEELINALEAAIREYRFTPAEQRPRLPRLLMHNRNRALMAALDAQLSDYFDTCEDLTDTHSILYCAAVAACRVAHVKFPSDSRATRPKPVVPAWQRRIERRIGGARALIGKLICFREGNTRPRVMRAFAGTNISPQNYMARVTERIDFLKQKVYAWANRIRRYKRRVERYTQNRTFQSNERWVYRDWERPEQGVTDTCLPDDDAMCSFWRNIWSVPVSHTEGDWARDVERACDPIPEMGAITICPQDVACAVRPLPNWKSPGPDGLHNFWIKWFPKSHARLASQFQTALVSGSLPQFLTTGITHLLHKSGSTAEPKNYRPITCLPTVYKVLTSILKTKINKHIDSNSIMSASQNGCKSGSRGTKELLLIDMALSQQVRRSRKDLLTCWIDYRKAYDSVPHTWLMRVLELYKVDATLRTFLMSCMKTWRTVLRYPGCRNIQRNSEPIRIERGIFQGDSLSPLWFCLALNPLSTLLEDSGLGYRLRRGGQVISHLLYMDDLKLFAPNNSQLRELLKITETFSSSIRMEFGVDKCAVMHVKRGEIMESVGTQLADSINLRALSASETYKYLGMSEALGINVTDMKQSLKDRFFGRLKKVLNSLLSGGNKVRAFNGWVMPVLMYSFGILKWTQTELDALDQRVRTLLTANRLHHPRSSVMRLYIPRKCGGRGFLNAKTLHNREVCSLRDYFLVTDVGMHRDVVAADKGLTPLFLAKENWRKPVVLDTNDRMEVWKSKELHGRFFQALHGPDVDFQASVAWLRFGDLFGETEGFVFAIMDEVMMTNNYRRFIVKDGTVDICRACHRPGESIRHIISGCSRLANGEYLHRHNLVARIIHQQLALKYNLVESEVPYYRYTPDPVLENGYITLYWDRSIITYRTIVANKPDIVMVDRSERRAMIVDITIPHDENLVKAEKDKQIKYLDLAHEVVDMWEVDSAIIVPIVVTANGLIAKSLDQHLRRLSLGSWIKGLIQKAVLLDTARIVRKFLSLEP

SEQ ID NO: 11273 - protein, 1193 aa, Sesamia nonagrioides
MLTRSAARRARSPPPDSSPSSASPPPVSSPTVNAVMTPAAAVALSSSDEYFSPPTTPPPVRRRGGRRPPDCLGPRGPPASDRAPATGGNVQRMKWTQSINENVMRAYFGATEGGSNLTAYRGRMLSLFQVLEPAVNVSAQRLSDQVRVIQRNHMLDDVVLDRLRLESRNSHVAPASSLIAVQFNSVPSRPNLVDEEDDDEAISVTPQCNEKVRSALEDAFREYRSTPPELRPRLPRLPMHKKNKALVCALDSQLSNYLKDSKDLADTHSILYCGAVAICRVAHVKFPDSDRATRPKPAVPAWQCRIERRIGETRALIGKLISFREGNTRPRVMRFVRRAFSGTDVSTRDYLLRVTERIDFLKQKIYAWANRIRRYRRRVERYSQNRNFQSDERWVYRAWERSDQGVTDTCLPDDDATRSFWRNIWSVPVSHTEGGWTRDVERACDPVPEMGAITICPQDVARAVRPLPNWKSPGPDGLHNFWIKWFSGSHACLASQFQTALESGSLPQFLTTGITHLLHKSGSTAEPKNYRPITCLPTVYKVLTSILKAKINTHIDSNSIMSASQNGCRNGSRGTKELLLIDMAISQQVRRSRKDLSTCWIDYKKAYDSVPHTWLMRVLELYKVDATLRTFLMTCMSQWRTVLRYPGCRNIQRNSEPIRIERGIFQGDSLSPLWFCLALNPLSTLLEDSGLGYRLRRGGQVISHLLYMDDLKLFAHTSSQLKELLKITETFSSAIRMEFGVDKCAVMHVQRGEIVESVGTQLTGSINLRSLSASETYKYLGMSEALGINVTDMKQSLKERFFGRLKKVLNSLLSGGNKVRAFNGWVMPVLMYSFGILKWTQTELDALDQRVRTLLTANRLHHPRSSVMRLYIPRKCGGRGFLNAKTLHNREVCSLREYFLKTAVGMHRDVVAVDKGLTPLSLAKENWRKPVVLETNDRMEVWQSKELHGRFFRALRGPDVDFQASVAWLRYGDLFGETEGFVCAIMDEVMMTNNYRKFIVKDGTVDICRACHRPGESIRHIISGCSRLANGEYLHRHNLVARIIHQQLALKYNLVESEVPYYRYMPDPVLENGHITLYWDRSIITDRTIVANKPDIVMVDRSERRAMIVDITIPHDENLVKAEKDKQIKYLDLAHEVVDMWEVDSAIIVPIVVTANGLIAKSLDQHLRRLSLGGWIKGLIQKAVLLDTLNYIT

SEQ ID NO: 11274 - protein, 1077 aa, Apamea monoglypha
MLDDKRNHMLDDKRNHMLDDKRNHMLDDKRNHMLDDTVLDRLRSEMQSSHVIAPQSQTAAVLPQSNTSHADEGSNDRATNVSIQCNEELRNALEGAIREYRFMSPELRPRLPRLPMHNKNRALVAVLDAQLSSHFDACEDLTDTHSILYCAAVAACRVAHVKFDSDSRATRPKPAIPAWQCRIERRIGGARALIGKLICFREGNTRPRVMRFVRRAFLGTDISSQDYLSRVTERIDFLKQKVYAWANRIRRYKRRVERYTQNRTFQSDERWVYRGWERPDQSVADTCLPDDDAMCFFWRSIWSAPVSHTEGDWTGKIERACELIPEMGAITICPQDVARAVRPLPNWKSPGPDGPHNFWIKWFQRSHAPLAAQFQSALESGLLPQFITTGITHLLHKSGSTADPKNYRPITCLPTIYKVLTSILRAKINKHIDSNSIMSVSQNGCRNGSRGTKELLLIDMAISQQVRRSRKDLSTCWIDYKKAYDSVPHTWLMRVLELYKVDTTLRTFLMTCMGQWRTVLRYPGCRNIQRNSEPIRIERGIFQGDSLSPLWFCLALNPLSTLLDDSGLGYRLRRGGQVISHLLYMDDLKLFAPNNLQLMKLLKITETFSSAIRMEFGVDKCAVMHVKRGEIVESVGTQLSDFTNLRALSAAETYKYLGMSEALGINVTDMKQSLKERFFGRLKKVFNSLLSGGNKVRAFNSWVMPVLMYSFGILKWTQTELEALDRRVRTLLTANRMHHPRSSVMRLYIPRKCGGRGFLNAKTLHNREICSLREYFLETDVGMHRDVVAVDKGLTPLSLAKENWRKPVVLDTNDRMEVWQSKELHGRFYRALHGPDVDLLASVAWLRFGDLFGETEGFVCAIMDEVMMTNNYRRYIVKDGTVDICRACHRPGESIRHIISGCSRLANGEYLHRHNLVARIIHQQLALKYSLVESEVPYYRYVPDPVLENGNITLYWDRSIITDRTIVANKPDIVVVDRSERRAMIVDITVPHDENLVKAEKDKQIKYLDLAREVVDMWDVDSAIIVPIVVSANGLIAKSLDQHLRRLSLGSWIKGLIQKAVLLDTARIVRRFLSLEP

SEQ ID NO: 11275 - protein, 1200 aa, Apamea monoglypha
MMMLTRSAARRARPPPPDSSLSSASPPPVPSLTVSAVTTPAAVVTSSSSDEYFSPPTTPPPARRRGGRRPPDGLGPRGPPASDRVPALGGSVQRMRWTQSINENVMRSYYGATEGGNNLTAYRVRMLSLFQVLEPAVNVTAQRLSDQVRVIQRNHMLDDTVLDRLRNEIQSSHVIAPQSQTAAVLPQSNTSHADEGSNDRATNVSIQCNEELRNALEGAIREYRFMSPELRPRLPRLPMHNKNRALVAVLDAQLSSYFDVCEDLTDTHSILYCAAVAACRVAHVKFVSDSRATRPKPAIPPWQCRIERRIGGARALIGKLICFREGNTRPRVMRFVRRAFSGTDISSQDYLSRVTERIDFLKQKVYAWANRIRRYKRRVDRYTQNRTFQSDERWVYRGWERPDQGVADTCLPDDDAMYSFWRSIWSVPVSHTEGDWAREVERACDPIPEMEAITICAQDVARAVRPLPNWKSPGPDGLHNFWVKWLTRSHTRLASQFQIALESGSLPQFLTTGVTHLLHKSASTAEPKNYRPITCLPTVYKVLTSILRAKINKHIDTNSIMSASQNGCKNGSRGTKELLLIDMAISQQVRRSRKDLSTCWIDYKKAYDSVPHTWLMRVLELYKVDTTLRTFLMTCMGQWRTVLRYPGCRNIQRNSEPIRIERGIFQGDSLSPLWFCLALNPLSTLLEDSGLGYRLRRGGQVISHLLYMDDLKLFAPNNLQLMELLKITETFSSAIRMEFGVDKCAVMHVKRGEIVESVGTQLSDSTNLRALSASETYKYLGMSEALGINVTDMKQSLKERFFGRLKKVLNSLLSGGNKVRAFNSWVMPVLMYSFGILKWTQTELDALDRRVRTLLTANRLHHPRSSVMRLYIPRKCGGRGFLNAKTLHNREICSLREYFLETDVGMHRDVVAVDKGLTPLSLAKENWRKPVVLDTNDRMEVWQSKELHGRFYRALHGPDVDLLASVAWLRFGDLFGETEGFVCAIMDEVMMTNNYRRFIVKDGTVDICRACHRPGESIRHIISGCSRLANGEYLHRHNLVARIIHQQLALKYNLVESEVQYYRYVPDPVLENGNITLYWDRSIITDRTIVANKPDIVVVDRSERRAMIVDITVPHDENLVKAEKDKQIKYLDLAREVVDMWHVDSAIIVPIVVTANGLIAKSLDQHLRRLSLGSWIKGLIQKAVLLDTARLVRRFLSLEP

SEQ ID NO: 11276 - protein, 1049 aa, Apamea monoglypha
MGHAGFDVLFRYTQMDSNRTKRPGYEGPDAVDCKSNASPTVIGNEAIYPSKVRSRLFNNNNNNALEGAIREYRFMSPELRPRLPRLPMHNKNRALVAVLDAQLSSYFDVCEDLTDTHSILYCAAVAACRVAHVKFASDSRATRPKPAIPPWQCRIERRIGGARALIGKLICFREGNTRPRVMRFVRRAFSGTDISSQDYLSHVTERIDFLKQKVYAWANRIRRYKRRVDRYTQNRTFQSDERWVYRGWERPDQGVADTCLPDDDAMYSFWRSIWSVPVSHTEGDWAREVERACDPIPEMEAITICAQDVARAVRPLPNWKSPGPDGLHNFWIKWFTRSHARLASQFQIALESGSLPQFLTTGVTHLLHKSASTAEPKNYRPITCLPTVYKVLTSILRAKINKHIDTNSIMSASQNGCKNGSRGTKELLLIDMAISQQVRRSRKDLSTCWIDYKKAYDSVPHTWLMRVLELYKVDTTLRTFLMTCMGQWRTVLRYPGCRNIQRNSEPIRIERGIFQGDSLSPLWFCLALNPLSTLLEDSGLGYRLRRGGQVISHLLYMDDLKLFAPNNLQLMELLKITETFSSAIRMEFGVDKCAVMHVKRGEIVESVGTQLSDSTNLRALSASETYKYLGMSEALGINVTDMKQSLKERFFGRLKKVLNSLLSGGNKVRAFNSWVMPVLMYSFGILKWTQTELDALDRRVRTLLTANRMHHPRSSVMRLYIPRKCGGRGFLNAKTLHNREICSLREYFLETDVGMHRDVVAVDKGLTPLSLAKENWRKPVVLDTNDRLEVWQSKELHGRFYRALHGPDVDLLASVAWLRFGDLFGETEGFVCAIMDEVMMTNNYRRFIVKDGTVDICRACHRPGESIRHIISGCSRLANGEYLHRHNLVARIIHQQLALKYSLVESEVPYYRYVPDPVLENGHITLYWDRSIITDRTIVANKPDIVVVDRSERRAMIVDITVPHDENLVKAEKDKQIKYLDLAREVVDMWDVDSAIIVPIVVTANGLIAKSLDQHLRRLSLGSWIKGLIQKAVLLDTARIVRRFLSLEP

SEQ ID NO: 11277 - protein, 1198 aa, Apamea monoglypha
MLTRSAARRARLPSPDSSLSSASPPPVPSPTVSAVTTPAAVVASSSSDEYFSPPTTPPPARRRGGRRPPDGLGPRGPLASDRVPAPGGSVQRMRWTRSINENVMRSYYGATEGGNNLTAYRVRMLSLFQVLEPAVNVSAQRLSDQVRVIQRNHMLDDTVLDRLRSEMQSSHVIAPQSQTAAVLPQSNTSHADEGSNDRATNVSIQCNEELRNALEGAIREYRFMSPELRPRLPRLPMHNKNRALVAVLDAQLSSHFDACEDLTDTHSILYCAAVAACRVAHVKFDSDSRATRPKPAIPAWQCRIERRIGGARALIGKLICFREGNTRPRVMRFVRRAFLGTDISSQDYLSRVTERIDFLKQKVYAWANRIRRYKRRVERYTQNRTFQSDERWVYRGWERPDQSVADTCLPDDDAMCSFWRSIWSAPVSHTEGDWTGKIERACELIPEMGAITICPQDVARAVRPLPNWKSPGPDGLHNFWIKWFQRSHAPLAAQFQSALESGLLPQFITTGITHLLHKSGSTADPKNYRPITCLPTIYKVLTSILRAKINKHIDSNSIMSVSQNGCRNGSRGTKELLLIDMAISQQVRRSRKDLSTCWIDYKKAYDSVPHTWLMRVLELYKVDTTLRTFLMTCMGQWRTVLRYPGCRNIQRNSEPIRIERGIFQGDSLSPLWFCLALNPLSTLLDDSGLGYRLRRGGQVISHLLYMDDLKLFAPNNLQLMKLLKITETFSSAIRMEFGVDKCAVMHVKRGEIVESVGTQLSDFTNLRALSAAETYKYLGMSEALGINVTDMKQSLKERFFGRLKKVFNSLLSGGNKVRAFNSWVMPVLMYSFGILKWTQTELEALDRRVRTLLTANRMHHPRSSVMRLYIPRKCGGRGFLNAKTLHNREICSLREYFLETDVGMHRDVVAVDKGLTPLSLAKENWRKPVVLDTNDRMEVWQSKELHGRFYRALHGPDVDLLASVAWLRFGDLFGETEGFVCAIMDEVMMTNNYRRYIVKDGTVDICRACHRPGESIRHIISGCSRLANGEYLHRHNLVARIIHQQLALKYSLVESEVPYYRYVPDPVLENGNITLYWDRSIITDRTIVANKPDIVVVDRSERRAMIVDITVPHDENLVKAEKDKQIKYLDLAREVVDMWDVDSAIIVPIVVSANGLIAKSLDQHLRRLSLGSWIKGLIQKAVLLDTARIVRRFLSLEP

SEQ ID NO: 11278 - protein, 1210 aa, Amphipyra berbera
MLTRSRTKTQDTRTRPRPSASSLSSASQPPDSSIVSDVTPAAAVASSSSDEFYSPPTSPPPPPPPRRGRRGRGRPPACMGPRGPPASDRVPAPGGSVQRMRWTLTMNENCMRAYFGATEGGTNLTAYRGRMLSLFQVLEPTVNVSAQRLSDQVRVIQRDHRLTDAALDRLRSEVQSNRIISLQSQTAAQPQTPTVVPPLPIQADEESDDRVTNVSTQCNEQLRSALELAIREYRFTPPNIRPRIPRLPMHRKNRALMCALDSLLSSYFDNSENLEDTHSILYCAAVAACRVAHAKFDNNDRATRPKPAVPAWQCRIERRINEARALIGKLICFREGNTRPRVMRFVRRAFSGTDINPRDYLSRVTERIDFLKQKVYAWANRIRRYKRRVERYTQNRMFHSDERWVYRTWERPDHDVSDTHLPDNDVMNTFWRNIWSMPVTHTEGDWMQEVQRACEPIEEMGDITIVPQDVTSAVRPMANWKSPGPDGLHNFWLKWLRSSHARLASQFQSSLESGSLPEFLTTGVTHLLHKSGSTAEPKNYRPITCLPTVYKLLTSILRAKINSHILYNSIMSVSQNGCKNGSRGTKELLLIDMAISQQVRRSRKDLSTCWIDYKKAYDSVPHTWLMRVLELYKVNTTLCAFLTSCMGQWRTVLHYPGCRQIQGRGEPIRIERGIFQGDSLSPLWFCLALNPLSTLLEGSGLGYRLRRGGQVISHLLYMDDLKLFAPNNLQLMKLLKVTETFSNSIRMEFGVDKCAVMHVKRGGIMESVGTQLSDSIHLRSLSSTETYKYLGMSEALGINETDMKQSLRERFYGRLKKVLKSLLSGGNKVRAFNGWVMPVLMYSFGILKWTQTELDALDRRVRTLLTAYRMHHPRSSVMRLYIPRKCGGRGFLNAKTLHNHEVCSLREYFLQADVGMHRDVVAVDKGFTPLSLAKENWRKPVVLDTNGRREVWQSKELHGRFYRALHGPDVDFLASVAWLRFGDLFGETEGFVCAIMDEVMMTNNYRKYIVKDGTVDICRACHCPGESIRHIISGCSRLANGEYLHRHNLVARIIHQQLALKYNLVDAEVPYYKYVPDPVLENGHITLYWDRSIITDRTIVANKPDIVVIDRTERLTMIVDITVPHDENLVKAEKDKEIKYQDLAHEVVDMWEVDSAVIVPIVVTANGLIAKSLDHHLTRLSLGSWVKGLIQKAVLLDTARIVRKFLSLRP

SEQ ID NO: 11279 - protein, 1203 aa, Amphipyra berbera
MLTRARARKQTAHPRSPDSSLSSASQPPESSPPVSAVTPAAAVASSSSDEYYSPPSSPPPVRRRGGARPPACLGPRGQPATNRVPAAGGNVSRMRWTQSINENVMRAYYGATEGGINLTAYRERMLFLFQVLEPAINVSTQRLSDQVRVVQRNRRLDDTVLERLRSEARNSQTVTFPVQAAVQMQPLAVPPRPIHVDGEGDGEAINVSNQCSEELRSALDDAILEFRTTPPEIRPRLPRLPMHGKNRALMCALDSLLSNYFDGSEDLADTHSILYCAAIAACRVAHVKFTENERATRPKPAVPAWQSRIERRIGGARVLIGKLICFREGNNRPRVMRFVRRAFSGTDISPRDYMSRVTERIDFLKQKVYAWANRIRRYKRRVERYTQNRIFQSDQRRVYRAWERPDFGGGDVRLPDDDALSSFWRSIWSVPIAHTEDGWMRDIEQACEPIAEMEPITITPQDVADAARPLPNWKSPGPDGLHNFWLKWLRSSHARLASQFQSSLESGSLPQFLTTGVTHLLYKSGGTAEPKNYRPITCLPTVYKLLTSILRVKITTHIDNNCIMSASQNGCRKGSRGTKELLLIDMAISQQVRRSQKDLSTCWIDYKKAYDSVPHSWLMRVLELYKINTTLRTFLMSCMRHWRTVLRYPGCRRIRGSGEQIRIERGIFQGDSLSPLWFCLALNPLSTLLEGTGLGYQLRRGGQVISHLLYMDDLKLFAPTDLQLMELLKVTENFSNSIRMEFGVDKCAVMHVKRGRIAESEGIQLPNSVQLRSLSPTETYKYLGMSEALGISETDMRQSLRERFFGRLNKLLKSFLSGGNKVRAFNGWVMPVLMYSFGTLKWTQADLDALDRRVRALLTAHRMHHPRSSVMRLYIPRKCGGRGFLNAKTLHNREVYSLREYFLQAEGVMHRDVVAVDKGFTPLALARENWRKPAVLSTNDREVVWQSKELHGRYYRALHGPDVDFSASVSWLRSGNLFGETEGFVCAIMDEVMMTNNYRKYIVKDGTVDICRACHRPGESIRHIVSGCSRLANGEYLHRHNLVARIIHQQLALKYNLVESEVPYYRYVPDPVLENGHATLYWDRSIITDRTIVANKPDIVVIDRSERRTMIVDITVPHDENLVKAEKDKQIKYLDLAHEVVGMWDVDSAVIVPIVVTANGIIAKSLDIHLMRLSLGGWIKGLIQRAVLLDTARIVRRFLSLEP

SEQ ID NO: 11280 - protein, 1208 aa, Amphipyra berbera
MLTRSRTKTQDTRTRPRPSASSLSSASQPPDSSIVSDVTPAAAVASSSSDEFYSPPTSPPPPPRRGRRGRGRPPACMGPRGPPASDRVPAPGGSVQRMRWTLTMNENCMRAYFGATEGGTNLTAYRGRMLSLFQVLEPTVNVSAQRLSDQVRVIQRDHRLTDAALDRLRSEVQSNRIISLQSQTAAQPQTPTVVPPLPIHADEESDDRVTNVSTQCNEQLRSALELAILEYRFTPPNIRPRIPRLPMHRKNRALMCALDSLLSSYFDNSENLEDTHSILYCAAVAACRVAHAKFDNNDRATRPKPAVPAWQCRIERRINEARALIGKLICFREGNTRPRVMRFVRRAFSGTDINPRDYLSRVTERIDFLKQKVYAWANRIRRYKRRVERYTQNRMFHSDERWVYRTWERPDHDVSDTHLPDNDVMNTFWRNIWSMPVTHAEGDWMQEVQRACEPIEEMGDITIVPQDVTSAVRPMANWKSPGPDGLHNFWLKWLRNSHARLASQFQSSLESGSLPEFLTTGVTHLLHKSGSTAEPKNYRPITCLPTVYKLLTSILRAKINSHIINNSIMSVSQNGCKNGSRGTKELLLIDMAISQQVRRSRKDLSTCWIDYKKAYDSVPHTWLMRVLELYKVNTTLCAFLTSCMGQWRTVLHYPGCRQIQGRGEPIRIERGIFQGDSLSPLWFCLALNPLSTLLEGSGLGYRLRRGGQVISHLLYMDDLKLFAPNNLQLMKLLKVTETFSNSIRMEFGVDKCAVMHVKRGGIMESVGTQLSDSIHLRPLSSTETYKYLGMSEALGINETDMKQSLRERFYGRLKKVLKSLLSGGNKVRAFNGWVMPVLMYSFGILKWTQTELDALDRRVRTLLTAYRMHHPRSSVMRLYIPRKCGGRGFLNAKTLHNREVCSLREYFLQADVGMHRDVVAVDKGFTPLSLAKENWRKPVVLDTNGRREVWQSKELHGRFYRALYGTDVDFLASVAWLRFGDLFGETEGFVCAIMDEVMMTNNYRKYIVKDGTVDICRACHCPGESIRHIISGCSRLANGEYLHRHNLVARIIHQQLALKYNLVDAEVPYYKYVPDPVLENGHITLYWDRSIITDRTIVANKPDIVVIDRSERLTMIVDITLPHDENLVKAEKDKEIKYQDLAHEVVDMWEVDSAVIVPIVVTANGLIAKSLDQHLTRLALGSWVKGLIQKAVLLDTARIVRKFLSLRP

SEQ ID NO: 11281 - protein, 1203 aa, Amphipyra berbera
MLTRARARKQTAHPRSPDSSLSSASQPPESSPPVSAVTPAAAVASSSSDEYYSPPSSPPPVRRRGGARPPACLGPRGQPATNRVPAAGGNVSRMRWTQSINENVMRAYYGATEGGINLTAYRERMLFLFQVLEPAINVSAQRLSDQVRVVQRNRRLDDTVLERLRSEARNSQTVTFPVQAAVQMQPITVPPRPIHVDGEGDGEAINVSNQCSEELRSALDDAILEFRTTPPEIRPRLPRLPMHGKNRALMCALDSLLSNYFDGSEDLADTHSILYCATIAACRVAHVKFTENERATRPKPAVPAWQSRIERRIGGARVLIGKLICFREGNNRPRVMRFVRRAFSGTDISPRDYMSRVTERIDFLKQKVYAWANRIRRYKRRVERYTQNRIFQSDQRRVYRAWERPDPGGGDVRLPDDDALSSFWRSIWSVPIAHTEDGWMRDIEQVCEPIAEMEPITITPQDVADAARPLPNWKSPGPDGLHNFWLKWLRSSHARLASQFQSSLESGSLPQFLTTGVTHLLYKSGSTAEPKNYRPITCLPTVYKLLTSILRVKITTHIDNNCIMSASQNGCRKGSRGTKELLLIDMAISQQVRRSQKDLSTCWIDYKKAYDSVPHSWLMRVLELYKINTTLRTFLMSCMRHWRTVLRYPGCRRIRGSGEQIRIERGIFQGDSLSPLWFCLALNPLSTLLEGTGLGYQLRRGGQVISHLLYMDDLKLFAPTDLQLMELLKVTENFSNSIRMEFGVDKCAVMHVKRGRIAESEGIQLPNSVQLRSLSPTETYKYLGMSEALGISETDMRQSLRERFFGRLNKLLKSLLSGGNKVRAFNGWVMPVLMYSFGTLKWTQADLDALDRRVRALLTAHRMHHPRSSVMRLYIPRKCGGRGFLNAKTLHNREVYSLREYFLQAEGVMHRDVVAVDKGFTPLALARENWRKPAVLSTNDREVVWQSKELHGRYYRALHGPDVDFSASVSWLRSGNLFGETEGFVCAIMDEVMMTNNYRKYIVKDGTVDICRACHRPGESIRHIVSGCSRLANGEYLHRHNLVARIIHQQLALKYNLVESEVPYYRYVPDPVLENGHATLYWDRSIITDRTIVANKPDIVVIDRSERRTMIVDITVPHDENLVKAEKDKQIKYLDLAHEVVGMWDVDSAVIVPIVVTANGIIAKSLDIHLMRLSLGGWIKGLIQRAVLLDTARIVRRFLSLEP

SEQ ID NO: 11282 - protein, 1110 aa, Amphipyra berbera
MRWTQSINENVMRAYYGATEGGINLTAYRERMLFLFQVLEPAINVSAQRLSDQVRVVQRNRRLDDTVLERLRSEARNSQTVTFPVQAAVQMQPIAVPPRPIHVDGEGDGEAINVSNQCSEELRSALDDAILEFRTTPPEIRPRLPRLPMHGKNRALMCALDSLLSNYFDGSEDLADTHSILYCAAIAACRVAHVKFTENERATRPKPAVPAWQSRIERRIGGARVLIGKLICFREGNNRPRVMRFVRRAFSGTDISPRDYMSRVTERIDFLKQKVYAWANRIRRYKRRVERYTQNRIFQSDQRRVYRAWERPDPGGGDVRLPDDDALSSFWRSIWSVPIAHTEDGWMRDIEQVCEPIAEMEPITITPQDVADAARPLPNWKSPGPDGLHNFWLKWLRSSHARLASQFQSSLESGSLPQFLTTGVTHLLYKSGSTAEPKNYRPITCLPTVYKLLTSILRVKITTHIDNNCIMSASQNGCRKGSRGTKELLLIDMAISQQVRRSQKDLSTCWIDYKKAYDSVPHSWLMRVLELYKINTTLRTFLMSCMRHWRTVLRYPGCRRIRGSGEQIRIERGIFQGDSLSPLWFCLALNPLSTLLEGTGLGYQLRRGGQVISHLLYMDDLKLFAPTDLQLMELLKVTENFSNSIRMEFGVDKCAVMHVKRGRIAESEGIQLPNSVQLRSLSPTETYKYLGMSEALGISETDMRQSLRERFFGRLNKLLKSLLSGGNKVRAFNGWVMPVLMYSFGTLKWTQADLDALDRRVRALLTAHRMHHPRSSVMRLYIPRKCGGRGFLNAKTLHNREVYSLREYFLQAEGVMHRDVVAVDKGFTPLALARENWRKPAVLSTNDREVVWQSKELHGRYYRALHGPDVDFSASVSWLRSGNLFGETEGFVCAIMDEVMMTNNYRKYIVKDGTVDICRACHRPGESIRHIVSGCSRLANGEYLHRHNLVARIIHQQLALKYNLVESEIPYYRYVPDPVLENGHATLYWDRSIITDRTIVANKPDIVVIDRSERRTMIVDITVPHDENLVKAEKDKQIKYLDLAHEVVGMWDVDSAVIVPIVVTANGIIAKSLDIHLMRLSLGGWIKGLIQRAVLLDTARIVRRFLSLEP

SEQ ID NO: 11283 - protein, 1208 aa, Amphipyra berbera
MLTRSRTKTQDTRTRPRPSASSLSSASQPPDSSIVSDVTPAAAVASSSSDEFYSPPTSPPPPPRRGRRGRGRPPACMGPRGPPASDRVPAPGGSVQRMRWTLTMNENCMRAYFGATEGGTNLTAYRGRMLSLFQVLEPTVNVSAQRLSDQVRVIQRDHRLTDAALDRLRSEVQSNRIISLQSQTAAQPQTPTVVPPLPIHADEESDDRVTNVSTQCNEQLRSALELAIREYRFTPPNIRPRIPRLPMHRKNRALMCALDSLLSSYFDNSENLEDTHSILYCAAVAACRVAHAKFDNNDRATRPKPAVPAWQCRIERRINEARALIGKLICFREGNTRPRVMRFVRRAFSGTDINPRDYLSRVTERIDFLKQKVYAWANRIRRYKRRVERYTQNRMFHSDERWVYRTWERPDHDVSDTHLPDNDVMNTFWRNIWSMPVTHAEGDWMQEVQRACEPIEEMGDITIVPQDVTSAVRPMANWKSPGPDGLHNFWLKWLRSSHARLASQFQSSLESGSLPEFLTTGVTHLLHKSGSTAEPKNYRPITCLPTVYKLLTSILRAKINSHIINNSIMSVSQNGCKNGSRGTKELLLIDMAISQQVRRSRKDLSTCWIDYKKAYDSVPHTWLMRVLELYKVNTTLCAFLTSCMGQWRTVLHYPGCRQIQGRGEPIRIERGIFQGDSLSPLWFCLALNPLSTLLEGSGLGYRLRRGGQVISHLLYMDDLKLFAPNNLQLMKLLKVTETFSNSIRMEFGVDKCAVMHVKRGGIMESVGTQLSDSIHLRPLSSTETYKYLGMSEALGINETDMKQSLRERFYGRLKKVLKSLLSGGNKVRAFNGWVMPVLMYSFGILKWTQTELDALDRRVRTLLTAYRMHHPRSSVMRLYIPRKCGGRGFLNAKTLHNREVCSLREYFLQADMGMHRDVVAVDKGFTPLSLAKENWRKPVVLDTNGRREVWQSKELHGRFYRALYGTDVDFLASVAWLRFGDLFGETEGFVCAIMDEVMMTNNYRKYIVKDGTVDICRACHCPGESIRHIISGCSRLANGEYLHRHNLVARIIHQQLALKYNLVDAEVPYYKYVPDPVLENGHITLYWDRSIITDRTIVANKPDIVVIDRSERLTMIVDITVPHDENLVKAEKDKEIKYQDLAHEVVDMWEVDSAVIVPIVVTANGLIAKSLDQHLTRLALGSWVKGLIQKAVLLDTARIVRKFLSLRP

SEQ ID NO: 11284 - protein, 870 aa, Noctua janthe
MRFVRRAFSGTDISPREYKSRVTERIDFLKQKVYAWANRIRRYRRRVDRYTQNRMFQSDERWVYRTWERPVTIQGVTDAHLPDNDAMNAFWRSIWSVPVGHTEGDWMRVVERACDSIPEMETISISPLDVACAVRPLPNWKSPGPDGLHNFWIKWLQRSHACLASQFQSSLETGSLPPFFTTGVTHLLYKSGSTVEPKNYRPITCLPTVYKVLTSILRAKIVRHIDSNSIMSVSQNGCKNRSRGTKELLLIDMAISQQVRRSRRDLSTCWIDYKKAYDSVPHTWLMRVLELYKIDATLRTFLMSCMGQWRTVLLYPGCRQVLGNDEPIRIERGIFQGDSLSPLWFCLALNPLSTLLEDSGLGYQLRRGGQVISYLLYMDDLKIFAPSNLQLMELLKVTEAFSSAIRMEFGINKCADMHVKRGEIMESVGTQLSDSIFLRSLSSTETYKYLGMSEALGINAADMKHSLKERFFGRLNKVLNSLLSGGNKVRAFNGWVMPVLMYSYGILKWTQTELDALDRKVRTLLTANRMHHPRSSVMRLYIPRKCGGRGFLNAKTLHNRKVCSLREYFLETDVGMHRDVVSVDKSFTSLSLANQNWRKPVVLDTNNRREVWQSKELHGRFFRALHGPDVDFLASVSWLRFGDLFGETEGFVCAIMDEVIMTNNYRKYIIKDGTVDIYRACHRPGESIRHMVSGCSRLANGEYLHRHNLVARIIHHQLALQYNLVSSEVPYYKYVPDPVLENGHATLYWDRSIITDRTILANKPDIVVIDRRERRAMIVDITVPHDENLVKAENDKKIKYLDLAHEVVDMWDVDSAIIVPIVVTVNGLIAESLDQHLRRLSLRGWVKGLIQKAVLLDTARIVRRFLSLEP

SEQ ID NO: 11285 - protein, 1197 aa, Noctua janthe
MLTRSATRRARLSPPDPSLSSASPPPESSPIVSAVTPAVAVASSSSDEYFSPPSTPPPVRRRGGRRPPDGLGPRGPPASDRVPAPGGSVPRMRWTQSINANVMRAYYGATEGGNNLTAYRVRMLSLFQVLEPAVNVSAQRLSDQVRVIQRNGMLDDTVLDRLRTEMQSSHVIATPPQTVVPPQSTIIPTHDNNVSNDMVTNVSTQCNEEMRCALEGAIREYRFMQPDLRPRVPRLPMHNKNKVLVAVLDSQLSNYFDNCENLTDAHSVLYCAAVAACRVAHVKFSDDRATRPNPAVPSWQYRIERRIGEARALIGKLICFREGNTRPRVMRFVRRAFSGTDISARDYMSRVTERIDFLKQKVYAWANRIRRYKRRVDRYTQNRTFQRDERWVYRAWERPNQGVADTHLPDDDAMCSFWRSIWSVPVSHTEGEWTREVERACDLVPEMGAITISPQDVVRAVRPLPNWKSPGPDGLHNFWIKWFTRSHARLAILFQSALESGSLPEFLTTGITHLLHKSGSTAEPKNYRPIACLPTVYKVLTSILRAKINKHIDDNSVMSASQNGCRNGSRGTKELLLIDMAISQQVRRSRRDLSTCWIDYKKAYDSVPHTWLMRVLELYKVDSTLRIFLMSCMGQWRTVLRYPGCRQIQRNSEPIRIERGIFQGDSLSPLWFCLALNPLSTLLEDSGLGYRLRRGGQVISHLLYMDDLKLFAPNDLQLMELLKVTETFSSAIRMEFGVDKCAVMHVKRGEIVESVGTQLSDSINLRSLSATETYKYLGMSEALGINVADMKQSLKERFFGRLKKVFNSLLSGGNKVRAFNGWVMPVLMYSFGILKWTQTELDALDRRVRTLLTTYRMHHPRSSVMRLYIPRRCGGRGFLNAKTLHNREIYSLREYFLETDVGMHRDVVAVDKGLTPLSLAKENWRKPVVLDTNDRMEVWQSKELHGRFFRALHGPDVDLPASVAWLRSGDLFGETEGFVCAIMDEVMMTNNYRRFIVKDGTVDICRACHRPGESIRHIISGCSRLANGEYLHRHNLVARIIHQQLALKYNLVESEVPYYKYVPDPVLENGNITLYWDRSIVTDRTIVANKPDIVVVDRSERRAMIVDITVPHDGNLVKAEKDKQIKYLDLAHEVVDMWDVDSAIIVPIVVSAHGLIAKSLDQYLRRLSLGSWIKGLIQKAVLLDTARIVRRFLSLEP

SEQ ID NO: 11286 - protein, 1197 aa, Noctua janthe
MLTRSAARRARLSPPDPSLSSASPPPESRPVVSAVTPAVAVASSSSDEYFSPPTTPPPVRRRGGRRPPDGLGPRGPPASDRVPAPGGSVPRMRWTQSINANVMRAYYGATEGGNNLTAYRVRMLSLFQVLEPAVNVSAQRLSDQVRVIQRNGMLDDTVLDRLRTEMQSSHVIATPAQTVVPPQSTIIPTHDNNVSNDMVTNVSTQCNEEMRCALEGAIREYRFMQPDLRPRVPRLPMHNKNRVLVAVLDSQLSNYFDNCEDLTDAHSVLYCAAVAACRVAHVKFSDDRATRLKPAVPSWQYRIERRIGEARALIGKLICFREGNTRPRVMRFVRRAFSGTDISARDYMSRVTERIDFLKQKVNAWANRIRRYKRRVDRYTQNRTFQRDERWVYRVWERPDQGVADTRLPDDDAMCSFWRSIWSVPVSHTEGEWTREVERACDLVPEMGAITISPQDVVRAVRPLPNWKSPGPDGLHNFWIKWFTRSHARLAILFQSALESGSLPEFLTTGITHLLHKSGSTAEPKNYRPITCLPTVYKVLTSILRAKINKHIDDNSVMSASQNGCRNGSRGTKELLLIDMAISQQARRSRRDLSTCWIDYKKAYDSVPHTWLMRVLELYKVDSTLRIFLMSCMGQWRTVLRYPGCRQIQRNSEPIRIERGIFQGDSLSPLWFCLALNPLSTLLEDSGLGYRLRRGGQVISHLLYMDDLKLFAPNDFQLMELLKVTETFSSAIRMEFGVDKCAVMHVKRGEIVESVGTQLSDSINLRSLSATETYKYLGMSEALGINVADMKQSLKERFFGRLKKVFNSLLSGGNKVRAFNGWVMPVLMYSFGILKWTQTELDALDRRVRTLLTAYRMHHPRSSVMRLYIPRRCGGRGFLNAKTLHNREICSLREYFLETDVGMHRDVVAVDKGLTPLSLAKENWRKPVVLDTNDSMEVWQSKELHGRFFRALHGPDVDLPASVAWLRSGDLFGETEGFVCAIMDEVMMTNNYRRFIVKDGTVDICRACHRPGESIRHIISGCSRLANGEYLHRHNLVARIIHQQLALKYNLVESEVPYYKYVPDPVLENGSITLYWDRSIVTDRTIVANKPDIVVVDRSERRAMIVDITVPHDGNLVKAEKDKQIKYLDLAHEVVDMWDVDSAIIVPIVVSAHGLIAKSLDQYLRRLSLGSWIKGLIQKAVLLDTARIVRRFLSLEP

SEQ ID NO: 11287 - protein, 1197 aa, Noctua janthe
MLTRSATRRARLSPPDPSLSSASPPPESSPIVSAVTPAVAVASSSSDEYFSPPTTPPPVRRRGGRRPPDGLGPRGPPASDRVPAPGGSVPRMRWTQSINANVMRAYYGATEGGNNLTAYRVRMLSLFQVLEPAVNVSAQRLSDQVRVIQRNGMLDDTVLDRLRTEMQSSHVITTPPQTVVPPQSTIIPTHDNNVSNDMVTNVSTQCNEEMRCALEGAIREYRFMQPDLRPRVPRLPMHNKNKVLVAVLDSQLSNYFDNCENLTDAHSVLYCAAVAACRVAHVKFSDDRATRPKPAVPSWQYRIERRIGEARALIGKLICFREGNTRPRVMRFVRRAFSGTDISARDYMSRVTERIDFLKQKVYAWANRIRRYKRRVDRYTQNRTFQRDERWVYRAWERPDQGVSDTHLPDDDAMCSFWRSIWSVPVSHTEGEWTREVERACDLVPEMGAITISPQDVVRAVRPLPNWKSPGPDGLHNFWIKWFTRSHARLAILFQSALESGSLPEFLTTGITHLLHKSGSTAEPKNYRPIACLPTVYKVLTSILRAKINKHIDDNSVMSASQNGCRNGSRGTKELLLIDMAISQQVRRSRRDLSTCWIDYKKAYDSVPHTWLMRVLELYKVDSTLRIFLMSCMGQWRTVLRYPGCRQIQRNSEPIRIERGIFQGDSLSPLWFCLALNPLSTLLEDSGLGYRLRRGGQVISHLLYMDDLKLFAPNDLQLMELLKVTETFSSAIRMEFGVDKCAVMHVKRGEIVESVGTQLSDSINLRSLSATETYKYLGMSEALGINVADMKQSLKERFFGRLKKVFNSLLSGGNKVRAFNGWVMPVLMYSFGILKWTQTELDALDRRVRTLLTTYRMHHPRSSVMRLYIPRRCGGRGFLNAKTLHNREIYSLREYFLETDVGMHRDVVAVDKGLTPLSLAKENWRKPVVLDTNDRMEVWQSKELHGRFFRALHGPDVDLPASVAWLRSGDLFGETEGFVCAIMDEVMMTNNYRRFIVKDGTVDICRACHRPGESIRHIISGCSRLANGEYLHRHNLVARIIHQQLALKYNLVESEVPYYKYVPDPVLENGSITLYWDRSIVTDRTIVANKPDIVVVDRSERRAMIVDITVPHDGNLVKAEKDKQIKYLDLAHEVVDMWDVDSAIIVPIVVSAHGLIAKSLDQYLRRLSLGSWIKGLIQKAVLLDTARIVRRFLSLEP

SEQ ID NO: 11288 - protein, 1205 aa, Noctua janthe
MLTRRRAKLHETHPPSPGSSLSSASHSPGRATSVSAASPVAAVASSSSDEFFSPPSTPPPPRRRGRGRPPAGLGPRGQQATNRVPAAGGNVSRIRWTQSMNENVMRAYYGATEGGINLTAYRCRMLSLFQALEPAVNVSAQRLSDQVRVILNNHRLDDATLDRLRSEMQISPASNPLPSQNLTHVPAVLPLRANHHAEEEDDRTISADNLCNVELRSALEGAIREYRFMSPDLRPRLPRLPMNKKNRALVCALDALLPNFIESSTNLCDTHSILYCTAVAACRVANVKFPNTDSPTRPKSAVPAWQCRIERRINEARALIGKLICFREGNTRPRVMRFVRRAFSGTDISPREYMSRVTERIDFLKQKVYAWANRIRRYRRRVDRYTQNRMFQSDERWVYRTWERPVTIQGVTDAHLPDNDAMNAFWRSIWSVPVGHTEGDWMRVVERACDSIPEMEAISISPLDVACAVRPLPNWKSPGPDGLHNFWIKWLQRSHACLASQFQSSLETGSLPPFFTTGVTHLLYKSGSTVEPKNYRPITCLPTVYKVLTSILRAKIVRHIDSNSIMSVSQNGCKNGSRGTKELLLIDMAISQQVRRSRRDLSTCWIDYKKAYDSVPHTWLMRVLELYKIDATLRTFLMSCMGQWRTVLLNPGCRQVLGNDEPIRIERGIFQGDSLSPLWFCLALNPLSTLLEDSGLGYRLRRGGQVISHLLYMDDLKIFAPSSLQLMELLKVTETFSSAIRMEFGLDKCAVMHVKRGEIMESVGTQLSDSIFLRSLSSTETYKYLGMSEALGINAADMKQSLKERFFGRLNKVLNSLLSGGNKVRAFNGWVMPVLMYSYGILKWTQTELDALDRKVRTLLTANRMHHPRSSVMRLYIPRKCGGRGFLNAKTLHNREVCSLREYFLETDVGMHRDVVSVDKSFTPLSLANQNWRKPVVLDTNNRREVWQSKELHGRFFRALHGPDVDFLASVSWLRFGDLFGETEGFVCAIMDEVIMTNNYRKYIIKDGTVDICRACHRPGESIRHIVSGCSRLANGEYLHRHNLVAKIIHQQLALQYNLVSSEVPYYKYVPDPVLENGHATLYWDRSIITDRTILANKPDIVVIDRRERRAMIVDITVPHDENLVKAENDKKIKYLDLAHEVVDMWDVDSAIIVPIVVTVNGLIAESLDQHLRRLSLRGWVKSLIQKAVLLDTARIVRRFLSLEP

SEQ ID NO: 11289 - protein, 1197 aa, Noctua janthe
MLTRSATRRARLSPPDPSLSSASPPPESSPIVSAVTPAVAVASSSSDEYFSPPTTPPPVHRRGGRRPPDGLGPRGPPASDRVPAPGGSVPRMRWTQSINANVMRAYYGATEGGNNLTAYRVRMLSLFQVLEPAVNVSAQRLSDQVRVIQRNGMLDDTVLDRLRTEMQSSHVIATPPQTVVPPQSTIIPTHDNNVSNDMVTNVSTQCNEEMRCALEGAIREYRFMQPDLRPRVPRLPMHNKNKVLVAVLDSQLSNYFDNCENLTDAHSVLYCAAVAACRVAHVKFSDDRATRPKPAVPSWQYRIERRIGEARALIGKLICFREGNTRPRVMRFVRRAFSGTDISARDYMSRVTERIDFLKQKVYAWANRIRRYKRRVDRYTQNRTFQRDERWVYRAWERPDQGVADTHLPDDDAMCSFWRSIWSVPVSHTEGEWTREVERACDLVPEMGAITISPQDVVRAVRPLPNWKSPGPDGLHNFWIKWFTRSHARLAILFQSALESGSLPEFLTTGITHLLHKSGSTAEPKNYRPIACLPTVYKVLTSILRAKINKHIDDNSVMSASQNGCRNGSRGTKELLLIDMAISQQVRRSRRDLSTCWIDYKKAYDSVPHTWLMRVLELYKVDSTLRIFLMSCMGQWRTVLRYPGCRQIQRNSEPIRIERGIFQGDSLSPLWFCLALNPLSTLLEDSGLGYRLRRGGQVISHLLYMDDLKLFAPNDLQLMELLKVTETFSSAIRMEFGVDKCAVMHVKRGEIVESVGTQLSDSINLRSLSATETYKYLGMSEALGINVADMKQSLKERFFGRLKKVFNSLLSGGNKVRAFNGWVMPVLMYSFGILKWTQTELDALDRRVRTLLTTYRMHHPRSSVMRLYIPRRCGGRGFLNAKTLHNREICSLREYFLETDVGMHRDVVAVDKGLTPLSLAKENWRKPVVLDTNDRMEVWQSKELHGRFFRALHGPDVDLPASVAWLRSGDLFGETEGFVCAIMDEVMMTNNYRRFIVKDGTVDICRACHRPGESIRHIISGCSRLANGEYLHRHNLVARIIHQQLALKYNLVESEVPYYKYVPDPVLENGNITLYWDRSIVTDRTIVANKPDIVVVDRSERRAMIVDITVPHDGNLVKAEKDKQIKYLDLAHEVVDMWDVDSAIIVPIVVSAHGLIAKSLDQYLRRLSLGSWIKGLIQKAVLLDTARIVRRFLSLEP

SEQ ID NO: 11290 - protein, 1200 aa, Mythimna ferrago
MLTRSRARSQIAQPTSSGSSLSSASQPPGPAPAVSPEIPVAAVASSSSDEYFSPPTTPPPARRRGRGRPPACLGPRGPPASDRVLAAGGSVQRMRWTQSINENVMRSYFGATEGGTNLTAYRGRMLSLFQVLEPAVNVSAQRLSDQVRVIQRNRMLDDAVLDRLRLESRNGRVSPISPPAAVQRQPSVSPRPDPVGEDDDDGAISVSTQCNACLRSALEDAFREYRSIPPELRPRLPRLPMHRKNRALVCALDSQLSSCFDSSEDLTDTHSILYCAAAAACRVAHVKIPNNDRATRPAKPAWQCRIERRIGEARALIGKLICFREGNTRPRVMRFVRRAFSGTDISPRDYLPRITERIDFLKQKVYAWANRIRRYKRRVERYTQNHTFQSNERWVYRAWERPDQSVIDARLPDDDAMYSFWRSIWSVPVNHTEGDWTREIERVCELIPEMGAINISPQDVARAVRPLPNWKSPGPDGLHNFWLKWFQSSHARLASQFQSALESGSLPQFLTTGITHLLHKSGSTAEPKNYRPITCLPTVYKVLTSILRAKINNHIETNSIMSASQNGCRNGSRGTKELLLIDVSISQQVRRSRRELSTCWIDYKKAYDSVPHTWLMRVLELYKVDATLRAFLMSCMGQWRTVLHYPGCRRVSENSEPLRIERGIFQGDSLSPLWFCLALNPLSTLLEGSGLGYRLRREGQVISHLLYMDDLKLFASNNLQLMELLKVTETFSSAIRMEFGLDKCAVMHVKRGEIMESVGTQLSDSIHLRSLCSTETYKYLGMSEALGINAADVKQSLRERFFGRLNKVLNSLLSGGNKVRAFNGWVMPVLMYSFGILKWTQTELDALDRRVRTLLTANRMHHPRSSVMRLYIPRKCGGRGFLNAKTLHNREVCSLREYFLETDVGMHRDVVAVDKGLTPLSLANENWRKPVVLDTNVRREVWQSKELHGRFFRALHGPDVDQLASVAWLRVGDLFGETEGFVFAIMDEVMMTNNYRKYIVKDGTVDICRACHRPGESIRHIIFGCSHLANGDYLHRHNLVARIIHQQLALKYNLVESEVPYYRYVPDPVLENGSVTLYWGRSIITDRTIVANKPDIVVIDRLERRTMIVDIAVPHDENLVKAEKDKQTKCLDLVREVVDMWEVDRAIIVPIVVTANGLIAKSLDQHLRRLSLGSWIKGLIQKAVLLDTARIVRRFLSQEP

SEQ ID NO: 11291 - protein, 1200 aa, Mythimna ferrago
MLTRNRAQQLNTQLTTSGPSLSSASQPPGPAPAVSPEIPVVAVASSSSDEYFSPPTTPPPARRRGRGRPPACLGPRGPPASDGVPTAGGSVQRMRWTQSINENVIRSYFGATEGGTNLTAYRGRMLSLFQVFEPAVNVSAQRLSDQVRVIQRNRMLDDVVLDRLRLESRNGRVSPVSPPAAVQRQPSVSPRPDHVGEDDDDGAISVSTQCNVRLRSALEDAFREYRSIPPELRPRLPRLPMHRKNRALVCALDSQLSNCFDSSEDLTDTHSILYCAAAAACRVAHVKIPNSDRATRPAKPAWQCRIERRIGEARALIGKLICFREGNTRPRVMRFVRRAFSGTDISPRDYLPRITERIDFLRQKVYAWANRIRRYKRRVERYTQNRAFQSNERWVYRAWERPDQSVIDTRLPDDDAMYSFWRSIWSVPVNHTEGDWTRKVERECELLPEMGAVTISPQDVARAVRPLPNWKSPGPDGLHNFWLKWFKSSHARLASQFQSALESGSLPQFLTTGITHLLHKSGSTAEPKNYRPITCLPTVYKVLTSILRAKINSHIETNSIMSASQNGCRNGSRGTKELLLIDVAISQQVRRSRRDLSTCWIDYKKAYDSVPHTWLMRVLELYKIDVTLRTFLMSCMGQWRTVLHYPGCRRVSENSEPLRIERGIFQGDSLSPLWFCLALNPLSTLLEGSGVGYRLRREGQVISHLLYMDDLKLFASNNLQLMELLKVTETFSSAIRMEFGLDKCAVMHVKRGEIMESVGTQLSDSIHLRSLCSTETYKYLGMSEALGINAADVKQSLRERFFGRLNKVLKSLLSGGNKVRAFNGWIMPVLMYSFGILKWTQTELDALDRRVRTLLTANRMHHPRSSVMRLYIPRKCEGRGFLNAKTLHNREVCSLREYFLETDVGMHRDVVAVDKGLTPLSLANENWRKPIVMDTNERKEVWKGKELHGRFYRALHGPDVDLLASVSWLRFGDLFGETEGFVFAIMDEVMMTNNYRKYIVKDGTVDICRACHRPGESIRHIISGCSHLANGDHLHRHNLVARIIHQQLALKYNLVESEVPYYRYVPDPVLENGSVTLYWDRSIITDRTIVANKPDIVVIDRLERRTMIVDIAVPHDENLVKAEKDKQTKYLDLAREVVDMWEVDRAIIVPIVVTANGLIAKSLDQHLRRLSLGSWIKGLIQKAVLLDTARIVRRFLSQEP

SEQ ID NO: 11292 - protein, 1200 aa, Mythimna ferrago
MLTRAAARRARPPPPASSLSSASPPPEPSPIVSAVTPAVAAASSSSDEYYSPPTTPPPTRRRGGRRPPDCLGPRGPPASDRVPAPGGSVQRMRWTQSINENVMRSYYGATEGGNNLTAYRVLMLSLFQVLEPAVNVSAQRLSDQVRVILRNHMLDDTVLDRLRTEMSDRVITPPSQPVVPAVVPPSNYISFHTDEVSSDTVTNVSNQCNSELRSALECAIREYRNIPPELRPRIPRLPMCNKNRALVAALDSQLSNYFDDCEDLTDTHSIMYCAAVAACRVAHVKFPNSDVATRPKPAVPAWQCRIERRIGGARALIGKLICFREGNTRPRVMRFVRRAFSGTDISPRDYMSRVTERIDFLKQKVYAWANRIRRYKRRVERYTQNRTFRSNERWVYRAWERPDQGVTDARLPDDDAMSSFWRSIWSVPVSHTEGDWTREVERACDPIPQMGAIDISPQDVARAVRPLPNWKSPGPDGLHNFWIKWFTRSHARLAYQFQSALESGSLPQFLTTGITHLLHKSGSTAEPKNYRPITCLPTVYKVLTSILRSKINSHIDENSIMSPSQNGCRNGSRGTKELLLIDMTISQQVRRSRKDLSTCWIDYRKAYDSVPHTWLMRVLELYKIDTTLRTFLMSCMRQWSTVLRYPGCRNIQRNSEPVRIERGIFQGDSLSPLWFCLALNPLSTLLENSGLGYRLKRGGQVISHLLYMDDLKLFAPNNLQLMELLKVTEIFSSAIRMEFGVDKCAVMHVKRGEVVESVSTQLTDSINLRSLSPTETYKYLGMSEALGISITGMKQSLRERFFGRLKKVFNSLLSGGNKVRAFNGWVMPVLMYSFGVLKWTQTELDALDRRVRTLLTAYRMHHPRSSVMRLYIPRKCGGRGFLNAKTLHNREVCSLREYFLAADVGMHRDVVAVDKGLTPLSLANENWRKPIVLDTNDRREVWQSKELHGRFFRALHGPDVDQLASVAWLRFGDLFGETEGFVCAIMDEVIMTNNYRRFIVKDGTVDICRACHRPGESIRHIISGCSRLANGEYLHRHNLVARIIHQQLALKYSLVESEVPYYRYEPDPVLDNGHITLYWDRPIITDRTIVANKPDIVVVDRSERRAMIVDISVPHDENLVKAEKDKQIKYIDLAREVVDMWEVDSAVIVPIVVSANGLIAKSLDQHLRRLSLGDWIKGLIQKAVLLDTARIVRRFLSLEP

SEQ ID NO: 11293 - protein, 1200 aa, Mythimna ferrago
MLTRSRARSQIAQPTSSGSSFSSASQPPGPAPAVSPEIPVAAVASSSSDEYFSPPTTPPPARRRGRGRPPACLGPRGPPASDRVLAAGGSVQRMRWTQSINENVMRSYFGATEGGTNLTAYRGRMLSLFQVLEPAVNVSAQRLSDQVRVIQRNRMLDDAVLDRLRLESRNGRVSPISPPAAVQRQPSISPRPDHVGEDDDDEAISVSTQCNARLRSALEDAFREYRSIPPELRPRLPRLPMHRKNRALVCALDSQLSNCFDSSEDLSDTHSILYCAAAAACRVAHVKIPNNDRATRPAKPAWQCRIERRIGEARALIGKLICFREGNTRPRVMRFVRRAFSGTDISPRDYLPRITERIDFLKQKVYAWANRIRRYKRRVERYTQNHTFQSNERWVYRAWERPDQSVIDTRLPDDDAMYSFWRSIWSVPVNHTEGDWTREIERECELIPEMGAINISPQDVARAVRPLPNWKSPGPDGLHNFWLKWFQSSHARLASQFQSTLESGSLPQFLTTGITHLLHKSGSTAEPKNYRPITCLPTVYKVLTSILRAKINNHIETNSIMSASQNGCRNGSRGTKELLLIDVAISQQVRRSRRDLSTCWIDYKKAYDSVPHTWLMRVLELYKVDATLRAFLMSCMGQWRTVLHYPGCRRVSENSEPLKIERGIFQGDSLSPLWFCLALNPLSTLLEGSGLGYRLRREGQVISHLLYMDDLKLFASNNLQLMELLKVTETFSSAIRMEFGLDKCAVMHVKRGEIMESVGTQLSDSIHLRSLCSTETYKYLGMSEALGINAADVKQSLRERFFGRLNKVLNSLLSGGNKVRAFNGWVMPVLMYSFGILKWTQTELDALDRRVRTLLTANRMHHPRSSVMRLYIPRKCGGRGFLNAKTLHNREVCSLREYFLETDVGMHRDVVAVDKGLTPLSLANENWRKPIVMDTNERKEVWKGKELHGRFYRALHGPDVDLLASVSWLRFGNLFGETEGFVFAIMDEVMMTNNYRKYIVKDGTVDICRACHRPGESIRHIISGCSHLANGDYLHRHNLVARIIHQQLALKYNLVESEVPYYKYVPDPVLENGSVTLYWDRSIITDRTIVANKPDIVVIDRLERRTMIVDIAVPHDENLVKAEKDKQTKYLDLAREVVDMWEVDRAIIVPIVVTANGLIAKSLDQHLRRLSLGSWIKGLIQKAVLLDTARIVRRFLSQEP

SEQ ID NO: 11294 - protein, 1200 aa, Mythimna ferrago
MLTRAAARRARPPPLASSLSSASLPPEPSLTVSAVTPAAAAASSSSDEYYSPPTTPPPARRRGGRRPPACLGPRGPPVSDRVPAAGGSVPRMRWTQSTNENVMRAYYGATEGGNNLTAYRVRMLSLFQVLEPAVNVSAQRLSDQVRVIQRNNMLDDTVLDRLRTEMSNRVITPPSQPVVPVVVPQSSHISLHTDEVSTDTVTNVSTQCNNELRSALECAIREYRNMPLELRPRLPRLPMHNKNKALVAALDSQLSNYFDDCEDLTDTHSIMYCAAVAACRVAHVKFPNSDVATRPKPAVPAWQYRIERRIGGARALIGKLICFREGNTRPRVMRFVRRAFSGTDISPRDYMSRVTERIDFLKQKVYAWANRIRRYKRRVERYIQNSTFRSNERWVYRAWERPDQGVTDTRPPDDDAMCSFWRNIWSVPVSHTEGGWTREVERACESVTEMGAITISPQDVARAVRPLPNWKSPGPDGLHNFWIKWLQRSHARLASQYQAALESGSLPEFLTTGVTHLLHKSGSTAEPKNYRPITCLPTVYKVLISILRAKINHHVDNNAIMSASQNGCRNGSRGTKELLLIDMAISQQVRRSRKDLSTCWIDYKKAYDSVPHTWLMRVLELYKVDATLRTFLMSCMRQWRTVLRYPGCRNIQRNSEPVRIERGIFQGDSLSPLWFCLALNPLSTLLENSGLGYRLKRGGQVISHLLYMDDLKLFAPNNLQLMELLKVTETFSSAIRMEFGVDKCAVMHIKRGEIVESVGIQLSDSIHLRSLSPTETYKYLGMSEALGINATDMKQSLRERFFGRLKKVLNSLLSGGNKVRAFNGWVMPVLMYAFGVLKWTQTELDALDRRVRTLLTAYRMHHPRSSVMRLYIPRKCGGRGFLNAKSLHNREVCSLREYCPAADGGMHRDVVAVDKGLTPLSLANENWRKPVVLDTNVRREVWQSKELHGRFFRALHGPDVDQLASVAWLRVGDLFGETEGFVCAIMDEVIMTNNYRRFIVKDGTVDICRACHRPGESIRHIISGCSRLANGEYLHRHNLVARIIHQQLALKYSLVESEVPYYRYVPDPVLDSGDITLYWDRSIITDRTIVANKPDIVVVDRSERRAMIVDISVPHDENLAKAEKDKQIKYIDLAREVVDMWEVDSAIIVPIVVSANGLIAKSLDQHLRRLSLGDWIKGLIQKAVLLDTARIVRRFLSLEP

SEQ ID NO: 11295 - protein, 1048 aa, Mythimna ferrago
MLDDTVLDRLRTEMSDRVITPPSQPVVPAVVPPSSYISFHTDEVSSDMVTNVSNQCNSELRSALECAIREYRNIPPELRPRIPRLPMCNKNRALVAALDSQLSNYFDDCEDLTDTHSIMYCAAVAACRVAHVKFPNSDVATRPKPAVPAWQCRIERRIGGARALIGKLICFREGNTRPRVMRFVRRAFSGTDISPRDYMSRVTERIDFLKQKVYAWANRIRRYKRRVERYTQNRTFRSNERWVYRAWERPDQGVTDARLPDDDAMSSFWRSIWLVPVSHTEGDWTREVERACDPIPQMGAIDISPQDVARAVRPLPNLKSPGPDGLHNFWIKWFTRSHARLAYQFQSALESGSLPQFLTTGITHLLHKSGSTAEPKNYRPITCLPTVYKVLTSILRSKINSHIDENSIMSPSQNGCRNGSRGTKELLLIDMTISQQVRRSRKDLSTCWIDYRKAYDSVPHTWLMRVLELYKIDTTLRTFLMSCMRQWSTVLRYPGCRNIQRNSKPVRIERGIFQGDSLSPLWFCLALNPLSTLLENSGLGYRLKRGGQVISHLLYMDDLKLFAPNNLQLMELLKVTEIFSSAIRMEFGVDKCAVMHVKRGEVVESVSTQLTDSINLRSLSPTETYKYLGMSEALGISITGMKQSLRERFFGRLKKVFNSLLSGGNKVRAFNGWVMPVLMYSFGVLKWTQTELDALDRRVRTLLTAYRMHHPRSSVMRLYIPRKCGGRGFLNAKTLHNREVCSLREYFLAADVGMHRDVVAVDKGLTPLSLANENWRKPIVLDTNDRREVWQSKELHGRFFRALHGPDVDQLASVAWLRFGDLFGETEGFVCAIMDEVIMTNNYRRFIVKDGTVDICRACHRPGESIRHIISGCSRLANGEYLHRHNLVARIIHQQLALKYSLVESEVPYYRYEPDPVLDNGHITLYWDRPIITDRTIVANKPDIVVVDRSERRAMIVDISVPHDENLVKAEKDKQIKYIDLAREVVDMWEVDSAVIVPIVVSANGLIAKSLDQHLRRLSLGDWIKGLIQKAVLLDTARIVRRFLSLEP

SEQ ID NO: 11296 - protein, 868 aa, Mythimna ferrago
MRFVRRAFSGTNISPRDYMSRVTERIDFLKQKVYAWANRIRRYKRRVERYTQNRTFRSNERWVYRAWERPDQGVTDARLPEDDAMCSFWRSIWSVPVSHTEGDWTREVERACDPIPQMGAITISPQDVARAVRPLPNWKSPGPDGLHNFWIKWFTRSHARLAYQFQSALQSGSLPQFLTTGITHLLHKSGSTAEPKNYRPITCLPTVYKVLTSILRSKINSHIDENSIMSPSQNGCRNGSRGTKELLLIDMTISQQVRRSRKDLSTCWIDYKKAYDSVPHTWLMRVLELYKIDTTLRTFLMSCMRQWSTVLRYPGCRNIQRNSEPVRIERGIFQGDSLSPLWFCLALNPLSTLLENSGLGYRLKRGGQVISHLLYMDDLKLFAPNNLQQMELLKVTETFSSAIRMGFGVDKCAVMHVKRGEVVESVGVQLTDSINLRSLSPTETYKYLGMSEALGISTIDMKQSLKERFFGRLKKVFNSLLSGGNKVRAFNGWVMPVLMYSFGVLKWTQTEIDALDRRVRTLLTAYRMHHPRSSVMRLYIPRKSGGRGFLNAKTLHNREVCSLREYFLAADVGMHRDVVALDKGLTPLSLANGNWRKPIVLDTDDRREVWQSKELHGRFFRALHGPDVDQLASVAWLRFGDLFGETEGFVCAIMDEVIMTNNYRRFIVKDGTVDICRACHRPGESIRHIISGCSRLANGEYLHRHNLVARIIHQQLALKYSLVESEVPYYRYEPDPVLDNGHITLYWDRPIITDRTIVANKPDIVVVDRSERRAMIVDISVPHDENLVKAEKDKQIKYIDLAREVVDMWEVDSAIIVPIVVSANGLIAKSLDQHLRRLSLGDWIKGLIQKAVLLDTARIVRRFLSLEP

SEQ ID NO: 11297 - protein, 1200 aa, Mythimna ferrago
MLTRAAARRARPPPPASSLSSASPPPEPSLNASAVTPAATVASSSSDEFYSPPTSPPPARRRRGRRPPSSLGPRGPPASDRVPAPGGSVQRMRWTQSINENVMRSYYGATEGGNNLTAYRVRMLSLFQVLEPAVNVSAQRLSDQVRVILRNHMLDDSVLDRLRTEMSDRVITPPSQPVVPVVVPPSSHISFHTDEVSTDMVTNVSTQCNNELRSALECAIREYRNIPPELRPRIPRLPMCNKSRALVAALDSQLSNYFDDCEDLTETHSIMYCAAVAACRVAQVKFPDSDEATRPKSAVPAWQCRIERRIGGARALIGKLICFREGNTRPRVMRFVRRAFSGTNISPRDYMSRVTERIDFLKQKVYAWANRIRRYKRRVERYTQNRTFRSNERWVYRAWERPDQGVTDARLPEDDAMCSFWRSIWSVPVSHTEGDWTREVERACDPIPQMGAIDISPQDVARAVRPLPNWKSPGPDGLHNFWIKWFTRSHARLAYQFQSALESGSLPQFLTTGITHLLHKSGSTAEPKNYRPITCLPTVYKVLTSILRSKINSHIDENSIMSPSQNGCRNGSRGTKELLLIDMTISQQVRRSRKDLSTCWIDYKKAYDSVPHTWLMRVLELYKIDTTLRTFLMSCMRQWSTVLRYPGCRNIQRNSEPVRIERGIFQGDSLSPLWFCLALNPLSTLLENSGLGYRLKRGGQVISHLLYMDDLKLFAPNNLQLMELLKVTETFSSAIRMEFGVDKCAVMHVKRGEVVESVGVQLTDSINLRSLSPTETYKYLGMSEALGISTIDMKQSLKERFFGRLKKVFNSLLSGGNKVRAFNGWVMPVLMYSFGVLKWTQTELDALDRRVRTLLTAYRMHHPRSSVMRLYIPRKCGGRGFLNAKTLHNREVCSLREYFLAADVGMHRDVVALDKGLTPLSLGNENWRKPIVLDTDDRREVWQSKELHGRFFRALHGPDVDQLASVAWLRFGDLFGETEGFVCAIMDEVIMTNNYRRFIVKDGTVDICRACHRPGESIRHIISGCSRLANGEYLHRHNLVARIIHQQLALKYSLVESEVPYYRYEPDPVLDNGHITLYWDRPIITDRTIVANKPDIVVVDRSERRAMIVDISVPHDENLVKAEKDKQIKYIDLAREVVDMWEVDSAIIVPIVVSANGLIAKSLDQHLRRLSLGDWIKGLIQKAVLLDTARIVRRFLSLEP

SEQ ID NO: 11298 - protein, 1083 aa, Mythimna ferrago
MTAYRGRMLSLFQVLEPTVNVSAQRLSDQVRVIQRNRMLDDAVLDRLRLESRNGRVSPVSPPAAVQLQPSVSPRPDHVGEDDDDGAISVSTQCNARLRSALEDAFREYRSIPPELRPRLPRLPMHRKNRALVCALDSKLSNCFDSSEDLTDTHSILYCAAAAACRVAHVKIPNSDRATRPVKPAWQCRIERRIGEARALIGKLICFREGNTRPRVMRFVRRAFSGTDVSPRDYLPRITERIDFLRQKVYAWANRIRRYKRRVERYTQNRAFQSNERWVYRAWERPDQSVIDTRLPDDDAMYSFWRSIWSVPVSHTEGDWTRGVERECELIPEMGAITISPQDVARAVRPLPNWKSPGPDGLHNFWLKWFKSSHARLASQFQSALESGSLPQFLTTGITHLLHKSGSTAEPKNYRPITCLPTVYKVLTSFLRAKINSHIETNSIMSASQNGCRNGSRGTKELLLIDVAISQQVRRSRRDLSTCWIDYKKAYDSVPHTWLMRVLELYKIDVTLRAFLMSCMGQWRTVLHYPGCRRVSENSEPLRIERGIFQVDSLSPLWFCLALNPLSTLLEGSGLGYRLRREGQVISHLLYMDDLKLFASNNLQLMELLKVTETFSSAIRMEFGLDKCAVMHVKRGEIMESVGTQLSDSIHLRSLSSTETYKYLGMSEALGINAADVKQSLRERFFGRLNKVLKSLLSGGNKVRAFNGWVMPVLMYSFGILKWTQTELDALDRRVRTLLTANRMHHPRSSVMRLYIPRKCGGRGFLNAKTLHNREVCSLREYFLETDVGMHRDVVAVDKGLTPLSLANENWRKPIVMDTNERKEVWKGKELHGRFYRALHGPDVDLLASVSWLRFGDLFGETEGFVFAIMDEVMMTNNYRKYIVKDGTVDICRACHRPGESIRHIISGCSHLANGDYLHRHNLVARIIHQQLALKYNLVESEVPYYRYVPDPVLENGSVTLYWDRSIITDRTIVANKPDIVVIDRLERRTIIVDIAVPHDENLVKAEKDKQTKYLDLAREVVDMWEVDRAIIVPIVVTANGLIAKSLDQHLRRLSLGSWIKGLIQKAVLLDTARIVRRFLSQEP

SEQ ID NO: 11299 - protein, 1196 aa, Eilema sororculum
MLTRAKTKIIIQDAHLTPTDSSCSSASQAPGTTSPRPTPVEASSSDEYFSPPTSPTPVRRPGRGRPPTCLGPRRPPASNRAPAAGGNVHRMRWTNSINENVMRAYFAATEGGTNLSAYRSRMLPLFQALEPSVNTSAQRLSDQVRVIQRNHMLNETVLETLRQECLRNICVTPALAPAPAPRTALNEDSHVTRDDTPIPVSIQYNEEIKEALEYALREYRSMPIHVRPRLPRLPIHRRNIALVSALDSLLPKYLENSENLGDTHSILYCTAVAACRMAGAKFPIKDPAIRPKPAIPAWQCRIERRVAEARVLIGKLICFRSGNTRPRVMRYVTRAFAGTNISPQDYTSRVTERIDFLKQKVCAWANRIRRYKKRVDRYTVNRMFQRDQRWVYRSWERTDESVDDLRRPDAEATNAFWRSIWSVPVSHTEGDWMREVERACETIPEMEEIYIDATDVDCAVRSLSNWKSPGPDGLHNFWLKWLRSSHVVLASQFQSAVESGTLPAFMTTGVTHLLHKTGSTLEPNNYRPITCLPTVYKLLTSILRAKINNHINNNSIMCTSQNGCRNGARGTKELLLIDMTISQQARRNHKDLVACWIDYKKAFDSVPHTWLLRVLELYKVNTTLCTFLRSCMGQWRTVLLYPGCRQALGSGEPITIERGIFQGDSLSPLWFCLALNPLSTLLVNSGLGYRLRREGQMVSHLFYMDDLKLFAHTNPQLIALLKVTETFSNSIKMAFGVDKCAVIHVKRGRVVESEGIQLSDSTNLRSLLVTETYKYLGMSQALCINEVGMKQMLQERFFGRLKKVLNSLLSGGNKVRACNSWVMPLLMYSFGILKWTQTELDTIDRKVRTQLTAFRMHHPRSSVMRLYIPRKCGGRGFLNAKTLHNREVCNLRDYFLKSNVDMHRDVVNVDTGLTPLGLAKENWRRPTIVGTDSRREVWQSKELHGRFYRALHRPEVDLLASVSWLRFSDLFGETEGFVCAIADEVIKTNNYRKYIMRDGTIDICRACHQPGESLRHITSGCSRLANGEYLHRHNQVARIIHQRLALKYNLVEVEVPYYRYVPEPVLENSHITLYWDRSIITDRTVVANKPDIVVIDRSERRALIVDVTIPHDENLVKAEKDKQVKYLDLAHEVVDMWNVDSAIIVPIVVSVNGLIAKSLDQHLKRLGLDGWVKGQMQKAVLLDTARIVRKFLSLEP

SEQ ID NO: 11300 - protein, 920 aa, Eilema sororculum
MAGAKFPIKDPAIRPKFTIPAWQCRIERRVAEARVLIGKLICFRSGNTRPRVMRYVTRAFAETDISPQDYTSRVTERIDFLKQKVCAWANRIRRYKKRVDRYTVNRMFQRDQRWVYRSWERTDESVDDVRRPDAEATNAFWRSIWSVPVSHTEGDWMREVERACETIPEMEEIYIDATDVDCAVRSLSNWKSPGPDGLHNFWLKWLRSSHVVLASQFQSAIESGTLPAFMTTGVTHLLHKTGSTLEPNNYRPITCLPTVYKLLTSILRAKINNHINNNSIMCASQNGCRNGARGTKELLLIDMAISQQARRNRKDLTACWIDYKKAFDSVPHTWLLRVLELYKVNTTLCTFLRSCMRQWRTVLFYPGCRQALGGGVPITIERGIFQGDSLSPLWFCLALNPLSALLVNSGLGYRLRREGQVVSHLFYMDDLKLFAHTNPQLIALLKVTETFSNSIKMAFGVDKCAVIHVKRGRVVESEGIQLSDSTNLRSLLVTETYKYLGMSQALCINEVDMKQLLQERFFGRLKKVLNSLLSGGNKVRACNSWVMPLLMYSFGILKWTQTELDTIDRKVRTQLTAFRMHHPRSSVMRLYIPRKCGGRGFLNAKTLHNREVCNLRDYFLKSNVDMHRDVVNVDTGLTPLGLAKENWRRPTIVSTDSRREVWQSKELHGRFYRALHRPEVDLLASVAWLRFSDLFGETEGFVCAIADEVIKTNNYRKYIMRDGTIDICRACHQPGESLRHITSGCSRLANGEYLHRHNQVARIIHQRLALKYNLVEVEVPYYRYVPEPVLENSHITLYWDRSIITDRTVIANKPDIVVIDRSERRALIVDVTIPHDENLVKAEKDKQVKYLDLAHEVVDMWNVDSAIIVPIVVSVNGLIAKSLDQHLKRLGLDGWVKGQMQKAVLLDTARIVRKFLSLEP

SEQ ID NO: 11301 - protein, 1192 aa, Eilema sororculum
MLTRAQASRNRSAPTTSPDSSLSSAAQPPAVEPAASSSSSSDEFFSPPTSPTPVRRPGRGRPPTCLGPRRPPASNRAPAAGGNVHRMRWTNSINENVMRAYFAATEGGTNLSAYRTRMLPLFQALEPSINVSAQRLSDQVRVIQRNRLLNETVLETLRLECLRNICVTPAPAPAPASTVEINDDTCVAPDDTPIPVSIQYNEEIKEALECALREYRSMPVHVRPRLPRMPIHRRNIALVSALDSLLPRYLENSENLGDTHSILYCTAVAACRMAGAKFPKKDPAIRLKSAIPAWQCRIERRVTEARVLIGKLICFRSGNTRPRVMRYVTRAFAGTDISPQDYTSRVTERIDFLKQKVYAWANRIRRYKKRVDRYTVNRMFQRDQRWVYRSWERTEESVDDVRRPDAETTNAFWRSIWSVPVNHTEGDWMREVERACETIPEMEKINIDAIDVDCAVRSLSNWKSPGPDGLHNFWLKWLRSSHVVLASQFQSAVESGTLPAFMTTGVTHLLHKTGSTLEPNNYRPITCLPTVYKLLTSILRAKINNHINNNSIMCASQNGCRNGARGTKELLLIDMAISQQARRNRKDLTACWIDYKKAFDSVPHTWLLRVLELYKVNTTLCTFLRSCMGQWRTVLFYPGCRQALGSGEPITIERGIFQGDSLSPLWFCLALNPLSTLLVNSGLGYRLRREGQMVSHLFYMDDLKLFAHTNPQLIALLKVTETFSNSIKMAFGVDKCAVIHVKRGRVVESEGIQLSDSTNLRSLLVTETYKYLGMSQALCINEVDMKQMLQERFFGRLKKVLNSLLSGGNKVRACNSWVMPLLMYSFGILKWTQTELDTIDRKVRTQLTAFRMHHPRSSVMRLYIPRKCGGRGFLNAKTLHNREVCNLRDYFLKSNVDMHRDVVNVDTGLTPLGLAKENWRRPTIVGTNSRREVWQSKELHGRFYRALHRPEVDLLASVSWLRFSDLFGETEGFVCAIADEVIKTNNYRKYIMRDGTIDICRACHQPGESLRHITSGCSRLANGEYLHRHNQVARIIHQRLALKYNLVEVEVPYYRYVPEPVLENSHITLYWDRSITTDRTVVANKPDIVVIDRSERRALIVDVTIPHDENLVKAEKDKQVKYLDLAHEVVDMWNVDSAIIVPIVVSVNGLIAKSLDQHLKRLGLDGWVKGQMQKAVLLDTARIVRKFLSLEP

SEQ ID NO: 11302 - protein, 1212 aa, Ptilodon capucinus
MTDAPRRNPRRQCRQRSAVRHYAQSTPPDQSPRSASPSPASIIRTSVNAVASSESDEYFSPPTSPPPVRRQRGRPPGHLGLLGQPAPNRVLVPSGVVRRMRWTSSMNENVMRAYYEATEGGTNLTAYRGRMLPLFQSLEPAVNVSAQRLSDQVRVIQRGNMLADTVLDRLRSEVQSRRVVPVASSQPAAQPVARATVTSRLAADSDVDRDNAPIDVSTQYNNLLRSTLEDVVREYRSMPNHLRPRIPRLPMHKGNRALVGALDSLLSIYFDSSDDLVDTHSILYCAAITVCRVARVKVFNTDTTTRPKPAVPAWQCRIERRISEARALIGKLSCFREGNTRPRVMRFVKRAFAGTDVSPREYISRVTERIDFLKQKIYAWANRIRRYKARVDRYSQNSMFQRDQRWVYRSWERPNEPVSELQRPDDNAMTTFWRDIWSVPVTHYEGNWIGDVERMCEPIKEMEAISIGPLDVANAVRSLPNWKAPGPDGLHNFWLKWLRSSHVRLASQFQSALQSGSLPEFITTGVTHLLHKTGSTTDPKNYRPITCLPTIYKTLTSILRAKIARHVEDNSIMSASQNGCKSGSRGTKELLLIDMTICQQARRNRKDLSTCWIDYKKAYDSVPHTWLVRVLELYKIDTTLRTFLESCMRQWKTVLLCPGSRQILGNGEPIRIERGIFQGDSLSPLWFCLALNPLSTLLEESGFGFRLRRGGQVISHLLYMDDLKLFAPTALQLSGLLKVTETFSNSIRMEFGVDKCAVMHAKQGRMVESEGIQLSDSIQLRSLAATETYKYLGMSQGLGISETDMKQLLRDRFLGRLKKVLKSLLSGGNKVRAYNGWVMPVLMYSFGILKWTQTELDALDRTVRTTLTAYRMHHPRSSVMRLYIPRKCGGRGFLNVKTLHNREICSLREYFLRADGEMHVDVVAVDNGLTPLSLAKENWRKPVVLTTDDRRVVWQGKELHGRYYRALHGPDVDLAASVAWLRFGDLFGETEGFVCAIMDEVVMTNNYRRYILRDGTIDICRACHRPGESLRHIISGCSRLANGQYLHRHNQVARIVHQQLALKYRLVTSEVPYYRYEPQPVLEEGHITLYWDRSIITDRTIVANKPDIVLIDRQERRAMIIDVTVPHDENLVKAEKDKESKYLDLAHEVVDMWDIDAAIIVPIVVSAHGLLAKSLDKHLKRLALGSWIKGQIQKAVLLETARIVRKFLSLEP

SEQ ID NO: 11303 - protein, 1212 aa, Ptilodon capucinus
MTDAPRRNPRRLCRQRTVNEPNAQSTPPDPSPRSASPSPASIIRTSVTAVASSESDEYFSPPTSPPPVRRQRGRPPGHLGLLGQPAPNRVLVPSGVVRRMRWTSSINENVMRAYYEATEGGTNLTAYRNRMLPLFQSLEPAVNVSAQRLSDQVRVIQRGNMLADTVLDRLRSEMQSRRVVPVASSQPAAQPVAIATVTSRLAADSDVDRDNAPIDVSNQYNDLLRSTLEDVVRVYRSMPNHLRPRIPRLPMHKGNRAIVGALDSLLSIYFDSSDNLADTHSILYCAAITVCRVARVKVFNTDTATRPKPAVPAWQCRIERRISEARALIGKLSCFREGNTRPRVMRFVRRAFAGTDVSPREYISRVTERIDFLKQKIYAWANRIRRYKVRVDRYSQNSMFQRDQRWVYRSWERPNEPVSELQRPDDNAMTTFWRDIWSVPVTHYEGDWIGDVERMCEPIKEMEAISIGPLDVANAVRSLPNWKAPGPDGLHNFWLKWLRSSHVRLASQFQSALQSGSLPEFITTGVTHLLHKSGSTTDPKNYRPITCLPTIYKTLTSILRAKIARHVEDNSIMSASQNGCRSGSRGTKELLLIDMTICQQARRNRKDLSTCWIDYKKAYDSVPHTWLVRVLELYKIDTTLRTFLESCMRQWKTVLLCPGSRQILGNGEPIRIERGIFQGDSLSPLWFCLALNPLSTLLEESGFGFRLRRGGQVISHLLYMDDLKLFAPTALQLTGLLKVTETFSNSIRMEFGVDKCAVMHAKQGRLVESEGIQLSDSIQVRSLAATETYKYLGMSQGLGISETDMKQLLRDRFLGRLKKVLKSLLSGGNKVRAYNGWVMPVLMYSFGILKWTQTELDTLDRTVRTTLTAYRMHHPRSSVMRLYIPRKCGGRGFLNVKTLHNREICSLREYFLRADGEMHADVVAVDNGLTPLSLAKENWRKPVVLTTDDRRLVWQGKELHGRYYRALHGPDVDLAASVAWLRFGDLFGETEGFVCAIMDEVVTTNNYRKYILRDGTIDICRACHRPGESLRHIISGCSRLANGQYLHRHNQVARIIHQQLALKYRLVTSEVPYYRYEPQPVLEEGHISLYWDRSIITDRTIVANKPDIVLIDRQERRAMIVDITVPHDENLVKAEKDKESKYLDLAHEVVDMWDIDAAIIVPIVVSAHGLLAKSLDKHLKRLALGGWIKGQIQKAVLLETARIVRKFLSLEP

SEQ ID NO: 11304 - protein, 1212 aa, Ptilodon capucinus
MTDAPRRNPRRQCRQRSAVRHYAQSTPPDQSPRSASPSPASIIRTSVTAVASSESDEYFSPPTSPPPVRRQRGRPPGHLGLLGQPAPNRVLVPSGVVRRMRWTSSMNENVMRAYYEATEGGTNLTAYRNRMLPLFQSLEPAVNVSAQRLSDQVRVIQRGNMLADTVLDRLRSEVQSRRVVPVASSQPAAQPVASATVTSRLAADSDVDRDNAPIDVSTQYNDLLRSTLEDVVREYRSMPNHLRPRIPRLPMHNGNRALVGALDSLLSIYFDSSDDLVDTHSILYCAAITVCRVARVKVFNTDTATRPKPAVPAWQCRIERRISEARALIGKLSCFREGNTRPRVMRFVKRAFAGTDVSPREYISRVTERIDFLKQKIYAWANRIRRYKARVDRYSQNSMFQRDQRWVYRSWERPNEPVSELQRPDDNAMTTFWRDIWSVPVTHYEGNWIGDVERMCEPIKEMEAISIGPLDVANAVRSLPNWKAPGPDGLHNFWLKWLRSSHVRLASQFQSALQSGSLPEFITTGVTHLLHKTGSTTDPKNYRPITCLPTIYKTLTSILRVKIARHVEDNSIMSASQNGCRSGSRGTKELLLIDMTICQQARRNRKDLSTCWIDYKKAYDSVPHTWLVRVLELYKIDTTLRTFLESCMRQWKTVLLCPGSRQILGNGEPIRIERGIFQGDSLSPLWFCLALNPLSALLEESGFGFWLRRGGQVISHLLYMDDLKLFAPTALQLSGLLKVTETFSNSIRMEFGVDKCAVMHAKQGRMVESEGIQLSDSIQLRSLAATETYKYLGMSQGLGISETDMKQLLRDRFLGRLKKVLKSLLSGGNKVRAYNGWVMPVLMYSFGILKWTQTELDTLDRTVRTTLTAYRMHHPRSSVMRLYIPRKCGGRGFLNVKTLHNREICSLREYFLRADGEMHVDVVAVDNGLTPLSLAKENWRKPVVLTTDDRRVVWQGKELHGRYYRALHGPDVDLAASVAWLRFGDLFGETEGFVRAIMDEVVMTNNYRRYILRDGTIDICRACHRPGESLRHIISGCSRLANGQYLHRHNQVARIVHQQLALKYRLVTSEVPYYRYEPQPVLEEGHITLYWDRSIITDRTIVANKPDIVLIDRQERRAMIIDITVPHDENLVKAEKDKESKYLDLAHEVVDMWDIDAAIIVPIVVSAHGLLAKSLDKHLKRLALGSWIKGQIQKAVLLETARIVRKFLSLEP

SEQ ID NO: 11305 - protein, 1203 aa, Hydraecia micacea
MLTRSRSRRLPTTHPTSSGSSLSSASQLPEPAPDVSPVSPAAAVASSSSDEYFSPPTTPPPVCRRGRGRPPASLGLRGPPASERVPAPGGSVQRMRWTQTVNENVMRAYFGATEGGSNLTAYRGRMLSLFQVLEPAVNVSAQRLSDQVRVIQRNHMLDNVVLDRLRLESRNSHVTPASSLVAVQLQPSVPLRPDCVDIEDDDEAISVSSQCNARLRSALEDAFREYRSIPPGLRPRLPRLPMHKKNKALVCALDSQLSNCFNDSKDLADTHSMLYCAAVAACRVTHVKFPNSDRAPRPKPAVPAWQCRIECRIGEARALIGKLICFREGNTRPRVMRFVRRAFSGTDISSRDYLSRVTERIDFLKQKICAWANRIRRYRRRVERYTQNRRFQSDERWVYRAWERPDQGVTDTRLPDDDAMCSFWRNIWSVPVSHTEGDWTGKIERACDLIPEMEALIISPQDVARAVRPLPNWKSPGPDGLHNFWIKWFKRSHDRLASQFQSALESGSLPQFLTTGITHLLYKSGSTADPKNYRPITCLPTVYKVLTSILRTKINKHIDTNSIMSVSQNGCKNGSRGTKELLLIDMTINQQVRRSRKDLSTCWIDYKKAYDSVPHTWLMRVLELYKVDTTLCTFLMSCMGQWRTVLRYPGCRNIQRNSEPIRIERGIFQGDSLSPLWFCLALNPLSTLLEDSGLGYRLRRGGQVISHLLYMDDLKLFAPNNLQLMELLKITETFSSAIRMEFGVDKCAVMHVKRGEIVESVGNQLSDSTNLRALSASDTYKYLGMSEALGINVTDMKQSLKERFFGRLKKVFNSLLSGGNKVRAFNDWVMPVLMYSFGILKWTQTELDALDRKVRTLLTANRMHHPRSSVMRLYIPRKCGGRGFLNAKTLHNREICSLREYFLETDVGMHRDVVVVDNGLTPLSLGKENWRKPVVLDTNDRMEVWQSKELHGRFFRALHGPDVDLLASVAWLRFGDLFGETEGFVCAIMDEVMMTNNYRRFIVKDGTVDICRACHRPGESIRHIISGCSRLANGEYLHRHNLVARIIHQQLALKYSLVESEVPYYRYVPDPVLENGNITLYWDRSIITDRTIVANKPDIVVMDRLERRAMIVDITIPHDENLVKAEKDKQIKYLDLAREVVDMWDVDSAIIVPIVVTANGLIAKSLDQHLRRLSLASWIKGLIQKAVLLDTARIVRRFLSLEP

SEQ ID NO: 11306 - protein, 1207 aa, Amphipyra tragopoginis
MLTRSRAKTLQRTHPTPSASSLSSASQPPEPASIVSDVTPAAAVASSSSDEYFSPATSPSPPPARRRGRGRPPTCLGPRGPPASDRVPAPGGSVQRMRWTQSMNENCMRAYFGATEGGTNLTAYRGRMLSLFQTLEPAVNVSAQRLSDQVRVIQRDHRLDDAALGRLRDEMQNSHATPPPSQIRTQPLVPPAVPLQPNHADEEEQDRAISAGTQYSEIMRSSLEDALREFRSTPPELRPRLPRLPMHNKNRALVCALDSLLSNVLESSKDIGDTHSILYCAAVAACRVAHVKFPNDNRATRPKSTVPAWQCRIERRIDEARVLIGKLTCFREGNIRPRVMRFVRRAFSGTDVSPGEYVSRVTERIDFLKQKVYAWANRIRRYRRRVDRYTQNRIFQSDQRWVYRTWERPDQGVSDTHLPDNDVMNAFWRNIWSVPVTHTEGDWMQEVQRACEPIQEMGAVTIGPQDVTSAVRPMPNWKSPGPDGLHNFWIKWLRSSHARLASQFQSSLESGSLPSFLTTGVTHLLFKSGSTAEPKNYRPITCLPTVYKLLTSILRAKINNHIDNNAIMSDSQNGCKNGSRGTKELLLIDMAISQQVRRSRKDLSTCWIDYKKAYDSVPHTWLMRVLELYKINATLRTFLMSCMGQWRTVLHYPGCRQIQGNGELIKIERGIFQGDSLSPLWFCLALNPLSTLLEGSGLGYRLRRDGQVISHLLYMDDLKLFAPNNLQLVELLKVTETFSNSIRMEFGVDKCAVMHVKRGRIMESVGTQLTDAIHLRSLSSTETYKYLGMSEALGINEADMKQSLKERFFGRLIKVLKSLLSGGNKVRAFNGWVMPVLMHSFGILRWTQTELDALDRRVRTLLTAYRMHHPRSSVMRLYIPRKCGGRGFLNAKTLHNREVCSLREYFSQADVGMHRDVVAVDKGLTPLSLAKENWRKPVVLDTNGRREVWRSKELHGRFYRALHGPDVDFLASVAWLRFGDLFGETEGFVCAIMDEVMMTNNYRKYIVKDGTVDICRACHCPGESIRHIVSGCSRLANGEYLHRHNLVARIIHQQLALKYNLVDTEVPYYKYVPDPVLENGHVTLYWDRSIITDRTIVANKPDIVVIDRLERRTVIVDIAVPHDENLVKAENDKKIKYLDLAHEVVDMWDVDSAVIVPIVVTANGLIAKSLDQHLMRLSLGSWIKGLIQKAVLLDTARIVRKFLSLGP

SEQ ID NO: 11307 - protein, 1203 aa, Amphipyra tragopoginis
MLTRARAREKVARPTSPDSSLRSASQPPESSPSVSAVTPAAAVASSSSDEYFSPPSSPPPVRRRGGARPPACLGPRGQPASNGVPAAGGNVSRMRWTQSINENVMRAYYGATEGGINLTAYRDRMLLLFQVLEPAINVSTQRLSDQVRVIQRNRRLDDTVLERLRSEVQNNRAVTTPVQAAVQAHLPAVPPRPSHGDGEGDGEVIEVSNQCSDELRSALEGAILEYRATPPELRPRLPRLPMHKKNRALVCALDSLLSNYFDGSEDLADTHSILYCAAIAACRVAHVKFTDSERATRPKPAVPAWQCRIERRIGGARALIGKLICFREGNTRPREMRFVRRAFSGTDISPRDYMSRVTERIDFLKQKVYAWANRIRRYKRRVERYTLNRTFQSDQRRVYRTWERPDPCGSDVRLPDDDAMSSFWRSIWSVPVTHTEGDWMRDIERACEPIPEMGAIIISPQDVADAARPLPNWKSPGPDGLHNFWLKWLRSSHGCLASQFQSSLESGSLPQFLTTGATHLLYKSGSTAEPKNYRPITCLPTVYKLLTSILRVKISNHIDNNSIMSASQNGCRNGSRGTKELLLIDMTISQQVRRSRKDLSTCWIDYKKAYDSVPHTWLMRVLELYKINTTLRTFLMSCMRQWRTVLRYPGCREIRGRGEPVRIERGIFQGDSLSPLWFCLALNPLSTLLEGTRLGYRLRREGQVISHLLYMDDLKLFAPTDLRLMELLKVTENFSSSIRMEFGVDKCAVMHVKRGGIVESEGTQLSNSIQLRSLSPTETYKYLGMSEALGISEADMRQSLRERFFGRLNKVLRSLLSGGNKVRAFNGWVMPVLMYSFGILKWTQTDLDALDRRVRALLTTHRMHHPRSSVMRLYIPRKCGGRGFLNAKTLHNREVCSLREYFLQAEGEMHRDVVAVDKGLTPLALAKENWRKPAVLSTNDREEVWQSKELHGRFYRALHGPDVDFPASVSWLRFGDLFGETEGFVCAIMDEVMMTNNYRRYIVKDGTVDICRACHRPGESIRHIVSGCSRLANGEYLHRHNLVARIIHQQLALKYNLVESEVPYYRYVPDPVLENGHVTLYWDRSIITDRTIVANKPDIVVIDRSERRTMIVDITVPHDENLVKAEKDKQIKYLDLAHEVVGMWDVDSAVIVPIVVTANGLIAKSLDQHLKRLSLGGWIKGLIQKAVLLDTARIVRRFLSLEP

SEQ ID NO: 11308 - protein, 1201 aa, Amphipyra tragopoginis
MLTRARNKAARPPPPDSPLSSASQPPESSPTVSAVTPAAAVASSSSDEYFSPPTSPTPVRRRGRRRPPNSLGPRGPPAPSRVLATGGCVQRMKWTQSINENVMRAYYGSTEGGTNLTAYRVRMLTLFQELEPAINVTAQRLSDQVRVIQRNHRLDDAALDRLRLEVQNSRVTPVPSQTAVHQLNISVVPPRSDRVDGDVDDRAVTVCSQYNDQLRSALEDAIREYRANPDLRPRLPRLPMHNKNRALVCALDSLLSSYFESSEDLGDTHSILYCAAVAACRVANVKFNNSERATRPKPAVPAWQCRIERRIDGARALIGKLICFREGNTRPRVMSFVRRAFSGTGISPREYMSQVTERIDFLKQKVCAWASRIRRYKRRVERYTQNRMFQCDQRWVYRAWERPDQGVSDGRLPDDDAMNSFWRSIWSVPVIHTEGDWMRDIERACEPIEEMGEILISPQDVASAARPLPNWKSPGPDGLHNFWIKWLRSSHARLATQFQSSLESGSLPQFFTTGVTHLLHKSGSTAEPKNYRPITCLPTVYKLLTSILRSKINTHIENNSVMSSSQNGCRNGSRGTKELLLIDMAISQQVRRSRKNLSTCWIDYKKAYDSVPHTWLMRVLELYKINATLRTFLMSCMGQWRTVLRYPGCRPIRESGEPIRIERGIFQGDSLSPLWFCLALNPLSTLLEGSRLGYPLRRGGQVVSHLLYMDDLKLFAPTKLQLVELLKVTETFSNSIRMEFGVDKCAVMHVRRGGIMESEGLQLSDSIHLRPLSANDTYKYLGMSEGLGISEADMKQSLRERFFGRLKKVLKSLLSGGNKVRAFNGWVMPVLMYSFGILKWTQTELDALDRRVRSLLIANRMHHPRSSVMRLYIPRKCGGRGLLNAKTLHNRGVCSLREYFLHADAGMHRDVVAVDKGLTPLNLAKENWRKPVVLSTNDRREVWQSKELHGRFYRALHGPDVDFLASVSWLRFGDLFGETEGFVCAIMDEVIMTNNYRKYIVKDGTVDICRACHCPGESLRHIISGCSRLANGEYLHRHNQVARIIHQQLALKYNLVESEVPYYKYVPDPVLENGHITLYWDRSIITDRTIVANKPDIVVIDRSERRAMIVDITVPHDENLVKAEKDKQIKYLDLAHEVVNMWDVDSATIVPIVVTANGLMAKSLDQHLKRLSLGGWVKGLIQKAVLLDTARIVRRFLSLEP

SEQ ID NO: 11309 - protein, 868 aa, Amphipyra tragopoginis
MRFVRRAFSGTGISPREYMSQVTERIDFLKQKVCAWASRIRRYKRRVERYTQNRMFQCDQRWVYRAWERPDQGVSDGRLPDDDAMNSFWRSIWSVPVIHTEGDWMRDIERACEPIEEMGEILISPQDVASAARPLPNWKSPGPDGLHNFWIKWLRSSHARLATQFQSSLESGSLPQFFTTGVTHLLHKSGSTAEPKNCRPITCLPTVYKLLTSILRSKINTHIENNSVMSSAQNGCRNGSRGTKELLLIDMAISQQVRRSRKNLSTCWIDYKKAYDSVPHTWLMRVLELYKINATLRTFLMSCMGQWRTVLRYPGCRPIRESGEPIRIERGIFQGDSLSPLWFCLALNPLSTLLEGSGLGYPLRRGGQVVSHLLYMDDLKLFAPTKLQLVELLKVTETFSNSIRMEFGVDKCAVMHVRRGGIMESEGLQLSDSIHLRPLSANDTYKYLGMSEGLGISEADMKQSLRERFFGRLKKVLKSLLSGGNRVRAFNGWVMPVLMYSFGILKWTQTELDALDRRVRSLLTANRMHHPRSSVMRVYIPRKCGGRGLLNAKTLHNREVCSLREYFLHADAGMHRDVVAVDKGLTPLNLAKENWRKPVVLSTNDRREIWQSKELHGRFYRALHGPDVDFQASVSWLRFGDLFGETEGFVCAIMDEVIMTNNYRKYIVKDGTVDICRACHCLGESLRHIISGCSRLANGEYLHRHNQVARIIHQQLALKYNFVESEVPYYKYVPDPVLENGHITLYWDRSIITDRTIVANKPDIVVIDRSERRTMIVDVTIPHDENLVKAEKDKQIKYLDLAHEVVNMWDVDSATIVPIVVTANGLMAKSLDQHLKRLSLGGWIKGLIQKAVLLDTARIVRRFLSLEP

SEQ ID NO: 11310 - protein, 1207 aa, Noctua pronuba
MSPMLTRRRAKLLETHPPSPGSSLSSASQPPGRATSVSAASPVAAVASSSSDEFFSPPSTPPSPRRRGRRPPAGLGPRGQQAPNRVPAAGGNVSRIRWTQSMNENVMRAYYGATEGGINLTAYRCRMLSLFQVLEPAVNVSAQRLSDQVRVIQNNHRLDDATLDRLRSELRISPASNPLPSQNVTHVPAALPLQANQHAEEEDDRAVSADNLCNEELRSALEDAIREYRFTSPDLRPRLPRLPMNKKNRALVCALDALLPNFIASSANLCDTHSILYCTAVAACRVANVKFPNTDSATRPKSAVPVWQCRIERRINEARALIGKLICFRESNTRPRVMRFVRRAFSGTDISPREYMSRVTERIDFLKQKVYAWANRIRRYRRRVDRYTQNRMFQSDERWVYRTWERPVTIQGVTDTHLPDNDAMSAFWRSIWSVPVSHTEGDWMRVVEQACDSIPEMEAISISPLDVARAVRPLPNWKSPGPDGLHNFWIKWLQRSHACLASQFQSSLETGSLPSFFTTGVTHLLHKSGSTAEPKNYRPITCLPTVYKVLTSILRAKIVRHIDNNSIMSVSQNGCRNGSRGTKELLLIDMAISQQVRRSRRDLSTCWIDYKKAYDSVPHTWLRRVLELYKIDATLRTFLVSCMGQWSTVLLYPGCRQVLGNDEPIRIERGIFQGDSLSPLWFCLALNPLSTLLEDSGLGYRLRRGGQVISYLLYMDDLKIFAPSNLQLMELLKVTETFSSAIRMEFGVDKCAVMHVKRGEIMESVGTQLSDSIYLRSLSSTETYKYLGMSEALGINATDMKQSLKERFFGRLNKVLKSLLSGGNKVRAFNGWVMPVLMYSYGILKWTQTELDALDRKVRTLLTANRMHHPRSSVMRLYIPRKCGGRGFLNAKTLHNREVCSLREYFLETDVGMHRDVVSVDKGLTPLSLANENWRKPVVLDTNDRKEVWQSKELHGRFFRALHGPDVDLLASVSWLRFGDLFGETEGFVCAIMDEVIMTNNYRKYIVKDGTVDICRACHRPGESIRHIVSGCSRLANGEYLHRHNLVARIIHQQLALQYNLVGTEVPYYKYVPDPVLENGHATLYWDRSIITDRTILANKPDIVVIDRRERRAMIVDITVPHDENLVKAENDKKIKYLDLAHEVVDMWDVDSAIIVPIVVTVNGLIAKSLDQHLRRLSLRGWVKGLIQKAVLLDTARIVRRFLSLEP

SEQ ID NO: 11311 - protein, 1207 aa, Noctua pronuba
MSPMLTRRRAKLLETHPPSPGSSLSSASQPPGRATSVSAASPVAAVASSSSDEFFSPPSTPPSPRRRGRRPPAGLGPRGQQAPNRVPAAGGNVSRIRWTQSMNENVMRAYYGATEGGINLTAYRCRMLSLFQALEPAVNVSAQRLSDQVRVIQNNHRLDDATLDRLRSELRISPASNPLPSQNVTHVPAALPLRANQHAEEEDDRAVSADNLCNEELRSALEDAIREYRFTSPDLRPRLPRLPMNKKNRALVCALDALLPNFIASSANLCDTHSILYCTAVAACRVANVKFPNTDSATRPKSAVPVWQCRIERRINEARALIGKLICFREGNTRPRVMRFVRRAFSGTDISPREYMSRVTERIDFLKQKVYAWANRIRRYRRRVDRYTQNRMFQSDERWVYRIWERPVTIQGVTDTHLPDNDAMSAFWRSIWSVPVSHTEGDWMRVVEQACDSIPEMEAISISPLDVARAVRPLPNWKSPGPDGLHNFWIKWLQRSHACLASQFQSSLETGSLPSFFTTGVTHLLHKSGSTAEPKNYRPITCLPTVYKVLTSILRAKIVRHIDNNSIMSVSQNGCRNGSRGTKELLLIDMAISQQVRRSRRDLSTCWIDYKKAYDSVPHTWLRRVLELYKIDATLRTFLVSCMGQWSTVLLYPGCRQVLGNDEPIRIERGIFQGDSLSPLWFCLALNPLSTLLEDSGLGYRLKRGGQVISHLLYMDDLKIFAPSNLQLMELLKVTETFSSAIRMEFGVDKCAVMHVKRGEIMESVGTQLSDSIYLRSLSSTETYKYLGMSEALGINATDMKQSLKERFFGRLNKVLKSLLSGGNKVRAFNGWVMPVLMYSYGILKWTQTELDALDRKVRTLLTANRMHHPRSSVMRLYIPRKCGGRGFLNAKTLHNREVCSLREYFLETDVGMHRDVVSVDKGLTPLSLANENWRKPVVLDSNDRKEVWQSKELHGRFFRALHGPDVDLLASVSWLRFGDLFGETEGFVCAIMDEVIMTNNYRKYIVKDGTVDICRACHRPGESIRHIVSGCSRLANGEYLHRHNLVARIIHQQLALQYNLVGTEVPYYKYVPDPVLENGHATLYWDRSIITDRTILANKPDIVVIDRRERRAMIVDITVPHDENLVKAENDKKIKYLDLAHEVVDMWDVDSAIIVPIVVTVNGLIAKSLDQHLRRLSLRGWVKGLIQKAVLLDTARIVRRFLSLEP

SEQ ID NO: 11312 - protein, 1200 aa, Tinea trinotella
MLTRSRARNQSAQLTSSGSSLSSASQPPRSTPTVSPVISVAAVASSSSDECFSPPTTPPSARRRGGGRPPASLEPRGPSASGGVPATSGRVQRMRWTQSINENVMRSYFGATEGGISLTAYRGRMLTLFQVLEPAVNVSAQRLSDQVRVIQRNRMLDDVVLDRLRLESRSSHVSPVSPPVAVQLQPSALPRPNNIEENDDDVTISVSNQYNEQLRSALEDAFREYRSTPPGLRPRIPRLPMHKKNRALVCALDSQLVNHFKSSKDLADTHSILYCAAVAVCRVAHVKFPNNDRAARLAVPAWQCRIERRIGEARALIGKLISFREGNTRPRVMRFVRRAFSGTDISSRDYQTRVTERIDFLKQKIYAWANRIRRYKRRVERYTQNRTFQSNERWVYRAWERPDQDVSDMCLPDDDAMSLFWRNIWSVPVGHTEGEWTREVERACDLIPEMGAIIISPQDVACAVRPLSNWKSPGLDGLHNFWIKYFQRSHARLAAQFQSALELGSLPQFLTTGITHLLHKSGSTAEPKNYRPITCLPTVYKVLTSILRAKIDKHIDTNCIMSASQNGCRSGSRGTKELLLIDVAISQQVRRSRRDLSTCWIDYKKAYDSVPHTWLMRVLELYKVDAALRTFLVSCMGQWRTVLHYPGCRRILGNGEPIKIERGIFQGDSLSPLWFCLALNPLSTLLDGSGQGYRLRRDGQVISHLLYMDDLKLFAPNNLQLMKLLKVTETFSSAISMEFGVDKCAIMHVKRGEIMESVGTQLSDSIHLRSLCSTETYKYLGMSEALGINAVDVKQSLRDRFFGRLNKVLNSLLSGGNKVRAFNGWVMPVLMYSFGILKWTQTELDALDRRVRTLLTANRMHHPRSSVMRLYIPRKCGGRGFLNAKTLHNREVCSLREYFLKTDVGMHRDVVAVDKGLTSLSLANENWRKPVVLDANDRREVWQSKELHGRFYRALHGPDVDFLASVSWLRFGDLFGETEGFVCAIMDEVMMTNNYRKYIVKDGTVDICRACHRPGESIRHIISGCSRLANGDYLHRHNLVARIIHQQLALKYNLVESEVPYYRYVPDPVLENGNITLYWDRSIITDRTIVANKPDIVVIDRLERRTIIVDVAVPHDENLVKAEKDKQIKYLDLAREVVDMWEVDTAIIVPIVVTANGLIAKSLDEHLKRLSLGSWIKRLIQKAVLLDTARIVRRFLSQEP

SEQ ID NO: 11313 - protein, 868 aa, Spilosoma lubricipeda
MRFVKQAFLGTTVSPQQYMSCVTERIDFLKQKVYAWANRIRRYRKRIDRYNQNRMFQRNEKWVYRKWENLSPCMSDGQVPDENATNSFWRSIWSVPVVHTEGDWYRDVERSCESLLPMELINIDKEDVSCAVRSLPNWKAPGPDGLHNFWLKWFRSSHACLASQFQTALDSGSLPQFLTTGITHLLYKSGSAMDPKNFRPITCLPTLYKLLTSILRLKITTHINNNSIISVSQNGCRSGTRGTKELLIIDMTISQQVRRNRKSLATCWIDYKKAYDSVPHTWLLRVLELYKIDTTLCTFLKSCMGQWRTVLRYPGCRQSTMNDVLIKIERGIFQGDSLSPLWFCLALNPLSTLLEGSGIGYRLQKDDRVISHLLYMDDLKLLAPTKLQLTALLKVTENFSNSIKMEFGVDKCAVMCVKKGLIVESEGVELSDSTKLRSLSATETYKYLGFSQSLGIPESDVKQMLRERFFGRLKKVLKSLLSGGNKVRAYNSWVMPVLMYSFGILRWTQTELDAFDRRVRTLLTAFRMHHPRSSVMRLYIPRKFGGRGLLNIKTLHNREIYNLREYFLHTDVEMHRNVVAVDTGLTPLALAKENWRKPVVLSTNDRREVWKGKELHGRFYRALNGPDIDFKASTSWLRYGDLFGETEGFVCAIMDEVIMTNNYRKYILKDGTVDICRACHRPGESIRHIISGCSRLANGEYLHRHNQVARIVHQQLALKYHLVNSEVPYYRYVPDPVLENGRATLYWDRSIITDRTIVANKPDIVVIDRLERRAMIVDIAVPHDENLVKAEKEKQIKYLDLSHEIVDMWNVDSAIIVPIVVSAHGLIARSLDQHLKRLTLDGWIKGLMQKAVLLDTARIVRRFLSLEP

SEQ ID NO: 11314 - protein, 1196 aa, Spilosoma lubricipeda
MLTRARARALLPSSDSSLRSALPSSDARTEVPTVAEASSSSSSDEFFSPPTSPTPVRRQGRDRPPTSLGSRGPLTSNRAPAAGGDVRRMKWTQSINENVMRAYFRATELGTNLTAYRVRLVSLFQELEPAVNVSAQRLSDQVRAIQRCHLLDDTVLERICSDIRNSLTVPSSPHVVDVVTNSTPQNEDVSELVDSEIISVSTLYSDKIRSTLEDVIREYRCVNFNNRPRLPRLPIHKRNLALVGALDSLLPDYFGNSEDLSDTHSILYCAAIAVCRVAGIKFSENITTTRPENTVPAWQCRIERRIAGARTLIGKLISFRSGNTRPKVMRFVKQAFLGTTISPQQYMSCVTERIDFLKQKVYAWANRIRRYRKRIDRYNQNCMFQRNEKWVYRKWENLSPCMSDGQVPDENATNSFWRSIWSVPVAHTEGDWYRDVERSCESLLPMELINIDKEDVSCAVRSLPNWKAPGPDGLHNFWLKWFRSSHACLASQFQTALDSGSLPQFLTTGITHLLYKSGSAMDPKNFRPITCLPTLYKLLTSILRLKITTHINQNSILSVSQNGCRSGTRGTKELLIIDMTISQQVRRNRKNLATCWIDYKKAYDSVPHTWLLKVLELYKIDTTLCTFLKSCMGQWRTVLRYPGCRQTAVNDVPIKIERGIFQGDSLSPLWFCLALNPLSTLLESSGLGYRLQKDAALISHLFYMDDLKLFAPTKLQLTALLRVTENFSNSIKMEFCVDKCAVMHVKKGVIVESEGIELSDSTKLRLLSATETYKYLGFSQSLGIPEPDMKQSLRERFFGRLKKVLKSLLSGGNKVRAYNGWVMPVLMYSFGILRWTQTELDAIDRRVRTLLTAFRMHHPRSSVMRLYIPRKLGGRGLLNAKTLHNREIYNLREYFLLTDVGVHRSVVTVDTGLTPLALAKENWRKPVVLSTNDRREVWKGKELHGRFYRALNGPDIDFKASTSWLRYGDLFGETEGFVCAIMDEVIMTNNYRKYILKDGTVDICRACHRPGESIRHIISGCSRLANGEYLHRHNQVARIVHQQLALKYHLVSSEVPYYRYVPDPVLENGRATLYWDRSIITDRTIVANKPDIVVIDRLERRAMIVDIAVPHDENLVKVEKEKQIKYLDLSHEIVDMWNVDSAIIVPIVVSAHGLTAKSLDQHLKRLTLEGWIKGLMQKAVLLDTARIVRRFLSLEP

SEQ ID NO: 11315 - protein, 868 aa, Ochropleura plecta
MRFVRRAFAGTDISPPDYMSHITERIDFLKQKVYAWANRIRRYKRRVERYTLNRTFQSDERWVYRAWERPDQGVSDTRLPDDDAMCLFWRNIWSVPVSHTEGEWTREVERACDPIPEMGALTISPQDVACAVRPLPNWKSPGPDGLHNFWLKWIQRSHARLATLFQTVLESGSLPKFLTTEITHLLHKSGSTTEPKNYRPITCLPTIYKVLTSILRAKITKHIDDNAIMSASQNGCRNGSRGTKELLLIDMAISQQVRRSRRHLSTCWIDYKKAYDSVPHTWLMRVLELYKVDATLRTFLSSCMRQWNTVLRYPGCRQIQRNSEPIRIERGIFQGDSLSPLWFCLALNPLSTLLEDSGLGYRLRRGGRVISHLLYMDDLKLFAPNDSQLMELLKVTETFSSAISMEFGVDKCAVVHVKRGEIVESVGTQLSDSIHLRSLSANETYKYLGMSEALGINVADMKQSLKERFFGRLRKVFNSLLSGGNKVRAFNGWVMPVLMYSFGILKWTQTELDSLDRKVRTLLTAYRMHHPRSSVMRLYIPRSCGGRGFLNAKTLHNREICSLREYFLEADVGMHRDVVTVDKGFTPLSLAKENWRKPVVLDTNDRKEVWQSKELHGRFFRALHGPDVDQSASVAWLRSGDLFGETEGFVCAIMDEVMMTNNYRRFIVKDGTVDICRACHRPGESIRHIISGCSRLANGEYLHRHNLVARIIHQQLALKYNLVESEVPYYRYEPDPVLEHGNITLYWDRSIITDRTAVANKPDIVVVDRSERRAMIIDITVPHDENLVKAEKDKQIKYIDLAREVVDMWDVDSAIIVPIVVSANGLIAKSLDQYLRRLSLGSWIKGLIQKAVLLDTARIVRRFLSLEP

SEQ ID NO: 11316 - protein, 961 aa, Ochropleura plecta
MHNKNRALVAALDSQLSSYFDNCENLTDAHSILYCAAVTVCRVAHVKFPDDRATRPKPAIPFWQCRIERRIGAARALIGKLTCFREGNTRPRVMRFVRRAFAGTDISPPDYISRIAERIDFLKQKVYAWANRIRRYKRRVERYTQNRTFQSDERWVYRAWERPDQGVSDTRLPDDDAMSLFWRSIWSVPVSHTEGEWTREVERACDPIPEMGALTISPQDVACAVRPLPNWKSPGPDGLHNFWIKWIQRSHVRLAALFQSALESGSLPKFLTTGITHLLHKSGSTAEPKNYRPITCLPTLYKVLTSILRAKITKHIDDNSIMSASQNGCRNGSRGTKELLLIDMAISQQVRRSRRHLSTCWIDYKKAYDSVPHTWLMRVLDLYKIDATLRTFLISCMRQWSTVLRYPGCRQIQRNSEPIRIERGIFQGDSLSPLWFCLALNPLSTLLENSGLGYRLKRGGQVISHLLYMDDLKLFAPNDLQLMELLKVTETFSSAIRMEFGVDKCAVMHVKRGEIVESVGTQLSDSINLRSLSATETYKYLGMSEALGINVADMKQLLKERFFGRLRKVFNSLLSGGNKVRAFNGWVMPVLMYSFGILKWTQTELDALDRKVRTLLTAFRMHHPRSSVMRLYIPRSCGGRGFLNAKTLHNREICSLREYFLETDVGMHRDVVAVDKGLTPLSLAKENWRKPVVLDTNDRREVWQSKELHGRFFRALHGPDVDQSASVAWLRSGDLFGETEGFVCAIMDEVMMTNNYRRFIVKDGTVDICRACHRPGESIRHIISGCSRLANGEYLHRHNLVARIIHQQLALKYNLVESEVPYNRYEPDPVLEHGYITLYWDRSIITDRTVVANKPDIVVVDRSERRAMIVDITVPHDENLVKAEKDKQIKYIDLAREVVDMWDVDSAIIVPIVVSANGLIAKSLDQYLRRLSLGSWIKGLIQKAVLLDTARIVRRFLSLEP

SEQ ID NO: 11317 - protein, 1095 aa, Ochropleura plecta
MRSYYGATEGGNNLTAYRVRMLSLFQVLEPAVNVSAQRLSDQVRVIQRNRMLDDTVLDRLRTEMQSSQVITSSSQAVVPPQSHQLVSHADEVSNDMATNVSTQCNEEMRIALEGAIREYRYISPELRPRLPRLPMHNKNRALVAVLDSQLSNYFDNCENLTDAHSILYCAAVAACRVAHVKFPDDGATRPKPAVPFWQCRIERRIGVARALIGKLICFREGNTRPRVMRFVRRAFAGTDISPPDYMSHITERIDFLKQKVYAWANRIRRYKRRVERYTLNRTFQSDERWVYRAWERPDQGVSDTHLPDDDAMCLFWRNIWSVPVSHTEGEWTREVERACDPIPEMGALTISPQDVTCAVRPLPNWKSPGPDGLHNFWLKWIQRSHARLATLFQTALESGSLPKFLTTGITHLLHKSGSTTEPKNYRPITCLPTIYKVLTSILRAKITKHIDDNSIMSASQNGCRNGSRGTKELLLIDMAISQQVRRSRRHLSTCWIDYKKAYDSVPHTWLMRVLELYKVDATLRTFLSSCMRQWNTVLRYPGCRQIQRNSEPIRIERGIFQGDSLSPLWFCLALNPLSTLLEDSGLGYRLRRGGRVISHLLYMDDLKLFAPNDSQLMELLKVTETFSSAISMEFGVHKCAVMHVKRGEIVESVGTQLSDSIHLRSLSANETYKYLGMSEALGINVADMKQSLKERFFGRLRKVFNSLLSGGNKVRAFNGWVMPVLMYSFGILKWTQTELDALDRKVRTLLTAYRMHHPRSSVMRLYIPRSCGGRGFLNAKTLHNREICSLREYFLEADVGMHRDVVTVDKGFTPLSLAKENWRKPVVLDTNDRREVWQSKELHGRFFRALHGPDVDQPASVAWLRSGDLFGETEGFVCAIMDEVMMTNNYRRFIVKDGTVDICRACHRPGESIRHIISGCSRLANGEYLHRHNLVARIIHQQLALKYSLVESEVPYYRYEPDPVLEHGNITLYWDRSIITDRTIVANKPDIVVVDRSERRAMIVDITVPHDENLVKAEKDKQIKYTDLAREVVDMWDVDSAIIVPIVVSANGLIAKSLDQHLRRLSLGSWIKGLIQKAVLLDTARIVRRFLSLEP

SEQ ID NO: 11318 - protein, 1073 aa, Ochropleura plecta
MKTSCAHTMGATEGGNNLTAYRVRMLSLFQVLEPAVNVSAQRLSDQVRVIQRNRMLDDTVLDRLRTEMQSSQVITSSSQVVVPPQSHQVVNRANEVSNGMATNVSTQCSEEMRSTLEGAIREYRYMSPELRPRLPRLPMHNKNRALVAALDSQLSSYFDNCENLTDAHSILYCAAVAACRVAHVKFPDDRATRPKPAIPFWQCRIERRIGAARAIIGKLICFREGNTRPRVMRFVRRAFAETDISPPDYMSRIAERIDFLKQKVYAWANCIRRYKRRVERYTQNRTFQSDERWVYRAWERPDQGVSDTHLPDDDAMCLFWRSIWSVPVSHTEGEWTREVERACDPIPEMGVLTISPQDVACAVRPLPNWKSPGPDGLHNFWIKWIQRSHVRLAALFQSALESGSLPKFLTTGITHLLHKSGSTAEPKNYRPITCLPTLYKVLTSILRAKITKHIDDNSIMSASQNGCRNGSRGTKELLLIDMAISQQVRRSRRHLSTCWIDYKKAYDSVPHTWLMRVLEMYKVDATLRTFLSSCIRQWSTVLRYPGCRQFQMNSEPIRIERGIFQGDSLSPLWFCLALNPLSTLLENSGLGYRLRRGGQVISHLLYMDDLKLFAPNDLQLMELLKVTETFSSAIRMEFGVDKCAVMHVKRGEIVESVGTQLSDSINLRSLSATETYKYLGMSEALGINGADMKQSLKERFFGRLRKVLNSLLSGGNKVRAFNGWVMPVLMYSFGILKWTQTELDTLDRKVRTLLTAFRMHHPRSSVMRLYIPRSCGGRGFLNAKTLHNREICSLREYFLETDVGMHRDVVAVDKGLTPLSLAKENWRKPVVLDTNDRREVWQSKELHGRFFRALHGPDVDQSASVAWLRSGDLFGETEGFVCAIMDEVMMTNNYRRFIVKDGTVDICRACHRPGESIRHIISGCSRLANGEYLHRHNLVARIIHQQLALKYNLVELEVPYYRYEPDPVLEHANITLYWDRSIITDRTIVANKPDIVVVDRSERRAMIVNITVPHDENLVKAEKDKQIKYIDLAREVVDMWDVDSAIIVPIVVTANGLIAKSLDQHLRRLSLGS

SEQ ID NO: 11319 - protein, 1106 aa, Hecatera dysodea
MRWTQTINENVMRSYYGATEGGNNLTAYRGRMLSLFQVLEPAVNVSAQRLSDQVRVILRNRMLDDSVLDRLRMEICSSHVITPSPQTVAQPQLIQIPSHADEESDDRVTNVSTQCNEELRSALESAIREFRYVSPELRPRIPRLPMHNKNRALVAALDSQLSNYFDNCEDLTDAHSIMYCAAVAACRVAHVKMPNDRVTRPKPAIPAWQCRIERRIGGARALIGKLICFREGNTRPRVMRFVRRAFSRTEISPLDYLSRVTERIDFLKQKVYAWANRIRRYKRRVERYTQNRTFRSNERWVYKAWERPDQDVTDTRPPDDDAMCSFWRNIWSAPVSHTEGDWIREVERACDPLPDMGAIIISPQDVARAVRPLPNWKSPGPDGLHNFWIKWLHSSHACLASRYQESLESGSLPEFLMTGITHLLHKSGSTAEPKNYRPITCLPTVYKVLTSILRDKINQHINSNNIMSASQNGCRNGSRGTKELLLIDIAISQQVRRSRKDLSTCWIDYKKAYDSVPHTWLLRVLELYKIDATLRTFLMSCMGHWRTVLRYPGCRHVQGDSEPIRIERGIFQGDSLSPLWFCLALNPLSTLLGNSGLGYRLKRGGQVISHLLYMDDLKLFAPTNLQLMELLKVTETFSNAIRMEFGVDKCAIMHVKRGEIMESVGTQLSDSINLRCLSSTETYKYLGMSEALGINVTDMKQSLKERFFGRLKKVLNSLLSGGNKVRAFNGWVMPVLMYSFGVLKWTQTELDALDRRVRTLLTTYRMHHPRSSVMRLYIPRKCGGRGFLNAKTLHNREICSLREYFLAAEVGMHRDVVAVDKGLTPLSLANENWRKPAVLDTNDRRAVWQSKELHGRFFRALHGPDVDQLASVAWLRFGDLFGETEGFVCAIMDEVIMTNNYRRFIVKDGTVDICRACHRPGESIRHIVSGCSRLANGEYLHRHNLVARIIHQQLALKYSLVNSEVPYYRYVPDPVLDSGNITLYWDRSIITDRTIVANKPDIVVVDRIERRTMIVDITVPHDENLVKAEKDKQIKYLDLAREVVDMWDVDSAIIVPIVVSANGLIAKSLDQHLRRLSLGSWIKGLIQKAVLLDTARIVRRFLSLEP

SEQ ID NO: 11320 - protein, 1200 aa, Hecatera dysodea
MLTRSRTRAQTTQSTSSGSSLSSASQPPGPTPAVSPEIPVAAVASSSSDEYFSPPTTPPPARRRGRGRPPTSLGPRGPPASDRVPAIGGSVQRMRWTQSINENVMRSYFGATEGGTNLTAYRGRMLSLFQVLEPAVNVSAQRLSDQVRVIQRNRMLDDAVLDRLRLESRSSRVSPASPPAAVQIQPSISPRPDHVSEDVDDGAITVSTQCNERLRSALEDAFREYRSTPPGLRPRLPRLPMHNKNRALVCALDSQLENCFNSSKDLADTHSILYCAAAAACRVAHVKFPNSDRAARPAVPAWQCRIERRIGEARALIGKLICFREGNTRRRVMRFVRRAFSGTDISPRDYLTRVTERIDFLKQKVYAWASRIRRYKRRVERYTQNRTFQSNERWVYRAWERPDQVVTDTHLPDDDAMCSFWRSIWSVPVSHTEGDWTREVERACDSIPEMGAINISPQDVARAVRPLPNWKSPGPDGLHNFWIKWLTRSHARLASQFQSALESRSLPQFFTTGITHLLHKSGSTAEPKNYRPITCLPTVYKVLTSILRAKINDHIESNSIMSTSQNGCRSGARGTKELLLIDVAISQQVRRSRKDLSTCWIDYKKAYDSVPHTWLMRVLELYKVDAVLRAFLMSCMGQWRTVLHYPGCRQTQANSEPIRIERGIFQGDSLSPLWFCLALNPLSTLLEGSGQGYRLRRGGQVISHLLYMDDLKLFAPNKLQLMKLLKVTETFSSDISMEFGVDKCAVMHVKRGEIMESVGTQLSDSIHLRSLCSTETYKYLGMSEALGINATSVKQSLKERFFGRLNKVLNSLLSGGNKVRAFNGWVMPVLMYSFGILKWTQTELDALDRRVRSLLTANRMHHPRSSVMRLYIPRKCGGRGFLNAKTLHNREVCSLREYFLEADVGMHRDVVAVDKGFTPLSLANENWRKPVVLDTNDRREVWQSKELHGRFYRVLHGPDVDFLASVAWLRFGDLFGETEGFICAITDEVMMTNNYRKYIVKDGTVDICRACHRPGESIRHIISGCSSLANGDYLHRHNLVARIIHQQLALKYNLVESEVPYYRYVPDPVLENGNCTLYWDRSIITDRTIVANKPDIVVIDRLERRAMIVDIAVPHDENLVKAEKDKQSKYLDLAREVVDMWNVNTAVIVPIIVTANGIIAKSLDQHLKRLSLGSWIKGLIQKAVLLDTARIVRRFLSREP

SEQ ID NO: 11321 - protein, 1200 aa, Hecatera dysodea
MLTRSRTRAQTTQSTSSGSSLSSASQPPGPTPAVSPEIPVAAVASSSSDEYFSPPTTPPPARRRGRGRPPTSLGPRGPPASDRVPAIGGSVQRMRWTQSINENVMRSYFGATEGGTNLTAYRGRMLSLFQVLEPAVNVSAQRLSDQVRVIQRNRMLDDAVLDRLRLESRSSRVSPASPPAAVQIQPSISPRPDHVSEDVDDGAITVSTQCNERLRSALEDAFREYRSTPPELRPRLPRLPMHNKNRALVCALDSQLENCFNSSKDLADTHSILYCAAAAACRVAHVKFPNSDRATRPAVPAWQCRIERRIGEARALIGKLICFREGNSRRRVMRFVRRAFLGTDISPRDYLTRVTERIDFLKQKVYAWASRIRRYKRRVVRYTQNRTFQSNERWVYRAWERPDQVVTDTHLPDDDAMCSFWRSIWSVPVSHTEGDWTREVERTCDPIPEMGAITISPQDVARAVRPLPNWKSPGPDGLHNFWIKWFTRSHVPLASQFQSALESRSLPQFLTTGITHLLHKSGSTAEPKNYRPITCLPTVYKVLTSILRAKSNDHIESNSIMSTSQNGCRNGARGTKELLLIDVAISQQVRRSRKDLSTCWIDYKKAYDSVPHTWLMRVLELYKVDAVLRAFLMSCMGQWRTVLHYPGCRQTQANSEPIRIERGIFQGDSLSPLWFCLALNPLSTLLEGSGQGYRLRRGGQVISHLLYMDDLKLFAPNNLQLMKLLKVTETFSSDISMEFGVDKCAVMHVKRGEIMESVGTQLSDSIHLRSLCSTETYKYLGMSEALGINATSVKQSLKERFFGRLNKVLNSLLSGGNKVRAFNGWVMPVLMYSFGILKWTQTELDALDRRVRSLLTANRMHHPRSSVMRLYIPRKCGGRGLLNAKTLHNREVCSLREYFLEADVGMHRDVVAVDKGLTPLSLANENWRKPVVLDTNDRREVWQSKELHGRFYRVLHGPDVDFLASVAWLRFGDLFGETEGFICAITDEVMMTNNYRKYIVKDGTVDICRACHRPGESIRHIISGCSSLANGDYLHRHNLVARVIHQQLALKYNLVESEVPYYRYVPDPVLENGNCTLYWDRSIITDRTIVANKPDIVVIDRLERRAMIVDIAVPHDENLVNAEKDKQSKYLDLAREVVDMWNVNTAVIVPIVVTANGIIAKSLDQHLKRLSLGSWIKGLIQKAVLLDTARIVRRFLSREP

SEQ ID NO: 11322 - protein, 1046 aa, Hecatera dysodea
MLDDAVLDRLRLESRSSRVSPASPPAAVQIQPSISPRPDHVSEDVDDGTISVSTQCNERLRSALEDAFREYRSTPPELRPRLPRLPMHNKNRALVCALDSQLSIYFDSSENLTDTHSILYCGAAAACRVAHVKLPNSDRVARPAVPAWQCRIERRIAEARALIGKLICFREGNTRRRVMPFVRRAFSGTDISPRDYLTRVTERIDFLKQKVYAWANRIRRYKRRVERYTQNRIFQNNERWVYRAWERPDQGVTDTRLPDDEAMLSFWRNIWSVPISHTEGDWTREVERACDSIPEMGAINISPQDVARAVRPLPNWKSPGPDGLHNFWIKWLTRSHARLASQFQSALESRSLPQFFTTGITHLLHKSGSTADPKNYRPITCLPTVYKVLTSILRAKINDHIESNSIMSTSQNGCRSGARGTKELLLIDVAISQQVRRSRKDLSTCWIDYKKAYDSVPHTWLMRVLELYKVDAVLRAFLMSCMGQWRTVLHYPGCRQTQANSEPIRIERGIFQGDSLSPLWFCLALNPLSTLLEGSGQGYRLRRGRQVISHLLYMDDLKLFAPNNLQLMKLLKVTETFSSDISMEFGVDKCAVMHVKRGEIMESVGTQLSDSIHLRSLCSTETYKYLGMSEALGINATSVKQSLKERFFGRLNKVLNSLLSGGNKVRAFNGWVMPVLMYSFGILKWTQTELDFLDRRVRSLLTANRMHHPRSSVMRLYIPRKCGGRGFLNAKTLHNREVCSLREYFLEADVGMHRDVVAVDKGFTPLSLANENWRKPVVLDTNDRREVWQSKELHGRFYRVLHGPDVDFLASVAWLRFGDLFGETEGFICAITDEVMMTNNYRKYIVKDGTVDIYRACHRPGESIRHIISGCSSLANGDYLHRHNLVARIIHQQLALKYNLVESEVPYYRYAPDPVLENGNCTLYWDRSIITDRTIVANKPDIVVIDRLERRAMIVDIAVPHDENLVKAEKDKQSKYLDLAREVVDMWDVNTAVIVPIVVTANGIIAKSLDQHLKRLSLGSWIKGLIQKAVLLDTARIVRRFLSREP

SEQ ID NO: 11323 - protein, 1200 aa, Mythimna impura
MLTRAAARRARLPPPASSLSSASPPPESSPTVSAVTPAVAVASSSSDEYFSPPTSPPPARRRRGRRPPSGLGPRGPPASDRVPAPGGSVQRMRWTQSINENVMRAYYGATEGGNNLTAYRVRMLSLFQFVEPAVNVSAQRLSDQVRVIQRNHMLDDTVLDRLRTEMSNHAIAPSSQPVVPVMVPPSYHLSDHADEEITDMVTHVSTQCNNELRSALECAIREYRNMPLELRPRLPRLPMHNKNKALVAALDLQLSNYFDDCEDLTDTHSIMYCAAVAACRVAHVKFPSCDVSTRPKPAVPAWQCRIERRIGGARALIGKLICFREGNTRPRVMRFVRRAFSGTDISPRDYMSRVTERIDFLKQKVYAWANRIRRYKRRVERYTQNRTFRSNERWVYRAWERPDQGVTDTRLPDDDAMSSFWRSIWSVPVSHTEGDWTREVERACDPIPQMGAIDISPQDVARAVRPLPNWKSPGPDGLHNFWIKWFTRSHARLAYQFQSALESGSLPQFLTTGITHLLHKSGSTAEPKNYRPITCLPTVYKVLTSILRSKINSHIDKNLIMSPSQNGCRNGSRGTKELLLIDMTISQQVRRFRKDLSTCWIDYKKAYDSVPHTWLMRVLELYKIDTTLRTFLMSCMRQWSTVLRYPGCRHIQRNSEPIRIERGIFQGDSLSPLWFCLALNPLSTLLENSGLGYRLKRGGQVISHLLYMDDLKLFAPNNLQLMELLKVTETFSSAIRMEFGVDKCAVMHVKRGEVVESVGTQLTDSINLRSLSPTETYKYLGMSETLGINITDMKQSLKERFFGRLKKVFNSLLSGGNKVRAFNGWVIPVLMYSFGVLKWTQTELDALDRRVRTLLTAYRMHHPRSSVMRLYIPRKCGGRGFLNAKTLHNREVCSLREYFLATDVGMHRDVVTVDKGLTPLSLANENWRKPVVLDTNDRREVWQSKELHGRFFRAFHGPDVDQLASVAWLRFGDLFGETEGFVCAIMDEVIMTNNYRRFILKDGTVDICRACHRPGESIRHIISGCSRLANGEYLHRHNLVARIIHQQLALKYSLVESEVPYYRYEPDPVLDNGHITLYWDRSIITDRTIVANKPDIVVVDRSERRAMIVDISVPHDENLVKAEKDKQIKYIDLAREVVDMWDVDSAIIVPIVVSANGLIAKSLDQHLRRLALGGWIKALIQKAVLLDTARIVRRFLSLEP

SEQ ID NO: 11324 - protein, 1200 aa, Mythimna impura
MLTRAAARRARLPPPASSLSSASPPPESSPTVSAVTPAVAVASSSSDEYFSPPTSPPPARRRRGRRPPSGLGPRGPPASDRVPAPGGSVQRMRWTQSINENVMRAYYGATEGGNNLTAYRVRMLSLFQVLEPAVNVSAQRLSDQVRVIQRNHMLDDTVLDRLRTEMSNHAIAPSSQPVVPVMVPPSYHLSDHADEEITDMVTHVSTQCNNELRSALECAIREYRNMPLELRPRLPRLPMHNKNKALVAALDLQLSNYFDDCEDLTDTHSIMYCAAVAACRVAHVKFPSCDVSTRPKPAVLAWQCRIERRIGGARALIGKLICFREGNTRPRVMRFVRRAFSGTDISPRDYMSRVTERIDFLKQKVYAWANRIRRYKRRVERYTQNRTFRSNERWVYRAWERPDQGVTDTRLPDDDAMSSFWRSIWSVPVSHTEGDWTREVERACDPIPQMGAIAISTQDVARAVRPLPNWKSPGPDGLHNFWIKWFTRSHARLAYQFQSALESGSLPQFLTTGITHLLHKSGSTAEPKNYRPITCLPTVYKVLTSILRSKINSHIDKNLIMSPSQNGCRNGSRGTKELLLIDMTISQQVRRFRKDLSTCWIDYKKAYDSVPHTWLMRVLELYKIDTTLRTFLMSCMRQWSTVLRYPGCRHIQRNSEPVRIERGIFQGDSLSPLWFCLALNPLSTLLENSGLGYRLKRGGQVISHLLYMDDLKLFAPNNLQLMELLKVTETFSSAIRMEFGVEKCAVMHVKRGEVVESVGTQLTDSINLRSLSPTETYKYLGMSEALGINITDMKQSLKERFFGRLKKVFNSLLSGGNKVRAFNGWVMPVLMYSFGVLKWTQTELDALDRRVRTLLTAYRMHHPRSSVMRLYIPRKCGGRGFLNAKTLHNREVCSLREYFLATDVGMHRDVVAVDKGLTPLSLANENWRKPVVLDTNDRREVWQSKELHGRFFRAFHGPDVDQLASVAWLRFGDLFGETEGFVCAIMDEVIMTNNYRRFIVKDGTVDICRACHRPGESIRHIISGCSRLANGEYLHRHNLVARIIHQQLALKYSLVESEVPYYRYEPDPVLDNGHITLYWDRSIITDRTIVANKPDIVVVDRSERRAMIVDISVPHDENLVKAEKDKQIKYIDLAREVVDMWDVDSAIIVPIVVSTNGLIAKSLDQHLRRLALGGWIKALIQKAVLLDTARIVRRFLSLEP

SEQ ID NO: 11325 - protein, 1200 aa, Mythimna impura
MLTRSRAKKANTHPTSSGSSLSSASQPPGPAPTVSPEIPVAAVASSSSDEYFSPPTTPPPARRRGRGRPPASLGPRGPPASDRVLAAGGSVQRMRWTQSINENVMRSYFGATEGGSNLTAYRGRMLSLFQVLEPAVNVSAQRLSDQVRVIQRNRMLDDAVLDRLRLESRSSRVSPASPQAAVQLQSNVSLRPDHVGEDDDDGAISVSNQCNVRLRSALEDAFREYRFTPAELRPRLPRLPMHKKNRALVCALDSQLSNCFDSSEDLTDTHSILYCAAVAACRVARVKFPNSDRVTRPAVPAWQCRIERRIGEARALIGKLICFREGNTRPRVMRFVRRAFSGTNISPRDYLPHITERIDFLKQKVYAWANRIRRYKRRVERYTQNRTFQRNERWVYRAWERPDQGVIDTRLPDDDAMCSFWRSIWSVPVSHTEGDWTREIERTCDLIPEMEPITISPQDVARAVRPLPNWKSPGPDGLHNFWLKWFQRSHARLASQFQSALESGSLPQFLTTGITHLLHKSGSTAEPKNYRPITCLPTVYKVLTSILRAKINSHIETNSIMSASQNGCRNGSRGTKELLLIDVAISQQVRRSRRDLSTCWIDYKKAYDSVPHTWLMRVLELYKVDATLRTFLMSCMRQWRTALHYPGCRQIRESSEPIRIERGIFQGDSLSPLWFCLALNPLSTLLEGSGLGYRLKRGGQVISHLLYMDDLKLFASNNLQLMELLKVTETFSSAIRMEFGLDKCAVMHVKRGEIMESVGTQLSDSIYIRSLCSTETYKYLGMSEALGINAADMKQSLRERFFGRLNKVLNSLLSGGNKVRAFNGWVMPVLMYSFGILKWTQTELDALDRRVRSLLTANRMHHPRSSVMRLYIPRKCGGRGFLNAKTLHNREICSLREYFLKTDVGMHRDVVAVDKGLTPLSLVNENWRKPTVMDTNERRAVWQGKELHGRFYRALHGPDVDLLASVSWLRFGNLFGETEGFVFAIMDEVMMTNNYRKYIVKDGTVDICRACHRPGESIRHIISGCSHLANGDYLHRHNLVARIIHQQLALKYNLVESEVPYYRYVPDPVLENGSVTLYWDRSIITDRTIVANKPDIVVIDRLERRTMIVDIAVPHDENLVKAEKDKQTKYLDLAREVVDMWEVDRAVIVPIVVTANGLIAKSLEQHLRRLSLGSWIKGLIQKAVLLDTARIVRRFLSQEP

SEQ ID NO: 11326 - protein, 1078 aa, Mythimna impura
MLSLFQVLEPAVNVSAQRLSDQVRVIQRNHMLDDTVLDRLRTEMSNHAIAPSSQSVVPVMVPPSYHLSDHADEEITDMVTHVSTQCNNELRSALECAIREYRNMTPELRPRLPRLPMHNKNKALVAALDLQLSNYFDDCKDLTDTHSIMYCAAVAACRVAHVKFPNCDVATRPKPAVPAWQCRIERRIGGARALIGKLICFREGNTRPRVMRFVRRAFSGTDISPRDYMSRVTERIDFLKQKVYAWANRIRRYKRRVERYTQNRTFRSNERWVYRAWERPDQGVTDACLPDDDAMSSFWRSIWSVPVSHTEGDWTREVERACDPIPQMGAIDISPQDVARAVRPLPNWKSPGPDGLHNFWIKWFTRSHARLAYQFQSALESGSLPQFLTTGITHLLHKSGSTAEPKNYRPITCLPTVYKVLTSILRSKINSHIDKNLIMSPSQNGCRNGSRGTKELLLIDMTISQQVRRSRKDLSTCWIDYKKAYDSVPHTWLMRVLELYKIDTTLRTFLMSCMRQWSTVLRYPGCRHTQRNSEPVRIERGIFQGDSLSPLWFCLALNPLSTLLENSGLGYRLKRGGQVISHLLYMDDLKLFAPNNLQLMELLKVTETFSSAIRMEFGVDKCAVMHVKRGEVVKSVGTQLTNSINLRSLSPTETYKYLGMSEALGINITDMKQSLKERFFGRLKKVLNSLLSGGNKVRAFNGWVMPVLMYSFGVLKWTQTELDALDRRVRTLLTAYRMHHPRSSVMRLYIPRKCGGRGFLNAKTLHNREVCSLREYFLAADVGMHRDVVAVDKGLTPLSLANENWRKPVVLDTNDRREVWQSKELHGRFFRALHGPDVDQLASVAWLRFGDLFGETEGFVCAIMDEVIMTNNYRRFIVKDGTVDICRACHRPGESIRHIISGCSRLANGEYLHRHNLVARIIHQQLALKYSLVESEVPYYRYEPDPVLDNGHITLYWDRSIITDRTIVANKPDIVMVDRSERRAMIVDISVPHDENLVKAEKDKQIKYIDLAREVVDMWDVDSAIIVPIVVSANGLIAKSLDQHLRRLALGGWIKGLIQKVVLLDTARIVRRFLSLEL

SEQ ID NO: 11327 - protein, 1056 aa, Mythimna impura
MGEERCKETCFLSRRVSQCSIRLNQRRQCGPTEVRFDRFGKGPERSATGRLCRELCANMSNAVEPSLLRSALEDALREYRLTPTELRPRLPRLPMHKKNRALVCTLDSLLKNIFESSENLVDTHSILYCGAVAACRLANIKFPNTDGTIRPKPAVPAWQYRIERRIDGARVLIGKLHSFREGNTRPRVMRFVRRAFLGTSISPQEYMSRVTERIDFLKQKVCAWASRIRRYKRRVDRYSQNRIFQSDERWVYRAWERPEQNVIDGLRPDDFATITFWRNIWSVPVSHTEGGWIREVERVCEAIPEMEKITISPADVAKAVRPLPNWKSPGPDGLQNFWLKWYRNSHAPLASQFQSTLESGSLPEYLTTGVTHLLHKTGNPAEPKNYRPITCLSTVYKLLTSILREKINRHIENNSIMSASQNGCRNGSRGTKELLLIDMAVSQQARRSRKDLSTCWIDYKKAYDSVPHTWLMRVLELYKIDTTLRTFLESCMRQWKTVLRYPGCRPIQGDDEPIRIKRGIFQGDSLSPLWFCLALNPLSTLLEDSGLGYRLRRGGQAISHLLYMDDLKLFAPSNLQLMELLKVTETFSSAIRMEFGVDKCAAMHVKQGEIMESEGIQLPDSIHLKSLSSTETYRYLGMSEALGINNADMKQSLKERFFGRLKKVLNSLLSGGNKVRAFNGWVMPVLMYSFGILKWTQTELDALDRRVRTLLTANRMHHPRSSVMRLYISRKCGGRGFLNAKTLHNREVCSLREYFLKTDVGMHRDVVAVDKGLTPLSMAKEDWRKPVVLTTDDRKEVWKGKELHGRFYRALHEPDVDFLASVAWLRFSDLFGETEGFVCAIMDEVILTNNYRKYIMKDGTVDVCRACHRPGESIRHIISGCSRLANGEYLHRHNQVARIIHQQLALKYNLVDSEVPYYKYVPDPVLENDHVTLYWDRSIITDRTIVANKPDIVVIDRLARRAIIVDVTIPHDENLVKAEKEKQIKYLDLAHEVVGMWNMDSAVIVPIVVTANGLIAKSFDDHLSKLSLRGWIKGLIQKAVLLDTARIVRRFLSLEP

SEQ ID NO: 11328 - protein, 1200 aa, Mythimna impura
MLTRAAARRARPPPPDSSFSSASPPPEPSPIVSAVTSAAAVASSSSDEYFSPPTTPPPARRRGGRRPPSGLGPRGPPASDRVPAPGGSVQRMRWTRSINENVMRSYYGATEGGNNLTAYRVRMLSLFQVLEPAVNVSAQRLSDQVRVIQRNHMLDDTVLDRLRTEMGSHAIASSSQTVAPSQVSPSNHLPNHADEESTDMVTHVSTQCSNELRSTLECAIREYRNMPLELRPRLPRLPMCNKNKALVAALDLQLSNYFDDCEDLTDTHSIMYCAAVAACRVAHVKFPNSDVATRPKPAVPAWQCRIERRIGGARALIGKLICFREGNTRPRVMRFVRRAFSGTDISPRDYMSCVTERIDFLKQKVYAWANRIRRYKRRVERYTQNRTFRSNERWVYRAWEQPDQGGADTRLPDDDAMSSFWRNIWSVPVSHTEGGWTREVERACEPIPEMGAITISPQDVARAVRPLPNWKSPGPDGLHNFWIKWLQRSHARLASQYQTALESGSLPEFLTTGVTHLLHKSGSTAEPKNYRPITCLPTVYKVLTSILRAKINHHVDNNGIMSASQNGCRNGSRGTKELLLIDMAISQQVRRSRKDLSTCWIDYKKAYDSVPHTWLMRVLELYKIDATLRTFLMLCMRQWRTVLRYPGCRHIQRNSEPVRIERGIFQGDSLSPLWFCLALNPLSTLLENSGLGYRLKRGGQVISHLLYMDDLKLFAPNNLQLMELLKVTETFSSAIRMEFGVDKCAVMHVKRGEIVESVGTQLSDSINLRSLSPTETYKYLGMSEALGINATDMKQTLRERFFGRLKKVFNSLLSGGNKVRAFNGWVMPVLMYSFGVLKWTQTELDALDRRVRTLLTAYRMHHPRSSVMRLYIPRKCGGRGFLNAKILHNREVCSLREYFLTADVGMHRDVVAVDKGLTPLSLANESWRKPVVLDTNDRREVWQSKELHGRFFRALHGPDVDQLASVAWLRVGDLFGETEGFVCAIMDEVIMTNNYRRFIVKDGTVDICRACHRPGESIRHIISGCSRLANGEYLHRHNLVARIIHQQLALNYSLVESEVPYYRYVPDPVLDNGDITLYWDRSIITDRTIVANKPDIVVVDRRERRTMIVDISVPHDENLVKAEKDKQIKYIDLAREVVDMWDVDSAIIVPIVVSANGLIAKSLDQHLRRLALGGWIKGLIQKAVLLDTARIVRRFLSLEP

SEQ ID NO: 11329 - protein, 1064 aa, Mythimna impura
MFRSNDYRIRCGSFSVIVCWMTPYLIDCAWNHRVAVFSPATTPAAVQRLPTASPRPVQVGDADDDAAISVSTQCNDRLRGALEDAFREYRSTPPGLRPRLPRLPMHKRNRALVCALDSQLSNCFDSSKDLTDTHSILYCAAVAACRVAHVKFPNCDRATRPAVPAWQCRIEHRIGEARALIGKLICFREGNTRPRVMRFVRRAFSGTDISPRDYLPCVTERIDFLKQKIYAWANRIRRYKRRVERYTRNRTFQSNERWVYRDWERSDQGVTDTRLPDDDAMCSFWRSIWSAPVSHTEGDWIREVERACDLLPEMGAITISPQDVARAVRPLPNWKSPGPDGLHNFWVKWFQRSHARLASQFQSALESGSLPQFLTTGITHLLHKSGSTAEPKNYRPITCLPTVYKVLTSILRAKINSHIETNSIMSASQNGCRNGSRGTKELLLIDIAISQQVRRSRKNLSACWIDYKKAYDSVPHTWLMRVLELYKVDATLRTFLMSCMGQWRTVLHYPGCRQIQENNEPIRIERGIFQGDSLSPLWFCLALNPLSTLLEGSGLGYRLKRGGQVISHLLYMDDLKLFAPNNLQLVELLKVTETFSSAIRMEFGVDKCAVIHVKRGEIMESVGIQLSDSIHLRSLCSTETYKYLGMSESLGINTDDVKQSLKERFFGRLNKVLNSLLSGGNKVRAFNGWVMPVLMYSFGILKWTQTELDALDRRVRTLLTANRMHHPRSSVMRLYIPRKCGGRGFLNAKTLHNREVCSLREYFLKTDVGMHRDVVAVDKGLTPLSLANENWRKPIVLDTNDRREVWQSKELHGRFYRALHGPDVDLLASVSWLRFGDLFGETEGFVFAIMDEVMMTNNYRKYIVKDGTVDICRACHRPGESIRHIISGCSHLANGDYLHRHNLVARIIHQQLALKYNLVESEVPYYRYVPDPVLDNGNITLYWDRSIITDRTIVANKPDIVVIDRLERRTMIVDIAVPHDENLVKAEKDKQTKYLDLAREVVDMWEVDNAIIVPIVVTANGLIAKSLEQHLRRLSLGSWIKGLIQKAVLLDTARIVRRFLSHEP

SEQ ID NO: 11330 - protein, 1002 aa, Mythimna impura
MVTNVSTQCNNELRSALECAIWEYRNMPLELRPRLPRLPMHNKNKALVAALDLQLSNYFDDCEDLTDTHSIMYCAAVAACRVAHVKFPSCDDVSTRPKPAVPAWQCRIERRIGGARALIGKLICFREGNTRPRVMRFVRRAFSGTDISPRDYMSRVTERIDFLKQKVYAWANRIRRYKRRVERYTQNRTFRSNERWVYMAWERPDQGVTDTRLPDDDAMSSFWRSIWSVPVSHTEGDWTREVERACDPIPQMGAIDISPQDVARAVRPLPNWKSPGPDGLHNFWIKWFTRSHARLAYQFQSALESGSLPQFLTTGITHLLHKSGSTAEPKNYRPITCLPTVYKVLTSILRSKINSHIDKNLIMSPSQNGCRNGSRGTKELLLIDMTISQQVRRFRKDLSTCWIDYKKAYDSVPHTWLMRVLELYKIDTTLRTFLMSCMRQWSTVLRYPGCRHIQRNSEPVRIERGIFQGDSLSPLWFCLALNPLSTLLENSGLGYRLKRGGQVISHLLYMDDLKLFAPNNLQLMELLKVTETFSSAIRMEFGVDKCAVMHVKRGEVVESVGTQLTDSINLRSLSPTETYKYLGMSEALGINITDMKQSLKERFFGRLKKVFNSLLSGGNKVRAFNGWVMPVLMYSFGVLKWTQTELDALDRRVRTLLTAYRMHHPRSSVMRLYIPRKCGGRGFLNAKTLHNREVCSLREYFLATDVGMHRDVVAVDKGLTPLSLANENWRKPVVLDTNDRREVWQSKELHGRFFRAFHGPDVDQLASVAWLRFGDLFGETEGFVCAIMDEVIMTNNYRRFIVKDGTVDICRACHRPGESIRHIISGCSRLANGEYLHRHNLVARIIHQQLALKYSLVESEVPYYRYEPDPVLDNGHITLYWDRSIITDRTIVANKPDIVVVDRSERRAMIVDISVPHDENLVKAEKDKQIKYIDLAREVVDMWDVDSAIIVPIVVSANGLIAKSLDQHLRRLALGGWIKALIQKAVLLDTARIVRRFLSLEP

SEQ ID NO: 11331 - protein, 920 aa, Mythimna impura
MHKRNGALVCALDSQLSNCFDSSEDLTDTHSILYCAAVAACRVAHVKFPNCDRATRPAVPAWQCRIEHRIGEARALIGKLICFREGNTRPRVMRFVRRAFSGTDISPRDYLPCVTERIDFLKQKIYAWANRIRRYTRNRTFQSNERWVYRDWERPDQGVTDTRLPDDDAMCSFWRSIWSAPVSHTEGDWIREVERACDLLPEMGAITISPQDVTRAVRPLPNWKSPGPDGLHNFWLKWFQRSHARLASQFQSALESGSLPQFLTTGITHLLYKSGSTAEPKNYRPITCLPTVYKVLTSILRAKINSHIETNSIMSASQNGCRNGSRGTKELLLIDVAISQQVRRSRKNLSACWIDYKKAYDSVPHTWLMRVLELYKVDATLRTFLMSCMGQWRTVLHYPGCRQIQENSEPIRIERGIFQGDSLSPLWFCLALNPLSTLLEGSGLGYRLKRGGQVISHLLYMDDLKLFAPNNLQLVELLKVTETFSSAIRMEFGVDKCAVIHVKRGEIMESVGIQLSDSIHLRSLCSTETYKYLGMSESLGINTDDVKQSLKERFFGRLNKVLNSLLSGGNKVRAFNGWVMPVLMYSFGILKWTQTELDALDRRVRTLLAANRMHHPRSSVMRLYIPRKCGGRGFLNAKTLHNREVCSLREYFLKTDVGMHRDVAAVDKGRTPLSLANENSRKPIVLDTNDRREVWQSKELHGRFYRALHGPDVDLLASVSWLRFGDLFGETEGFVFAIMDEVMMTNNYRKYIVKDGTVDICRACHRPGESIRHIISGCSHLANGDYLHRHNLVARIIHQQLALKYNLVESEVPYYRYVPDPVLDNGNITLYWDRSIITDRTIFANKPDIVVIDRLERRTMIVDIAVPHDENLVKAEKDKQTKYLDLAREVVDMWEVDGAIIVPMVVTINVIMAGPTLVSE

SEQ ID NO: 11332 - protein, 1200 aa, Mythimna impura
MLTRAAARRARPPPPASSLSSASPPPEPCLTVSAVTPAVAAASSSSDEYYSPPTTPPPTRRRGERRPPACLGSRGPPASDRVPATGGCVSRMRWTQSINENVMRAYYGATEGGNNLTAYRVRMLSLFQVLEPAVNVSAQRLSDQVRVIQRNHMLDDTVLDRLRTEMGSHAIASSSQTAVPSQVSPSNHLPNHADEESTDMVTHVSTQCSNELRSALECAIREYRNMPLELRPRLPRLPMCNKNKALVAALDSQLSNYFDDCEDLTDTHSIMYCAAVAACRVAHVKFPNSDVATRPKPAVPAWQCRIERRIGGARALIGKLICFREGNTRPRVMRFVRRAFSGTDISPRDYMSCVTERIDFLKQKVYAWANRIRRYKRRVERYTQNRTFRSNERWVYRAWEQLDQSVTDTRLPDDDAMSSFWRNIWSVPVSHTEGGWTREVELACEPIPEMGAITISPQDVARAVRPLPNWKSPGPDGLHNFWIKWLQRSHVRLASQYQTALESGSLPEFLTTGVTHLLHKSGSTAEPKNYRPITCLPTVYKVLTSILRAKINHHVDNNAIMSASQNGCRNGSRGTKELLLIDMAISQQVRRSQKDLSTCWIDYKKAYDSVPHTWLMRVLELYKIDTTLRTFLMSCMRQWRTVLRYPGCRHIQRNSEPVRIERGIFQGDSLSPLWFCLALNPLSTLLENSGLGYRLKRGGQVISHLLYMDDLKLFAPNNLQLMELLKVTETFSSAIRMEFGVDKCAVMHVKRGEIVESVGTQLSDSINLRSLSPTETYKYLGMSEALGINATDMKQTLRERFFGRLKKVFNSLLSGGNKVRAFNGWVMPVLMYSFGVLKWTQTELDALDRRVRTLLTAYRMHHPRSSVMRLYIPRKCGGRGFLNAKTLHNREVCSLREYFLAADVGMHRDVVAVDKGLTPLSLANESWRKPVVLDTNGRREVWQSKELHGRFFRALHGSDVDQLASVAWLRVGDLFGETEGFVCAIMDEVIMTNNYRRFIVKDGTVDICRACHRPGESIRHIISGCSRLANGEYLHRHNLVARIIHQQLALKYSLVESEVPYYRYMPDPVLDNGDITLYWDRSIITDRTIVANKPDIVVVDRRERRTMIVDISVPHDENLVKAEKDKQIKYIDLAREVVDMWDVDSAVIVPIVVTANGLIAKSFDDHLSKLSLRGWIKGLIQKAVLLDTARIVRRFLSLEP

SEQ ID NO: 11333 - protein, 1200 aa, Mythimna impura
MLTRSRAQKLHTHPTSSGSSLSSASQPLGPAPTVSPEIPVAAVASSSSDEYFSPPTTPPPARRRGRGRPPASLGPRGPPASDRVPAAGGSVQRMRWTSPINENVMRSYFGATEGGINLTAYRGRMLSLFQVLEPAVNVSVQRLSDQVRVIQRNRMLDDAVLDRLRLESQSSRVSPATTSVAVQRLPTASPRPVQVGDADDDAAISVSTQCNDRLRGVLEDAFREYRSIPPGLRPRLPRLPMHKRNRALVCALDSQLSNCFDSSKDLTDTHSILYCAAVAACRVAHVKFPNCDRATRPAVPAWQCRIEHRIGEARALIGKLICFREGNTRPRVMRFVRRAFSGTDISPRDYLPCVTERIDFLKQKIYAWANRIRRYKRRVERYTRNRTFQSNERWVYRDWERSDQGVTDTRLPDDDAMCSFWRSIWSAPVSHTEGDWIREVERACDLLPEMGAITISPQDVARAVRPLPNWKSPGPDGLHNFWVKWFQRSHARLASQFQSALESGSLPQFLTTGITHLLHKSGSTAEPKNYRPITCLPTVYKVLTSILRAKINSHIETNSIMSASQNGCRNGSRGTKELLLIDIAINQQVRRSRKNLSACWIDYKKAYDSVPHTWLMRVLELYKVDATLRTFLMSCMGQWRTVLHYPGCRQIQENDEPIRIERGIFQGDSLSPLWFCLALNPLSTLLEGSGLGYRLKRGGQVISHLLYMDDLKLFAPNNLQLEELLKVTETFSSAIRMEFGVDKCAVIHVKRGEIMESVGIQLSDSIHLRSLCSTETYKYLGMSESLGINTDDVKQSLKERFFGRLNKVLNSLLSGGNKVRAFNGWVMPVLMYSFGILKWTQTELDALDRRVRTLLAANRMHHPRSSVMRLYIPRKCGGRGFLNAKTLHNREVCSLREYFLKTDVGMHRDMVAVDKGLTPLSLANENWRKPIVLDTNDRREVWQSKELHGRFYRALYGPDVDLLASVSWLRFGDLFGETEGFVFAIMDEVMMTNNYRKYIVKDGTVDICRACHRPGESIRHIISGCSHLANGDYLHRHNLVARIIHQQLALKYNLVESEVPYYRYVPDPVLDNGNITLYWDRSIITDRTIVANKPDIVVIDRLERRTMIVDIAVPHDENLVKAEKDKQTKYLDLAREVVDMWEVDRAIIVPIVVTANGLIAKSLEQHLRRLSLGSWIKGLIQKAVLLDTARIVRRFLSQEP

SEQ ID NO: 11334 - protein, 1192 aa, Phlogophora meticulosa
MLTRSRARVLNAPTTSSGSSLSSASQLPGPAPDVSPVTPAAAVASSSSDEYYSPPTSPPPVRRCGRGRPPASLGLRGPPASARVPASGGSVQRMRWTQSINENVMRSYYGATEGGINLTAYRGRMLSLFQVLEPAVNVSAQRLSDQVRVIQRNHMLDDAVLDRLRLNSRSNRVTPASPPVAVQLQNLPSVSPRPDYVGEEDDAAISVSSQCNVRLRSALEDAFREYRSTPPGLRQRLPRLPMHKKNKALMCTLDSLLSNSFDSSRDLADTHSILYCAAVAACRVANVKFPNSVRSTRPAIPAWQCRIERRIGEARVLIGKLICFRDGNTRPRVMRFVRRAFSGTDISSRDYLTRVTERIDFLKQKICAWANRIRRYKRRVERYTQNRTFRSDERWVYRTWERPDQGVTDTFLPDDEAMCLFWRSIWSVPVSHTEGDWTREVERTCEPLPEMGAINISPQDVACAVRPLPNWKSPGPDGLHNFWIKWLKSSHARLASQFQSALESGSLPQFLTTGITHLLHKSGGTSEPKNYRPITCLPTVYKVLTSILRSKINNHIDSTSIMSVSQNGCKNGSRGTKELLLIDMAISQQVRRSRKDLSTCWIDYKKAYDSVPHTWLMRVLELYKIDATLRTFLKSCMGQWRTVLHYPGCRQFQENSEPIRIERGIFQGDSLSPLWFCLALNPLSTLLEGSGLGYRLRRGGQVISHLLYMDDLKLFAHNNLQLMKLLKVTETFSSAIRMDFGVDKCAVMHVKRGGIVESAGTQLSDSIYLRSLSSTETYKYLGMSEALGINTADMKQSLKERFFGRLNKVLNSLLSGGNKVRAFNSWVMPVLMYSFGILKWTQTELDALDRRVRTLLTANRMHHPRSSVMRLYISRKCGGRGFLNAKTLHNREVCSLREYFLEADVGMHRDVVAMDKALTPLSLANENWRKPIVLDTTDRMEIWKSKELHGRFYRVLHGPDVDLSASVSWLRFGDLFGETEGFVCAIMDEVIMTNNYRKYIVKDGTVDICRACHRPGESIRHIISGCSRLANGDYLHRHNLVAKIIHQQLALKYNLVESEVPYYKYVPDPVLENGNITLYWDRSIITDRTIVANKPDIVVIDRSDRRTMIVDITVPHDENLVKAEKEKQIKYLDLAREVVDMWDVNTAVIVPIVVTANGIIAKSLDQHLRRLSLGSWIKGLIQKAVLLDTDKD

SEQ ID NO: 11335 - protein, 1200 aa, Phlogophora meticulosa
MLTRSAARRARPPPLASSLSSASPPPESSPIVSTVTPAVAIASSSSDEYFSPPTSPPPARRRRGRRPPDSIGPRGPPASDRVPASGGSVQRMRWTQSINENVMRSYYGATEGGTNLTAYRGRMLSLFQMLEPAVNVSAQRLSDQVRVIQRNHMLDDVVLDRLRLNSRIYHVTPALPPVAVQLQSLPSVSPRPDYVGEEDDDAAISVSSQCNVRLRSALEDAFREYRSTPPELRSRLPRLPMHKKNKALMSALDSLLTKSFDNSKDLTDTHSILYCAAAAACRVANVKFPNTERATRPTVPAWQCRIQRRIDEARALIGKLICFREGNTRPRVMRFVRRAFSGTDISSRDYLTRVTERIDFLKQKICAWANRIRRYKRRVERYTQNRTFRSDERWVYRAWERPDQGVTDTCLPDDEAMCSFWRSIWSVPVSHTEGNWTREIERACEPLPEMGAINISPQDVASAVRPLPNWKSPGPDGLHNFWIKWLQSSHARLACQFQSALESGSLPQFLTTGITHLLHKSGSTAEPRNYRPITCLPTVYKVLTSILRSKINNHIDSNLIMSFSQNGCRNGSRGTKELLLIDTAISQQVRRSRKDLSTCWVDYKKAYDSVPHTWLMRVLELYKVDATLRTFLMSCMGQWRTVLRYPGCQQTRENSEPIRIERGIFQGDSLSPLWFCLALNPLSTLLEGSGLGYRLRTGGQVISHLLYMDDLKLFAPNNLQLMELLKVTETFSSAIRMDFGVDKCAVMHVKRGEIVESVGTQLSDSIYLRSLSSTETYKYLGMSEALGINATDMKQSLKERFFGRLNKVLNSLLSGGNKVRAFNGWVMPVLMYSFGILKWTQTELDALDRRVRTLLTANRMHHPRSSVMRLYIPRKYGGRGFLNAKTLHNREICSLREYFLKADVGMHRDVVAVDKTFTPLSLANKNWRKPIVLDTADRMEIWKSKELHGRFYRVLHGPDVDLVASISWLRFGDLFGETEGFVCAIMDEVIMTNNYRKYIVKDGTVDICRACHRPGESIRHIISGCSRLANGDYLHRHNLVARIIHQQLALKYNLVDLEVPYYKYVPDPVLENGSITLYWDRSIITDRTIVANKPDIVVIDRSERRTMIIDITVPHDENLVKAEKEKQMKYLDLAREVVDMWDVNTAVIVPIVVTANGIIAKSLDQHLKRLSLGSWIKGLIQKAVLLDTARIVRRFLSQES

SEQ ID NO: 11336 - protein, 1200 aa, Phlogophora meticulosa
MLTRSAARRARLPPLASSLSSASPPPESSPIVSTVTPAVAIASSSSDEYFSPPTSPPPARRRRGRRPPDSLGPRGPPASDRVPASGGSVQRMPWTQSINENVMRSYYGATEGGTNLTAYRGRMLSLFQMLEPAVNVSAQRLSDQVRVIQRNHMLDDVVLDRLRLNSRIYHVTPALPPVAVQLQSLPSVSPRPDYVGEEDDDAAISVSSQCNVRLRSALEDAFREYRSTPPELRSRLPRLPMHKKNKALMSALDSLLTKSFDNSKDLTDTHSILYCAAAAACRVANVKFPNTERATRPTVPAWQCRIQRRIDEARALIGKLICFREGNTRPRVMRFVRRAFSGTDISSRDYLTRVTERIDFLKQKICAWANRIRRYKRRVERYTQNRTFRSDERWVYRAWERPDQGVTDTCLPDDEAMCSFWRSIWSVPVSHTEGNWTREIERACEPLPEMGAINISPQDVASAVRPLPNWKSPGPDGLHNFWIKWLQSSHARLACQFQSALESGSLPQFLTTGITHLLHKSGSTAEPRNYRPITCLPTVYKVLTSILRSKINNHIDSNLIMSFSQNGCRNGSRGTKELLLIDTAISQQVRRSRKDLSTCWVDYKKAYDSVPHTWLMRVLELYKVDATLRTFLMSCMGQWRTVLRYPGCQQTRENSEPIRIERGIFQGDSLSPLWFCLALNPLSTLLEGSGLGYRLRTGGQVISHLLYMDDLKLFAPNNLQLMELLKVTETFSSAIRMDFGVDKCAVMHVKRGEIVESVGTQLSDSIYLRSLSSTETYKYLGMSEALGINATDMKQSLKERFFGRLNKVLNSLLSGGNKVRAFNGWVMPVLMYSFGILKWTQTELDALDRRVRTLLTANRMHHPRSSVMRLYIPRKYGGRGFLNAKTLHNREICSLREYFLKADVGMHRDVVAVDKTFTPLSLANKNWRKPIVLDTADRMEIWKSKELHGRFYRVLHGPDVDLVASISWLRFGDLFGETEGFVCAIMDEVIMTNNYRKYIVKDGTVDICRACHRPGESIRHIISGCSRLANGDYLHRHNLVARIIHQQLALKYNLVDLEVPYYKYVPDPVLENGSITLYWDRSIITDRTIVANKPDIVVIDRSERRTMIIDITVPHDENLVKAEKEKQMKYLDLAREVVDMWDVNTAVIVPIVVTANGIIAKSLDQHLKRLSLGSWIKGLIQKAVLLDTARIVRRFLSQEP

SEQ ID NO: 11337 - protein, 1198 aa, Phlogophora meticulosa
MLTRSAARRARPPPPASSLSSASSPPKPSTIVSTVKPAVPVASSSSDEYFSPPTSPPPARRRRGRRPPDGLGPRGPPASDRVPAPGGSVQRMRWTQSINENVMRSYYGATEGGSNLTAYRVRMLSLFQVLEPAVNVSAQRLSDQVRVIQRNHMLDDVVLDRLRTEMQSSRVITSPSHTVVPPQYNIVLSSFADGEGSDKVTNVSTQYNEELRSALEGAIREYRFMLPALRPRLPRLPMHNKNRALVAALDSQLSNYFDNCDDLTDAHSILYCAAVAACRVAHVKFPYDIATRPKPAVPAWQCRIERRIAGARALIGKLVCYREGNTRPRVMRYVRRAFLGTDISLRDYMSRVTERIDFLKQKVYAWASRIRRYKRRVERYTQNRTFQSNERWVYRAWERPVQGVTDTHLPDDDVMCSFWRNIWSVPVSHTEGDWTREVERPCDPIPQMGAITISPQDVARAVRPLPNWKSPGPDGLHNFWIKWLQKSHARLASQFQSALETGSLPQFLTTGITHLLHKSGSTAEPKNYRPITCLPTVYKVLTSILRVKINNHIDSNSIMSASQNGCRNGSRGTKELLLIDTAISQQVRRSRKDLSTCWIDYKKAYDSVPHTWLKRVLELYKVDATLRTFLTSCMGQWRTVLRYPGCRQIQRNSEPIRIERGIFQGDSLSPLWFCLALNPLSTLLEDSGLGYRLKRGGQVVSHLLYMDDLKLFAPSDLQLMELLTVTKTFSSAIRMEFGVDKCAVMHVKRGKIVESVGTQLPDFINFRALSPIETYKYLGMSEALGINAADMKQSLKERFFGRLKKVCNSLLSGGNKVRAFNGWVMPVLMFSFGILKWTQTELDALDRRVRTFLTASRMHHPRSSVMRLYIPRKCGGRGFLNAKTLHNREICSLRDYFLETDVGMHRDVVAVDQGLTPLSLAKENWRKPVVLDTNDRKEVWQSKELHGRFFQALHGPDVDQLASVSWLRFGDLFGETEGFVCAIMDEVIMTNNYRRFIVKDGTVDICRACHRPGESIRHIISGCSRLANEEYLHRHNLVARIIHQQLALKYSLVESEVPYYKYVPDPVLENGSVTLYWDRSIITDRTIVANKPDIVVMDRIERRATIIDVTVPHDGNLVKAEKDKQIKYLDLAREVVDMWDVDSAIVVPIVVSANGLIAKSLDQHLRRLALGSWIKGLIQKAVLLDTARIVRRFLSLEP

SEQ ID NO: 11338 - protein, 1105 aa, Xestia xanthographa
MNENVMRAYYGATKGGINLTAYRGQMLSLFQVLEPGVSASAQQLSDQVRVIQRNHMLDDTVLDRLRSESRSNLVMPASPLLAVQVQNVSSAPPRSDRDGEEDDNEVISVSTQCNAQLRSALESAFREYRSTPPELRPRLPRLPMHNKNQALVCALDSQLSNCFDSSKDLADTHSILYCGAIAACRVAHVKFPNNDRATRPKLAAPAWQCRIERRIGEARALIGKLICFREGNTRPRVMHFVRRAFSGTDISFRDYLARVTERIDSLKQKICAWASRIRRYKRRVERYTQNRTFQSDERWVYRAWERPDQGVTDTRLPDDNAMCSFWRSIWSVPVSHTEGDWTREVEQACNPIPEMGAIVISPQDVARAVRPLPNWKSPGPDGLHNFWIKWFQRSHACLASQFQSALESGSLPQFLTTGITHLLHKSGSAAEPKNYRPITCLPTVYKVLTSILRAKINQHIESNSIMSASQNGCRNGSRGTKELLLIDMAISQQVRRSRKNLSTCWIDYKKAYDSVPHTWLMRVPELYKVDATLRTFLMSCMGQWRTVLRYPGCRQIQGTSEPIRIERGIFQGDSLSPLWFCLALNSLSTLLERSGLRYLLRRDGQVISHLLYMDDLKLFAPNNLQLMKLLKVTETFSSAIRMEFGVDKCAVMHVKRGEIMESVGTQLSDSIHLRSLSSTETYKYLGMSEALGINTADMKQLLRERFFGRLNKVLGSLLSGGNKVRAFNGWDMPVLMYSFGILKWTQTELDALDRRVRTLLTANRMHHPRASVMRLYIPRKCGGRGFLNAKTLHNREVCSLREYFLEADGEMHRDVVSVDKGLTPLSLANENWRKPKVLNTNDRKEEWQSKELHGRFYRALHGPDVDFLASVSWLRFGDLFGETEGFVCAIMDEVMMTNNYRKYIVKDGTVDICRACHRPGESIRHIISGCSSLANGEYLHRHNLVARIIHQQLALKYNLVESEMPYYRYAPDPVLDNGNITLYWDRPITTDRTVVANRPDIVVIDRLERRTMIVDITVPHDENLVKAEKDKQFKYLDLAREVVDMWDVNTAVIVPIVVSANGLIAKSLDQHLRRLSLGSWIKGLIQKVVLLDTARIVRRFLSQEP

SEQ ID NO: 11339 - protein, 1211 aa, Xestia xanthographa
MSPMLTRHRAKLQKEAHPPSPGSSLSSASQPPGRATPVSTVSPVAAVASSSSDEFFSPPSTPSPPPRGRRRGRGRPPAGLGPRGQQAPSRVPAAGGNVSRMRWTHSINENVMRAYYGATEGGSNLTAYRSRMLSLFQVLEPAVSVEAQRLSDQVRVIQRNHMLDDTVLDRLRSESRSNLVTPASPMIAVQQQNIPSAPPRSDYDGEEDRDEVISVSTQCNAQLRSALEGAFREYRSTPPELRPRLPRLPMHNKNKALMCALDSQLSNCFDSSKDLADTHSILYCGAVAACRVAHVKFPNNDRATRPKLAVPAWQCRIERRIGEARALIGKLICFREGNTRPRVMRFVRRAFSGTDISFRDYLARVTERIDSLKQKICAWASRIRRYKRRVERYTQNRTFQSDERWVYRAWERPDQGVTDTRLPDESATYSFWRNIWSVPVSHTEGDWTREVEQACDPIPEMGAIIISPQDVARAVRPLPNWKSPGPDGLHNFWIKWFQRSHARLASQFQSALESGSLPQFLTTGITHLLHKSGSVAEPKNYRPITCLPTVYKVLTSILRAKINQHIDSNSIMSASQNGCRNGSRGTKELLLIDMAISQQVRRSRKNLSTCWIDYKKAYDSVPHTWLMKVLELYKIDATLRTFLMSCMGHWRTVLCYPGCRQIQGNSEPIRIERGIFQGDSLSPLWFCLALNPLSTLLERSGLGYLLRRDGQVISHLLYMDDLKLFAPNNLQLMKLLKVTETFSSAIRMEFGVDKCAVMHVKRGEIMESVGTQLSDSIHLRSLSSTETYKYLGMSEALGINTADVKQSLRERFFGRLNKVLGSLLSGGNKVRAFNGWVMPVLMYSFGILKWTQTELDALDRRVRTLLTANRMHHPRSSVMRLYIPRKCGGRGFLNAKTLHNREVCSLREYFLEADGEMHRDVVSVDKGLTPLSLANENWRKPKVLDTNDRKVEWQGKELHGRFYRALHGPDVDFLPSVSWLRFGDLFGETEGFICAIMDEVMMTNNYRKYIVKDGTVDICRACHRPGESIRHIISGCSSLANGEYLHRHNLVARIIHQQLALKYNLVESEVPYYKYAPDPVLDNGHITLYWDRPITTDRTVVANRPDIVVIDRLERRTMIVDITIPHDENLVKAEKDKQFKYLDLAREVVDMWDVGTAVIVPIVVSANGLIAKSLDQHLRRLSLGSWIKGLLQKAVLLDTARIVRRFLSQEP

SEQ ID NO: 11340 - protein, 1100 aa, Xestia xanthographa
MRAYYGATEGGSNLTAYRSRMLSLFQVLEPAVSVEAQRLSDQVRVIQRNHMLDDTVLDRLRSESRSNLVTPASPMIAVQQQNIPSAPPRSDYDGEEDRDEVISVSTQCNAQLRSALEGAFREYRSTPPELRPRLPRLPMHNKNKALMCALDSQLSNCFDSSKDLADTHSILYCGAVAACRVAHVKFPNNDRATRPKLAVPAWQCRIERRIGEARALIGKLICFREGNTRPRVMRFVRRAFSGTDISFRDYLARVTERIDSLKQKICAWASRIRRYKRRVERYTQNRTFQSDERWVYRAWERPDQGVTDTRLPDESATYSFWRNIWSVPVSHTEGDWTREVEQACDPIPEMGAIIISPQDVARAVRPLPNWKSPGPDGLHNFWIKWFQRSHARLASQFQSALESGSLPQFLTTGITHLLHKSGSVAEPKNYRPITCLPTVYKVLTSILRAKINQHIDSNSIISASQNGCRNGSRGTKELLLIDMAISQQVRRSRKNLSTCWIDYKKAYDSVPHTWLMKVLELYKIDATLRTFLMSCMGHWRTVLRYPGCRQIQGNSEPIRIERGIFQGDSLSPLWFCLALNPLSTLLERSGLGYLLRRDGQVISHLLYMDDLKLFAPNNLQLMKLLKVTETFSSAIRMEFGVDKCAVMHVKRGEIMESVGTQLSDSIHLRSLSSTETYKYLGMSEALGINTADVKQSLRERFFGRLNKVLGSLLSGGNKVRAFNGWVMPVLMYSFGILKWTQTELDALDRRVRTLLTANRMHHPRSSVMRLYIPRKCGGRGFLNAKTLHNREVCSLREYFLEADGEMHRDVVSVDKGLTPLSLANENWRKPKVLDTNDRKVEWQGKELHGRFYRALHGPDVDFLPSVSWLRFGDLFGETEGFICAIMDEVMMTNNYRKYIVKDGTVDICRACHRPGESIRHIISGCSSLANGEYLHRHNLVARIIHQQLALKYNLVESEVPYYKYAPDPVLDNGHITLYWDRPITTDRTVVANRPDIVVIDRLEGRTMIVDITIPHDENLVKAEKDKQFKYLDLAREVVDMWDVGTAVIVPIVVSANGLIAKSLDQHLRRLSLGSWIKGLLQKAVLLDTARIVRRFLSQEP

SEQ ID NO: 11341 - protein, 1209 aa, Xestia xanthographa
MITRSRAKQHQEAHPPSPGSSLSSASQPPGRATPVSIVSPVAAVASSSSDEFFSPPSTPSPSPRRGRRRGRGRPPAGLGPRGQQAPSRVPAAGGNVSRIRWTQSMNENVMRAYYGATEGGINLTAYRGRMLSLFQVLEPGVSASAQRLSDQVRVIQRNHMLDDTVLDRLRSESRSNLVTPASPLIAVQVQNVSSAPPRSDRDGEEDDSEVISVSTQCNAQLRSALESAFREYRSTPPELRPRLPRLPMHNKNKALMCALDSQLSNCFDSSKDLTDTHSILYCGAVAACRVAHVKFPNNDGATRPKLAVPAWQCRIERRIGEARALIGKLICFREGNTRPRVMRFVRRAFSGTDISFRDYLARVTERIDSLKQKICAWASRIRRYKRRVERCTQNRTFQSDERWVYRAWERPDQGVTDTRLPDDSAMYSFWRNIWSVPVTHTEGDWTREVEQACDPIPEMGAIIISPQDVARAVRPLPNWKSPGPDGLHNFWIKWFQRSHARLASQFQSALESGSLPQFLTTGITHLLHKSGSAAEPKNYRPITCLPTVYKVLTSILRAKINQHIDSNSIMSASQNGCRNGSRGTKELLLIDMAISQQVRRSRMNLSTCWIDYKKAYDSVPHTWLMRVLELYKIDATLRTFLMSCMGHWRTVLRYPGCRQIQGNSEPIRIERGIFQGDSLSPLWFCLALNPLSTLLERSGLGYLLRRDGQVISHLLYMDDLKLFAPNNFQLMKLLKVTETFSSDIRMEFGVDKCAVMHVKRGEIMESEGTQLSDSIHLRSLSSTETYKYLGMSEALGINIADMKQSLRERFFGRLNKVLGSLLSGGNKVRAFNGWVMPVLMYSFGILKWTQTELDALDRRVRTLLTANRMHHPRSSVMRLYIPRKCGGRGFLNAKTLHNREVCSLREYFLEADGEMHRDVVSVDKGLTPLSLANENWRKPKVLDTNDRKVEWQSKELHGRFYRALHGPDVDFLPSVSWLRFGDLFGETEGFICAIMDEVMMTNNYRKYIVKDGTVDICRACHRPRESIRHIISGCSSLANGEYLHRHNLVARIIHQQLALKYNLVESEVSYYKYAPDPVLDNGHITLYWDRPITTDRTVVANRPDIVVIDRLERRTMIVDITIPHDENLVKAEKDKQFKYLDLAREVVDMWDVGTAVIVPIVVSANGLIAKSLDQHLRRLSLGSWIKGLIQKAVLLDTARIVRRFLSQEP

SEQ ID NO: 11342 - protein, 1197 aa, Xestia xanthographa
MLTRSAAARRARLPPPDTSLSSASPPPEPSPIVSAVTPAVAVASSSSDEYFSPPTTPPPARRRGGHRPPDGLGPRGPPASDRVPAPGGSVQRMRWTQSINENVMRAYYGATEGGNNLTAYRVRMLSLFQVLEPAVNVSAQRLSDQVRVIQRNRMLDDTVLDRLRTEIQSNHVIVTPSQAVVPPQSSIIPCDNDVSNDMVTNVSTQCNVEMRSALEGAIREYRFMQPDLRPRIPRLPMHNRNRALVAVLDSQLSNYFDNCEDLTDVHSILYCAAVAACRVAHVKFLSDRATRPKPAVPAWQYRIERRIGGARALIGKLVCFREGNTRPRVMRFVRQAFSGTDISPRDYMSRVTERIDFLKQKVYAWANRIRRYKRRVDRYTQNRTFQKDERWVYRAWERPDQGVADTHLPDDDAMCSFWRSIWSVPVSHAEGEWTRVIERACDPISEMGAINISPQDVARAVRPLPNWKSPGPDGLHNFWIKWFTRSHARLATLFQSALESGSLPEFLTTGITHLLHKSGSTAEPKNYRPITCLPTVYKVLTSILRTKISKHIDDNSVMSASQNGCRNGSRGTKELLLIDMVISHQVRRSRKDLSTCWIDYKKAYDSVPHTWLMRVLELYKVDATLRTFLMSCMGQWRTVLRYPGCRQIQRNSEPIRIERGIFQGDSLSPLWFCLALNPLSTLLEDSGLGYRLRKDGQVISHLLYMDDLKLFAPNDLRLMELLKVTETFSNAIRMEFGVDKCAVMHVKRGEIVESVGTQLSDSITLRSLSATETYKYLGMSEALGVNVADMKQSLKERFFGRLKKVLNSLLSGGNKVRAFNGWVMPVLMYSFGILKWTQTELDALDTKVRKLLTAYRMHHPRSSVMRLYIPRKCGGRGFLNAKTLHNREICSLREYFLGTDVGMHRDVVTMDKGFTPLSLAKENWRKPPVLDTNDRREVWQSKELHGRFFRALHGPDVDLSASVAWLRSGDLFGETEGFVCAIMDEVMMTNNYRRFIVKDGTVDICRACHRPGESIRHIISGCSRLANGEYLHRHNLVARIIHQQLALKYNLVESEVPYYRYVPDPVLDNGCITLYWDQSIITDRTIVANKPDIVVVDRSERRAMIVDITVPHDENLVKAEKDKQIKYLDLAREVVDMWEVDSAIIVPIVVSAHGLIAKSLDQYLRRLSLGSWIKGLIQKAVLLDTARIVRRFLSLEP

SEQ ID NO: 11343 - protein, 1202 aa, Cosmia trapezina
MKMLTRSATRRARLPPPDSSLSSASPPPVPSLTVNAVSTPAAVVASSSSDEYFSPPTTPPPVRRRGGRRPPDGLGPRGPPASDRVPAPGGSVQRMRWTRSINENVMRSYYGATEGGNNLTAYRVRMHSLFQVLEPALNVSAQRLSDQVRVIQRNHMLDDTVLDRLRSEMQSSRVIAPLSQTIVAPPPPQYNTIQADEGSDGTAANVSTQCNEELRSALEGAIQEYRFVSPELRPRLPRLPMHNKNRALVAALDSQLSNYFDDCEDLTDTHSILYCAAVAACRVAHVKFANDSRAIRPKPAVPAWQCRIERRIGGARALIGKLICFREGNTRPRVMRFVRRAFSGTDVSPQDYMSRVTERIDFLRQKVYAWANRIRRYKRRVDRYTQNRTFQSDERWVYRGWERPDQGVADTRLPDDDAMCSFWRSIWSVPVSHTEGDWTREVERACDPIPEMGAITICPQDVARAVRPLPNWKSPGPDGLHNFWIKWFRGSHARLAAQYQSALQSGSLPQFLTTGITHLLHKSGSTAEPKNYRPITCLPTVYKVLTSILRAKINEHIDTNSIMSASQNGSRNGSRGTKELLLIDMAISQQVRRSRKDLSTCWIDYKKAYDSVPHTWLMRVLELYKVDATLRTFLMSCMEQWRTVLRYPGCRNIQRNSEPIRIERGIFQGDSLSPLWFCLALNPLSTLLEDSGLGYRLRRGGQVISHLLYMDDLKLFAPNNLQLMELLKVTETFSNAIRMEFGVDKCAVMHVKRGEIVESVGTQLSDSINLRTLSASETYKYLGMSEALGINVADMKQSLRERFFGRLKKVFNSLLSGGNKVRAFNGWVMPVLMYSFGILKWTQTELDALDRRVRTLLTAYRMHHPRSSVMRLYIPRKCGGRGFLNAKTLHNREICSLREYFLEADVGMHRDVVAVDKGLTPLSLAKENWRKPVVLDTNDRMEVWQSKELHGRFFRALHGPDVDLLASVAWLRSGDLFGETEGFVCAIMDEVIMTNNYRRFIVKDGTVDICRACHRPGESIRHIISGCSRLANEEYLHRHNLVARIIHQQLALKYSLVESEVPYYRYVPDPVLENGNITLYWDRSIITDRTIVANKPDIVVVDRTERRAMVIDITVPHDGNLVKAEKDKQIKYLDLAREVVDMWDVDSAIIVPIVVSANGLIAKSLDQHLRRLSLGSWIKGLIQKAVLLDTARIVRRFLSLEP

SEQ ID NO: 11344 - protein, 1200 aa, Cosmia trapezina
MLTRSATRKARLPPPDSSLSSASPPPVPSLTVSAVSTPAAVVASSSSDEYFSPPTTPPPARRRGGRRPPDGLGPRGPPASDRVPAPGGSVQRMRWTRAINENVMRSYYGATEGGNNLTAYRVRMHSLFQVLEPALNVSAQRLSDQVRVIQRNHMLDDTVLDRLRNEMQSSRVIAPLSQTIVAPPPPQCNTTQADEGSDGTAAHVSTQCNEELRSALEGAIQEYRFVSPELRPRLPRLPMHNKNRALVAALDSQLSNYFDDCEDLTDTHSILYCAAVAACRVAHVKFANDSRATRPKPAVPAWQCRIERRIGGARALIGKLICFREGNTRPRVMRFVKRAFSGTDVSPQDYMSRVTERIDFLRQKVYAWANRIRRYKRRVDRYTQNRTFQSDERWVYRGWERPDQGVTDTRLPDDDAMCSFWRSIWSVPVSHTEGDWAREVRRACDPIPEMGAITICPQDVARAVRPLPNWKSPGPDGLHNFWIKWFLGSHARLAAQYQSALQSGSLPQFLTTGITHLLHKSGSTTEPKNYRPITCLPTVYKVLTSILRAKINEHIDTNSIMSASQNGSRNGSRGTKELLLIDMAISQQVRRSRRDLSTCWIDYKKAYDSVPHTWLMRVLELYKVDATLRTFLMSCMGQWRTVLRYPGCRNIQRNSEPIRIERGIFQGDSLSPLWFCLALNPLSTLLENSGLGYRLRRGGQVISHLLYMDDLKLFAPSNLQLMELLKVTETFSSAIRMEFGVDKCAVMHVKRGEIVESVGTQLPDSINLRTLSATETYKYLGMSEALGINVADMKQSLKERFFGRLKKVFNSLLSGGNKVRAFNGWVMPVLMYSFGILKWTQTELDALDRRVRTLLTAYRMHHPRSSVMRLYIPRKCGGRGFLNAKTLHNREICSLREYFLETDVGMHRDVVAVDKGLTPLSLAKENWRKPVVLDANDRMEVWQSKELHGRFFRALHGPDVNLLASVAWLRSGDLFGETEGFVCAIMDEVIMTNNYRRFIVKDGTVDICRACHRPGESIRHIISGCSRLANEEYLHRHNLVARIIHQQLALKYSLVESEVPYYRYVPDPVLENGHITLYWDRSIITDRTIVANKPDIVVVDRTERRAMIVDITVPHDGNLVKAEKDKQIKYIDLAREVVDMWDVDSAVIVPIVVSANGLIAKSLDQHLRRLSLGSWIKGLIQKAVLLDTARIVRRFLSLEP

SEQ ID NO: 11345 - protein, 1204 aa, Cosmia trapezina
MMQTRTKTRIQAHPPSPDSSLSSASQPVRASTVSAVSPVAAVASSSSDEFFSPPSSPTPPRRRGRGRPPAGLGPRGQPAPNRVPAAGGNVSRMRWTQSINENVMRAYYGATEGGINLTAYRGRMLSLFQVLEPAVNVSAQRLSDQVRVIQHNHRLDNATLDRLRSEMQSSSASNPPPSQNVMHVPAEIPLRANQRDEEENARAISADNLCNVEIRSALEDAIREYRFTSPDLRPRLPRLPMNKKNRALVCALDALLPNFIESSADLCDTHSILYCTAVAACRVACVKFPNTDRATRPKPAAPAWQCRIERRINEARVLIGKLICFREGNTRPRVMRFVRRAFSGTNVSPQEYVSRVTERIDFLKQKVYAWANRIRRYRRRVDRYSQNRMFQSDERWVYRAWERPIPTQGVTDVRPPDNETMSAFWRSIWSVPVSHTEGDWMRIVEQACDSIPNMDAVTISPLDVACAVRPLPNWKSPGPDGLHNFWIKWLQRSHACLASQFQSSLETGSLPLLFTTGVTHLLHKSGSTAEPKNYRPITCLPTVYKVLTSILRAKIAHHIYNNSIMSVSQNGCRNGSRGTKELLLIDMTISQQVRRSRKDLSTCWIDYKKAYDSVPHTWLIRVLELYKIDATLRTFLMSCMGQWKTVLLYPGCRRIPGIDEPIRIERGIFQGDSLSPLWFCLALNPLSTLLEDSGLGYRLRRGGQVISHLLYMDDLKLFAPNNLRLMELLKVTENFSSAIRMEFGVDKCAVMHVKRGEIMESVGTQLSDSIHLRSLSSTETYKYLGMSEALGINVADMKQSLKERFFGRLKKVFNSLLSGGNKVRAFNGWVMPVLMYSFGVLKWTQTELDALDRRVRTLLTAYRMHHPRSSVMRLYIPRKCGGRGFLNAKTLHNREICSLREYFLEADVGMHRDVVAVDKGLTPLSLAKENWRKPAVLDTNDRREVWQGKELHGRFFRALHGPDVDFLASVSWLRFGDLFGETEGFVCAIMDEVIMTNNYRKYIVKDGTVDICRACHHPGESIRHIVSGCSRLANGEYLHRHNLVARIIHQQLALQYNLVESEVPYYRYVPDPVLENGQATLYWDRSIITDRTIVANKPDIVVIHRRERRAIIVDIAVPHDENLVKAEKDKKIKYLDLAHEVVDMWDVDSAIIVPIIVTVNGLIAQSLDQHLRRLSLRGWIKGLIQRAVLLDTARIVRRFLSLEP

SEQ ID NO: 11346 - protein, 1203 aa, Cosmia trapezina
MNMNMKMLTRSATRRARLPPPDSSLSSASPPPVPSLTVNAVSTPAAVVASSSSDEYFSPPTTPPPARRRGGRRPPDGLGPRGPPASDRVPAPGGSVQRMRWTRAINENVMRSYYGATEGGNNLTAYRVRMHSLFQVLEPALNVSAQRLSDQVRVIQRNHMLDDTVLDRLRSEMQSSRVIAPLSQTIVAPQCSTSQADEGSDGTAANVSTQCNEELRSALEGAIQEYRFVSPELRPRLPRLPMHNKNRALVAALDSQLSNYFDDCEDLTDTHSILYCAAVAACRVAHVKFANDSKATRPKPAVPAWQCRIERRIGGARALIGKLICFREGNTRPRVMRFVRRAFSGTDVSPQDYISRVTERIDFLRQKVYAWANRIRRYKRRVDRYTQNRTFQSDERWVYRGWERPDQGVADTRLPDDDAMCSFWRSIWSVPVSHTEGDLTREVERACDPIPEMGAITICPQDVARAVRPLPNWKSPGPDGLHNFWIKWFRGSHARLAAQYQSALQSGSLPQFLTTGITHLLHKSGSTAEPKNYRPITCLPTVYKVLTSILRAKINEHIDTNSIMSASQNGSRNGSRGTKELLLIDMAISQQVRRSRKDLSTCWIDYKKAYDSVPHTWLMRVLELYKVDATLRTFLMSCMEQWRTVLRYPGCRNIQRNSEPIRIERGIFQGDSLSPLWFCLALNPLSTLLEDSGLGYRLRRGGQVISHLLYMDDLKLFAPNNLQLMELLKVTETFSSAIRMEFGVDKCAVMHVKRGEIVESVGTQLSDSINLRTLSASETYKYLGMSEALGINVADMKQSLRERFFGRLKKVFNSLLSGGNKVRAFNGWVMPVLMYSFGILKWTQTELDALDRRVRTLLTAYRMHHPRSSVMRLYIPRKCGGRGFLNAKTLHNREICSLREYFLEADVGMHRDVVAVDKGLTPLSLAKENWRKPVVLDTNDRMEVWQSKELHGRFFRALHGPDVDLLASVAWLRSGDLFGETEGFVCAIMDEVIMTNNYRRFIVKDGTVDICRACHRPGESIGHIISGCSRLANEEYLHRHNLVARIIHQQLALKYSLVESEVPYYRYVPDPVLENGNITLYWDRSIITDRTIVANKPDIVVVDRTERRAMVIDITVPHDGNLVKAEKDKQIKYLDLAREVVDMWDVDSAIIVPIVVSANGLIAKSLDQHLRRLSLGSWIKGLIQKAVLLDTARIVRRFLSLEP

SEQ ID NO: 11347 - protein, 984 aa, Mamestra brassicae
MIIIIIITHTHTPPELRPRLPRLPMHNKNRALVCALDSQLANCFDSSEDLADTHSILYCAAAAACRVAHVKFPNSDRATRPAVPAWQCRIERRIGEARALIGKLICFREGNTRRRVMRFVRRAFSGTDTSPRDYLTRVTERIDFLKQKIYAWANRIRRYKRRVERYTQNRTFQSNERWVYRAWERPDQGVTDTRLPDDDVMCSFWRNIWSVPVSHTEGDWTREVERACDPIPEMGAITISPQDVARAVRPLPNWKSPGPDGLHNFWIKWFKRSHARLASQFQSALESGSLPQFLTTGITHLLHKSGSTAEPKNYRPITCLPTVYKVLTSILRAKINQHIETNSIMSASQNGCRNRSHGTKELLLIDVAISQQVRRSRRDLSTCWIDYKKAYDSVPHTWLMRVLELYKVDAVLRTFLMSCMGQWRTVLRYPGCRQIQANSDPIRIERGIFQGDSLSPLWFCLALNPLSTLLEGSGQGYRLRRGGQVISHLLYMDDLKLFAPNNLQLMKLLKVTETFSSAISMEFGVDKCAVMHVKRGEIMESVGTQLSDSIHLRSLSSTETYKYLGMSEALGINANDVKQSLKERFFGRLNKVLNSLLSGGNKVRAFNGWVMPVLMYSFAILKWTQTELDALDRRVRSLLTANRMHHPRSSVMRLYIPRKCGGRGFLNAKTLHNREICSLREFFLEADVGMHRDVVAVDKGLTALSLANENWRKPVVLDTNDRREVWQSKELHGRFYRVLHGPDVDFLASVAWLRFGDLFGETEGFVCAIMDEVMMTNNYRKYIVKDGTVDICRACHRPGESIRHIISGCSSLANGDYLHRHNLVARIIHQQLALKYNLVESEVPYYRYVPDPVLENGNCTLYWDRSIITDRTIIANKPDIVVIDRLERRAMIVDIAVPHDVNLVKTEKDKQTKYLDLAREVVDMWDVNTAVIVPIVVTANGIIGKSLDQHLKRLSLGSWIKGLIQKAVLLDTARIVRRFLSQGP

SEQ ID NO: 11348 - protein, 983 aa, Mamestra brassicae
MAAGGYNNKYRYIPPELRPRLPRLPMHNKNRALVAALNSQLSNYFDDCEDLTDTHSIMYCAAVAACRVAHVKMTNDRVTRPKPAVPAWQCRIERRIGGARALIGKLICFREGNTRPRVMRFVRRAFSGTDISPRDYMSRVTERIDFLKQKVYAWANRIRRYRRRVERYTQNRTFRSNERWVYRVWDHGVTDTRLPDDDAMCSFWRNIWSVPVSHTEGDWIREVERACDPLPEMGAITISPQDVARAVRPLPNWKSPGPDGLHNFWIKWLQRSHARLASQYQSALESGSLPKFLTTGVTHLLHKSGSTAEPKNYRPITCLPTVYKVLTSILRAKINNHINSSNIMSVSQNGCRNGSRGTKELLLIDMAISQQVRRSRKDLSTCWIDYKKAYDSVPHTWLRRVLELYKIDTMLRTFLMSCMGQWMTVLRYPGCRNIQRNSEPVRIERGIFQGDSLSPLWFCLALNPLSTLLENSGLGYRLKRGGQVISHLLYMDDLKLFAPSNLQLMELLKVTETFSSAIRMEFGVDKCAVMHVKRGEIMESVGIQLSDSINLRSLSSTETYKYLGMSEALGINVTDMKQSLKERFFGRLKKVFNSLLSGGNKVRAFNGWVMPVLMYSFGVLKWTQTELDVLDRRVRTLLTAYRMHHPRSSVMRLYIPRKCGGRGFLNAKTLHNREICSLREYFLAVDVGIHRDVVAVDKGLTPLSLANENWRKPAVLDTDDRRAVWQSKELHGRYFRALHGPDVDQLASVAWLRFDDLFGETEGFVCAIMDEVIMTNNYRRLIVKDGTVDICRACHRPGESIRHIVSGCSRLANGEYLHRHNLVARIIHQQLALKYSLVESEVPYYRYAPDPVLDNGNVTLYWNRSIITDRTIVANKPDIVVVDRIERRAMIVDITVPHDENLVKAEKDKQIKYIDLAREVVDMWDVDSAIIVPIVVSANGLIATSLDQHLRMLSLGSWIKGLIQKAVLLDTARIVRRFLSLEP

SEQ ID NO: 11349 - protein, 1198 aa, Mamestra brassicae
MLTRAAARQARLPPPASSLSSASPPPEPSPTVSAVIPAVAVASSSSEEYFSPPTSPLPARRRRGRRPPDGLGPRGPPASDRVPAPGGSVQRMRWTQTINENVMRSYYGATEGGTNLTAYRGRMLSLFQVLEPAVNVSAQRLSDQVRVILRNRMLDDAVLDRLRLESRSGRVSPASPPAAVQIQSSVSPRPNNVGEDDDDGAISVSTHCNERLRSALEDAFREYRSTPPEFRPRLPRLPMHNKNKALVCALDSQLTNCFDSSEDLADTHSILYCAAAAACRVAHVKFPKSDRATRPAVPAWQCRIERRIGEARALIGKLICFREGNTRRRVMRFVRRAFSGTDTSPRDYLTRVTERIDFLKQKIYAWANRIRRYKRRVERYTQNRTFQSNERWVYRAWERPDQGVTDTRLPDDDVMCSFWRNIWSVPVSHTEGDWTREVERACDPIPEMGAITISPQDVARAVRPLPNWKSPGPDGLHNFWIKWFKRSRARLASQFQSALESGSLPQFLTTGITHLLHKSGSTAVPQNYRPITCLPTVYKVLTSILRAKINSHIETNSIMSASQNGCRNRSRGTKELLLMDIAISQQVRRSRRDLSTCWIDYKKAYDSVPHTWLMRVLELYKVDAVLRTFLMSCMGQWRTVLRYPGCRQIQVNSDPIRIERGIFQGDSLSPLWFCLALNPLSTLLEGSGQGYRLRRGGQVISHLLYMDDLKLFAPNNLQLMKLLKVTETFSSAISMEFGVDKCAVMHVKRGEIMESVRTQLSDSINLRSFSSTETYKYLGMSEALGISVSNVKQSLKERFFGRLNKVLNSLLSGGNKVRAFNGWVMPVLMYSFGILKWTQTELDALDRRVRSLLTANRMHHPRSSVMRLYIPRKCGGRGFLNAKTLHNREICNLREFFLEADVGMHRDVVAVDKGLTALSLANENWRKPVVLDTNDRREVWQSKELHGRFYRVLHGPDVDFLASVAWLRFGDLFVETEGFVCAIMDEVMMTNNYRKYIVKDGTVDICRACYRPGESIRHIISGCSSLANGDYLHRHNLVARIIHQQLALKYNLVESEVPYYRYVPDPVLENGNCTLYWDRSIITDRTIVANKPDIVVIDRLERRAMIVDIAVPHDANLVKSEKDKQTKYVDLAREVVDMWDVYTAVIVPIVVTANGIIAKSLDQHLKRLSLGSWIKGLIQKAVLLDTARIVRRFLSQGP

SEQ ID NO: 11350 - protein, 1200 aa, Mamestra brassicae
MLTRSRARAQTAQPTSSGSSLSSASQPPGPAPAVSPEIPVAAVASSSSDEYFSPPTTPPPARRRGRGRPPTSLGPRGPPASDRVPAIGGSVQRMRWTQTINENVMRSYYGATEGGTNLTAYRGRMLSLFQVLEPAVNVSAQRLSDQVRVILRNRMLDDAVLDRLRLESRSGRVSPASPPAAVEIQSSISPRPNNVGEDDDDVAISVSTQCNERLRSALEDAFREYRSTPPELRPRLPRLPMHNKNRALVCALDSQLTNCFDSSEDLADTHSILYCAAAAACRVAHVKFLNSDRATRPAVPAWQCRIERRIGEARALIGKLICFREGNTRRRVMRFVRRAFSGTDTSPRDYLTRVTERIDFLKQKIYAWANRIRRYKRRVERYTQNRTFQSNERWVYRAWERPDQGVTDTRLPDDDVMCSFWRNIWSVPVSHTEGDWIREVERACDPILEMGAITISPQDVARAVRPLPNWKSPGPDGLHNFWIKWFTGSHVRLASQFQSALESGSLPQFLTTGITHLLHKSGSTAEPKNYRPITCLPTVYKVLTSILRAKINHHIESNSIMSASQNGCRNGSRGTKELLLMDIAISQQVRRSRKDLSTCWIDYKKAYDSVPHTWLMRVLELYKVDAVLRTFLMSCMGQWRTVLRYPGCRQIQVNSDPIRIERGIFQGDSLSPLWFCLALNPLSTLLEGSGQGYRLRRGGQVISHLLYMDDLKLFAPNNLQLMELLKVTETFSSAISMEFGVDKCAVMHVKRGEIMESVGTQLSDSIHLRSLSSTETYKYLGMSEALGINANDMKQSLKERFFGRLNKVLNSLLSGGNKVRAFNGWVMPVLMYSFGILKWTQTELDALDRRVRSLLTANRMHHPRSSVMRLYIPRKCGGRGFLNAKTLHNREICSLREFFLEADVGMHRDVVAVDKGLTALSLANENWRKPVILDTNDRREVWQSKELHGRFYRVLHGPDVDFLASVAWLRFGDLFGETEGFVCAIMDEVMMTNNYRKYIVKDGTVDICRACHRPGESIRHIISGCPSLANGDYLHRHNLVARIIHQQLALKYNLVESEVPYYRYVPDPVLENGNCTLYWDRSIITDRTIVANKPDIVVIDRLERRAMIVDIAVPHDENLVKTEKDKQTKYLDLAREVVDMWDVTTAVIVPIVVTANGIIAKSLDQHLKRLSLGSWIKGLIQKAVLLDTARIVRRFLSQGP

SEQ ID NO: 11351 - protein, 1200 aa, Mamestra brassicae
MLTRSRARAQTAQPTSSGSSLSSASQPPGPAPAVSPEIPVAAVASSSSDEYFSPPTTPPPARRRGRGRPPTSLGPRGPPASDRVPAIGGSVQRMRWTQTINENVMRSYYGATEGGTNLTAYRGRMLSLFQVLEPAVNVSAQRLSDQVRVILRNRMLDDAVLDRLRLESRSGRVSPASPPAAVEIQSSISPRPNNVGEDDDDGAISVSTQCNERLRSALEDAFREYRSTPPELRPRLPRLPMHNKNRALVCALDSQLTNCFDSSEDLADTHSILYCAAAAACRVAHVKFLNSDRATRPAVPAWQCRIERRIGEARALIGKLICFREGNTRRRVMRFVRRAFSGTDTSPRDYLTRVTERIDFLKQKIYAWANRIRRYKRRVERYTQNRTFQSNERWVYRAWERPDQGVTDTRLPDDDVMCSFWRNIWSVPVSHTEGDWIREVERACDPILEMGAITISPQDVARAVRPLPNWKSPGPDGLHNFWIKWFTGSHVRLASQFQSALESGSLPQFLTTGITHLLHKSGSTAEPKNYRPITCLPTVYKVLTSILRAKINHHIESNSIMSASQNGCRNGSRGTKELLLMDIAISQQVRRSRKDLSTCWIDYKKAYDSVPHTWLMRVLELYKVDTMLRTFLMSCMGQWRTVLRYPGCRQIQVNGDPIRIERGIFQGDSLSPLWFCLALNPLSTLLEGSGQGYRLRRSGQVISHLLYMDDLKLFAPNNLQLMELLKVTETFSSAISMEFGVDKCAVMHVKRGEIMESVGTQLSDSIHLRSLSSTETYKYLGMSEALGINANDMKQSLKERFFGRLNKVLNSLLSGGNKVRAFNGWVMPVLMYSFGILKWTQTELDALDRRVRSLLTANRMHHPRSSVMRLYIPRKCGGRGFLNAKTLHNREICSLREFFLEADVGMHRDVVAVDKGLTALSLANENWRKPVILDTNDRREVWQSKELHGRFYRVLHGPDVDFLASVAWLRFGDLFGETEGFVCAIMDEVMMTNNYRKYIVKDGTVDICRACHRPGESIRHIISGCPSLANGDYLHRHNLVARIIHQQLALKYNLVESEVPYYRYVPDPVLENGNCTLYWDRSIITDRTIVANKPDIVVIDRLERRAMIVDIAVPHDENLVKTEKDKQTKYLDLAREVVDMWDVNTAVIVPIVVTANGIIAKSLDQHLKRLSLGSWIKGLIQKAVLLDTARIVRRFLSQGP

SEQ ID NO: 11352 - protein, 1197 aa, Mamestra brassicae
MLTRSRARHLATHPSPSASSLSSASPPPEPSPTVSAVTPAVAVASSSSDEYFSPPTTPPPARRRRGRRPPDGLGPRGPPASDRVPAPGGSVQRMRWTQSINENVMRSYFGATEGGTNLTAYRGRMLSLFQVLEPAVNVSAQRLSDQVRVIQRYRMLDDSVLDRLRMEMCGHVITPPSQTVAPPQSQISSHADEESNDRVTNVSTQCNEELRSALECAIREYRYIPPELRPRLPRLPMHNKNRALVAALDSQLSNYFDDCEDLTDTHSIMYCAAVAACRVAHVKMTNDRVTRPKPAVPAWQCRIERRIGGARALIGKLICFREGNTRPRVMRFVRRAFSGTDISPRDYMSRITERIDFLKQKVYAWANRIRRYRRRVERYTQNRTFRSNERWVYRVWEQLDQGVTDTHLPDDDAMCSFWRNIWSVPVSHTEGDWIREVERACDPFPEMGAITISPQDVARAVRPLPNWKSPGPDGLHNFWIKWLQRSHARLASQYQTALESGSLPEFLTTGVTHLLHKSGSTAEPKNYRPITCLPTVYKVLTSILRAKINNHINSSNIMSVSQNGCRNGSRGTKELLLIDMAISQQVRRSRKDLSTCWIDYKKAYDSVPHTWLRRVLELYKIDTMLRTFLMSCMGQWRTVLRYPGCRNIQRNSEPVRIERGIFQGDSLSPLWFCLALNPLSTLLENSGLGYRLKRGGQVISHLLYMDDLKLFAPSNLQLMELLKVTETFSSAIRMEFGVDKCAVMHVKRGEIMESVGIQLSDSINLRSLSSTETYKYLGMSEALGINVTDMKQSLKERFFGRLKKVFNSLLSGGNKVRAFNGWVMPVLMYSFGVLKWTQTELDALDRRVRTLLTAYRMHHPRSSVMRLYIPRKCGGRGFLNAKTLHNREICSLREYFLAVDVGMHRDVVAVDKGLTPLSLANENWRKPAVLDTDDRRAVWQSKELHGRYFRALHRPDVDQLASVAWLRFGDLFGETEGFVCAIMDEVIMTNNYRRFIVKDGTVDICRACHRPGESIRHIVSGCSRLANGEYLHRHNLVARIIHQQLALKYSLVESEVAYYRYAPDPVLDNGNITLYWDRSIITDRTIVANKPDIVVVDRIERRAMIVDITVPHDENLVKAEKDKQIKYIDLAREVVDMWDVDSAIIVPIVVSANGLIATSLDQHLRRLSLGSWIKGLIQKAVLLDTARIVRRFLSLEP

SEQ ID NO: 11353 - protein, 1198 aa, Noctua fimbriata
MLTRSAAARRARLLSPDPSLSSASPPPESSPIVSAVTPAVAVASSSSDEYFSPPTTPPPVRRRGGRRPPDGLGPRGPPASDRVPAPGGSVQRMRWTQSINENVMRSYYGATEGGNNLTAYRVRMLSLFQVLEPAVNVSAQRLSDQVRVIQRNRMLDDTVLDRLRTEMQSSHVITPSAQAVVLPQSSTITNRDNDVSNDMVTNVSTQCNEEMRSALEGAIREYRFMQPDLRPRIPRLPMHNKNRALVAVLDSQLSNYFDNCEDLTDAHSILYCAAVAACRVAHVKFFDDRATRPKPVVPPWQYRIERRIGGARALIGKLICFREGNTRPRVMRFVRRAFSGTDISPRDYMSRITERIDFLKQKVYAWASRIRRYKRRVDRYTQNRTFQRDERWVYRTWERPDQGVADTRIPDDDAMCSFWRSIWSVPVSHTEGEWTRKVERACDLVPEMGAITISPQDVVRAVRPLPNWKSPGPDGLHNFWIKWFTRSHARLAILFQSALESGSLPEFLTTGITHLLHKSGSTAEPKNYRPITCLPTVYKVLTSILRTKINKHIDDNSIMSASQNGCRNGSRGTKELLLIDMAISQQVRRSRRDLSTCWIDYKKAYDSVPHTWLMRVLELYKVDATLRTFLMSCMGQWRTVLRYPGCRQIQRNSEPIRIERGIFQGDSLSPLWFCLALNPLSTLLEDSGLGYQLRRGGQVISHLLYMDDLKLFAPNDLQLMELLKVTETFSSAIRMEFGVDKCAVMHVKRGEIVESVGTQLSDSINLRSLSATETYKYLGMSEALGINVADMKQSLKERFFGRLKKVFNSLLSGGNKVRAFNGWVMPVLMYSFGILKWTQTELDALDRRVRTSLTAYRMHHPRSSVMRLYIPRKCGGRGFLNAKTLHNREICSLREYFLETDVGMQRDVVAVDKGLTPLSLAKENWRKPLVLDTNDRMEVWQSKELHGRFFRALHGPDVDLSASVAWLRSGNLFGETEGFVCAIMDEVMMTNNYRRFIVKDGTVDICRACHRPGESIRHIISGCSRLANGEYLHRHNLVARIIHQQLALKYNFVESEVPYYKYVPDPVLENGSITLYWDQSIITDRTIVANKPDIVVVDRSERRTMIVDITVPHDENLVKAEKDKKIKYLDLAREVVDMWDVDSAIIVPIVVSAHGLIAKSLDQYLRRLSLGSWIKGLIQKAVLLDTARIVRRFLSLEP

SEQ ID NO: 11354 - protein, 1197 aa, Noctua fimbriata
MLTRAAAKRARLSPPDPSLSSASPPPESSPVVSAVTPAVAVASSSSDEYFSPPTTPPPVRRRGGRRPPDGLGPGGPPASDRVPAPGGSVQRMRWTQSINENVMRSYYGATEGGNNLTAYRVRMLSLFQVLEPAVNVSAQRLSDQVRVIQRNRMLDDTVLDRLRTETQSSHVITPSAQAVVLPQSSTIPNRDNDVSNDMVTNVSTQCNEEMRSALEGAIREYRFMQPDLRPRIPRLPMHNKNRALVAVLDSQLSNYFDNCEDLTDAHSILYCAAVAACRIAHVKFSDDRATRPKPAVPPWQYRIERRIGGARALIGKLICFREGNTRPRVMRFVRRAFSGTDISPRDYMSRITERIDFLKQKVYAWASRIRRYKRRVDRYTQNRTFQRDERWVYRTWERPDQGVADTRIPDDDAMCSFWRSIWSVPVSHTEGEWTREVERACDLVPEMGAITISPQDVVRAVRPLPNWKSPGPDGLHNFWIKWFTRSHARLAILFQSALESGSLPEFLTTGITHLLHKSGSTAEPKNYRPITCLPTVYKVLTSILRAKINKHIDDNSIMSASQNGCRNGSRGTKELLLIDMAISQQVRRSRRDLSTCWIDYKKAYDSVPHTWLMRVLELYKVDATLRTFLMSCMGQWRTVLRYPRCWQIQRNSEPIRIERGIFQGDSLSPLWFCLALNPLSTLLEDSGLGYQLRRGGQVISHLLYMDDLKLFAPNDLQLMELLKVTETFSSAIRMEFGVDKCAVMHVKRGEIVESVGTQLSDSINLRSLSATETYKYLGMSEALGINVADMKQSLKERFFGRLKKVFNSLLSGGNKVRAFNGWVMPVLMYSFGILKWTQTELDALDRRVRTLLTAYRMHHPRSSVMRLYIPRKCGGRGFLNAKTLHNREICSLREYFLETDVGMHRDVVAMDKGLTPLSLAKENWRKPLVLDTNDRMEVWQSKELHGRFFRALHGPDVDLSASVAWLRSGDLFGETEGFVCAIMDEVMMTNNYRRFIVKDGTVDICRACHRPGESIRHIISGCSRLANGEYLHRHNLVARIIHQQLALKYNLVESEVPYYKYVPDPVLENGSITLYWDQSIITDRTIVANKPDIVVVDRSERRTMIVDITVPHDENLVKAEKDKKIKYLDLAREVVDMWDVDSAIIVPIVVSAHGLIAKSLDQYLRRLSLGSWIKGLIQKAVLLDTARIVRRFLSLEP

SEQ ID NO: 11355 - protein, 988 aa, Noctua fimbriata
MRSALEGAIREYRFMQPDLRPRIPRLPMHNKNRALVAVLDSQLSNYFDNCEDLTDAHSILYCAAVAACRVAHVKFSNDRATRPKPAVPPWQYRIERRIGGARALIGKLICFREGNTRPRVMRFVRRAFSGTDISPRDYMSRITERIDFLKQKVYAWANRIRRYKRRVDRYTQNRTFQRDERWVYRAWERPDQGVADTRLPDDDAMCSFWRSIWSVPVSHTEGEWTQGVERACDLVPEMGAITISPQDVVRAVRPLPNWKSPGPDGLHNFWIKWFTRSHARLAILFQSALESGSLPEFLTTGITHLLHKSGSTAEPKNYRPITCLPTVYKVLTSILRAKINKHIDDNSIMSASQNGCRNGSRGTKKLLLIDMAISQQVRRSRRDLSTCWIDYKKAYDSVPHTWLMRVLELYKVDATLRTFLMSCMGQWRTVLRYPGCRQIQRNSEPIRIERGIFQGDSLSPLWFCLALNPLSTLLEDSGLGYRLRRGGQVISHLLYMDDLKLFAPNDLQLMELLKVTETFSSAIRMEFGVDKCAVMHVKRGEIVESVGTQLSDSINLRSLSATETYKYLGMSEALGINVADMKQSLKERFFGRLKKVFNSLLSGGNKVRAFNGWVMPGLMYSFGILKWTQTELDALDRRVRTLLTAYRMHHPRSSIMRLYIPRKCGGRGFLNAKTLHNREICSLREYFLETDVGMHRDVVAVDKGLTPLSLAKENWRKPLVLDTNDRMEVWQSKELHGRFFRALHGPDVDLSASVAWLRSGDLFGETEGFVCAIMDEVMMTNNYRRFIVKDGTVDICRACHRPGESIRHIISGCSRLANGEYLHRHNLVARIIHQQLALKYNLVESEVPYYKYVPDPVLENGSITLYWDQSIITDRTIVANKPDIVVVDRSERRTMIVDITVPHDENLVKAEKDKKIKYLDLAREVVDMWDVDSAIIVPIVVSAHGLIAKSLDQYLRRLSLGSWIKGLIQKAVLLDTARIVRRFLSLEP

SEQ ID NO: 11356 - protein, 1198 aa, Noctua fimbriata
MLTRAAAKRARLSPPDPSLSSASPPPESSPVMSAVTPAVAVASSSSDEYFSPPTTPPPVRRRGGRRPPDGLGPRGPPASDRVPAPGGSVQRMRWTQSINENVMRSYYGATEGGNNLTAYRVRMLSLFQVLEPAVNVSAQRLSDQVRVIQRNRMLDDTVLDRLRTEMQSSHVIATPPPQAVVPPQSTIIPNRDNDVSNDIVTNVSTQCNEEMRSALEGAIREYRFMQPDLRPRIPRLPMHNKNRALVAVLDSQLSNYFDNCEDLTDAHSILYCAAVAACRVAHVKFSNDRATRPKPAVPPWQYRIERRIGGARALIGKLICFREGNTRPRVMRFVRRVFSGTDISPRDYMSRITERIDFLKQKVYAWANRIRRYKRRVDRYTQNRTFQRDERWVYRAWERPDQGVADTRLPDDDAMCSFWRSIWSVPVSHTEGEWTQGVERACDLVPEMGAITISPQDVVRAVRPLPNWKSPGPDGLHNFWIKWFTRSHARLAILFQSALESGSLPEFLTTGITHLLHKSGSTAEPKNYRPITCLPTVYKVLTSILRAKINKHIDDNSIMSASQNGCRNGSRGTKELLLIDMAISQQVRRSRRDLSTCWIDYKKAYDSVPHTWLMRVLELYKVDATLRTFLMSCMGQWRTVLRYPGCRQIQRNSEPIRIERGIFQGDSLSPLWFCLALNPLSTLLEDSGLGYRLRRGGQVISHLLYMDDLKLFAPNDLQLMELLKVTETFSSAIRMEFGVDKCAVMHVKRGEIVESVGTQLSDSINLRSLSATETYKYLGMSEALGINVADMKQSLKERFFGRLKKVFNSLLSGGNKVRAFNGWVMPVLMYSFGILKWTQTELDALDRRVRTLLTAYRMHHPRSSIMRLYIPRKCGGRGFLNAKTLHNREICSLREYFLETDVGMHRDMVAVDKGLTPLSLAKENWRKPLVLDTNDRMEVWQSKELHGRFFRALHGPDVDLSASVAWLRSGDLFGETEGFVCAIMDEVMMTNNYRRFIVKDGTVDICRACHRPGESIRHIISGCSRLANGEYLHRHNLVARIIHQQLALKYNLVESEVPYYKYVPDPVLENGSITLYWDQSIITDRTIVANKPDIVVVDRSERRTMIVDITVPHDENLVKAEKDKKIKYLDLAREVVDMWDVDSAIIVPIVVSAHGLIAKSLDQYLRRLSLGSWIKGLIQKAVLLDTARIVRRFLSLEP

SEQ ID NO: 11357 - protein, 988 aa, Noctua fimbriata
MRSALEGAIREYRFMQPDLRPHIPRLPMHNKNRALVAVLDSQLSNYFDNCEHLTDAHSILYCAALAACRVAHVKFFDDRATRPKPVVPPWQYRIERRIGGARALIGKLICFREGNTRPRVMRFVRRAFSGTDISPRDYLSRITERIDFLKQKVYAWASRIRRYKRRVDRYTQNRTFQRDERWVYRVWERPDQGVADTRIPDDDAMCSFWRSIWSVPVSHTEGEWTREVERACNLVPEMGAITISPQDVVRAVRPLPNWKSPGPDGLHNFWIKWFTRSHARLAILFQSALESGSLPEFLTTGITHLLHKLGSTAEPKNYRPITCLPTVYKVLTSILRAKINKHIDDNSIMSASQNGGRNGSRGTKELLLIDMAISQQVRTSRRDLSTCWIDYKKAYDSVPHTWLMRVLELYKVDATLRTFLMSCMGQWRTVLRYPGCRQIQRNSEPIRIERGIFQGDSLSPLWFCLALNPLSTLLEDSGLGYRLRKDGQVISHLLYMDDLKLFSPNDLQLMELLKVTEIFSSAIRMEFGVDKCAVTHVKRGEIVESVGTQLSDSINLRSLSATETYKYLGMSEALGINVADMKQSLKERFFGRLKKVFNSLLSGGNKVRAFNGWVMPVLMYSFGILKWTQAELDALDRRVRPLLTAYRMHHPRSSVMRLYIPRKCGGRGFLNAKTLHNREICSLREYFLETDVGIHRDVVAVDKGLTPLSLAKENWHKPVVLDTNDRMEVWQSKELHGRFFRALHGPDVDLSASVAWLRSGDLFEGTEGFICAIMDEVMMTNNYRRFIVKDGTVDICRACHRPGESIRHIISGCSRLANGEYLHRHNLVARIIHQQLALKYNLVESEVPYYKYVPDPVLENGSITLYWDQSIITDRTIVANKPDIVVVDRSERRTMIIDITVPHDENLVKAEKDKKIKYLDLAREVVDMWDVDSAIIVPIVVSAHGLIAKSLDQYLRRLSLGSWIKGLIQKAVLLDTARIVRRFLSLEP

SEQ ID NO: 11358 - protein, 1198 aa, Atethmia centrago
MLTRSAAVRARLPPPDSSLSSASPPPVPSPTVCAVTTPTAAVASSSSDEYFSPPTTPPPVRRRGGRRPPDGLGSRGPPASDRVPAPGGSVKRMRWTQSVNENVMRSYYGATEGGNNLTAYRVRMLSLFQVLEPAVNVSAQRLSDQVRVIQRNHMLDDTVLDRLRSEMQRSHVIVPPSQTVVHSPQLSTNQADEGSDDRATNVSTQCNVELRSALEDAIREYRLMSPELRPRLPRLPMHKKNRVLVAALDSQLSNYFDDCEDLTDTHSILYCAAVAVCRVAHVKFAKDSRTTRPKPTVPAWQCRIESRIGGARALIGKLICFREGNTRPRVMRFVRRAFSGTDIGPQDYMTRVTERIDFLKQKVYAWANRIRRYKRRVERYTQNRTFQSDERWVYRGWERPDQDVTDTRLPDDDVMCSFWRSIWSVPVSHTEGDWARKVERACDPIPEMGAITICPQDVARAVRPLPNWKSPGPDGLHNFWLKWFLRSHARLAAQYQTALESGSLPQFLTTGVTHLLHKSGSTAEPKNYRPITCLPTVYKLLTSILRAKINKHIDTNSIMSASQNGCRNGSRGTKELLLIDMTISQQVRRSRKDLSTCWIDYKKAYDSVPHTWLMRVLELYKVDATLRTFLISCMGQWRTVLRYPGCRNIQRNSEPIRIERGIFQGDSLSPLWFCLALNPLSTLLEDSGLGYRMRRGGQVISHLLYMDDLKLFASNNLQLMELLKITESFSSAIRMEFGVDKCAVMHVKRGKIVESVGTQLSDSINLRTLSASETYKYLGMSEALGINVTDMKQSLKERFFGRLKKVFNSLLSGGNKVRAFNGWVMPVLMYSFGILKWTQTELDALDRRVRTLLTAYRMHHPRSSVMRLYIPRKCGGRGFLNAKILHNREVCSLREYFLEANVGMHRDVVAVDKGLTPLSLAKENWRKLVVLDTNDRREVWQSKELHGRFFRALHEPDVDFQASVAWLRFGDLFGETEGFVCAIMDEVIMTKNYRRFIVKDGTVDVCRACHRPGESIRHIISGCSRLANEEYLHRHNLVARIIHQQLALKYSLVESEVPYYRYVPDPVLDNGNITLYWDRSIITDRTIVANKPDIVVVDRTERRAMIVDITVPHDGNLVKAEKDKQIKYLDLAREVVDMWDVDSAIIVPIVVSANGLIAKSLDQHLKRLTLDGWIKGLIQKAVLLDTARIVRRFLSLEP

SEQ ID NO: 11359 - protein, 868 aa, Atethmia centrago
MRFVRRAFSGTDIGPQDYMTRVTERIDFLKQKVYAWANRIRRYKRRVERYTQNRTFQSDERWVYRGWERPDQDVTDTRLPDDDVMCSFWRSIWSVPVSHTEGDWARKVERACDPIPEMGAITICPQDVARAVRPLPNWKSPGPDGLHNFWLKWFLRSHARLAAQYQTALESGSLPQFLTTGVTHLLHKSGSTAEPKNYRPITCLPTVYKLLTSILRAKINKHIDTNSIMSASQNGCRNGSRGTKELLLIDMTISQQVRRSRKDLSTCWIDYKKAYDSVPHTWLMRVLELYKVDATLRTFLISCMGQWRTVLRYPGCRNIQRNSEPIRIERGIFQGDSLSPLWFCLALNPLSTLLEDSGLGYRMRRGGQVISHLLYMDDLKLFASNNLQLMELLKITESFSSAIRMEFGVDKCAVMHVKRGKIVESVGTQLSDSINLRTLSASETCKYLGMSEALGINVTDMKQSLKERFFGRLKKVFNSLLSGGNKVRAFNGWVMPVLMYSFGILKWTQTELDALDRRVRTLLTVYRMHHPRSSVMRLYIPRKCGGRGFLNAKILHNREVCSLREYFLEADVGMHRDVVAVDKGLTPLSLAKENWRKLVVLDTNDRREVWQSKELHGRFFRALHEPDVDFQASVAWLRFGDLFGETEGFVCAIMDEVIMTKNYRRFIVKDGTVDVCRACHRPGESIRHIISGCSRLANEEYLHRHNLVARIIHQQLALKYSLVESEVPYYRYVPDPVLDNGNITLYWDRSIITDRTIVANKPDIVVVDRTERRAMIVDITVPHDGNLVKAEKDKQIKYLDLAREVVDMWDVDSAIIVPIVVSANGLIAKSLDQHLKRLTLDGWIKGLIQKAVLLDTARIVRRFLSLEP

SEQ ID NO: 11360 - protein, 1194 aa, Atethmia centrago
MLTRSAARARLPPPDFSLSSASPPPVPNPTVTSPAAVVASSSSDEYFSPPTTPPPVRRRGGHRPPDGLGSRGPPASDRVPAPGGSVQRMRWTRSINENVMRSYYGATEGGNNLTAYRVRMLSLFQVLEPAVNVSAQRLSDQVRVIQRNHMLDDTVLDRLRSETQSGHAIAPPSQTVVVSTQLRTNQADEGSDDRATNVSTQYNVELRSALEDAIREYRFMSPELRPRLPRLPMHKKNRALVAALDSQLSNYFDDCEDLTDTHSILYCAAVAVCRVAHVKFAKDSRATRPKPTVPAWQRRIERRIGGARALIGKLICFREGNTRPRVMRFVRRAFSGTDIGPQDYMSRVTERIDFLKQKVYAWANRIRRYKRRVERYTQNRTFQSDERWVYRGWERPDQGVTGTRLPDDDVMCSFWRSIWSVPVSHTEGDWVREVERACDPIPEMGAITISPQDVARAVRLLPNWKSPGPDGLHNFWLKWFLRSHARLAAQYQTALESGSLPQFLTTGVTHLLHKSGSTAEPKNYRPITCLLTVYKVLTSILRAKINEHIDTNSIMSASQNGCRNGSRGTKELLLIDITITQQVRHSRKDLATCWIDYKKAYDSVPHTWLMRVLELYKVDATLRTFLMSCMGQWRTVLRYPGCRNIQRNSEPIRIERGIFQGDSLSPLWFCLALNPLSTLLEDSGLGYRLRRGSQAISHLLYMDDLKLFASNNLQLMELLKITETFSSAIRMEFGVDKCAVMHVKRGKIMESVGTQLSDSINLRALSASETYKYLGMSEALGINVTDMKQSLKERFFGRLKKVFNSLLSGGNKVRAFNGWVMPVLMYSFGILKWTQTELDALDRRVRTLLTAYRMHHPRSSVMRLYIPRKCGGRGFLNAKTLHNREVCSLREYFLKADVGMHRDVVAVDKGLTPLSLAKENWRKLVVLDTNDRREVWQSKELHGRFFRALHEPDVDFQASVAWLRFGDFFGETEGFVCAIMDEVIMTKNYRRFIVKDGTVDVCRACQRPGESIRHIISGCSRLANEEYLHRHNLVARIIHQQLALKYNLVESEVPYYRYVPDPVLENGNITLYWERSIITDRTIIANKPDIVVVDRTERRAMIVDITVPHDGNLVKAEKDKQIKYLDLAREVVDMWDVNSAIIVPIVISANGLIAKSLDQHLRRLSLDSWIKGLIQRAVLLDTARIVRRFLSLEP

SEQ ID NO: 11361 - protein, 1199 aa, Spilarctia lutea
MLTRARRRAQLSPPDSSLRSALPSPEEAIEVPAGAEASSSSSSDEFFSPPTSPIPVRRQGRGRPPTSLGSRGPLTSNRAPAAGGDVRRMKWTHSINENVMRAYFRATELGTNLTAYRVRLVSLFQELEPAVNVSAQRLSDQVRAIQRCHLLDDAALERIRSDIRNSLTVPSSSHVLNVVTNSTPQVPQNDDISELVDSEIISVSTQYNDRIRSTLEDAIREYRYVNLNNRPRLSRLPIHKRNLALVSALDSLLPKYFSNSEDLSDTHSILYCAAIAVCRVAGVKFAEYTTTTRQENTLPAWQYRIERRIAEARTLIGKLMSFRSGNTRPRVMRFVKRAFLGTTISPQEYMSCVTKRIDFLKQKVYAWANRIRRYRKRVDRYNQNRMFQRNEKWVYRKWENLSPCMSDGQVPDENATNSFWRNMWSVPVTHTEGDWYRDVERSCESLLPMEPISIDEEDVSCAVRSLPNWKAPGPDGLHNFWLKWFRSSHACLASQFQTALDSGSLPQFLTTGITHLLYKSGDAMDPKNFRPITCLPTLYKLPTSILRLKITTHINHNSILSISQNGCRSGTRGTKELLIIDMTISQQVRRNRKSLATCWIDYKKAFDSVPHTWLLRVLELYKIDTTLCTFLRVCMGQWRTALRYPGCRQSAMNDVLIKIERGIFQGDSLSPLWFCLALNPLSTLLEGSGLGYRLQKDDRVISHLFYMDDLKLLAPTKLQLTALLKVTENFSNSIKMEFGVDKCAVMYVKKGEIVESEGIELSDSTKLRSLSATETYKYLGFSQSLGMPESDMKQTLRERFFSRLKKVLKSLLSGGNKVRACNGWVMPVLMYSFGVLRWTQTELDAIDRRVRTLLTAFRMHHPRSSVMRLYIPRRLGGRGLLNIKTLHNREVYNLREYFLQTDVGVHRSVVTVDTGLTPLALAKENWRKPVVLSTNDRREVWKGKELHGRFYRALHGPDIDFKTSTSWLRYGDLFGETEGFVCAIMDEVIMTNNYRKYILRDGTVDICRACHRPGESIRHIISGCSRLANGEYLHRHNQVARIVHQQLALKYHLVNSEVPYYRYVPDPVLENGRATLYWDRSIITDRTIVANKPDIVVIDRLERRAIIIDIAVPHDENLVKVEKEKQIKYLDLSHEIVDMWNVDSVIIVPIVVSAHGLIAKSLDQHLKRLTLEGWIKGLIQKAVLLDTARIVRRFLSLEP

SEQ ID NO: 11362 - protein, 1199 aa, Spilarctia lutea
MLTRARRRAQLSPPDSSLRSALPSPEEAIEVPAGAEASSSSSSDEFFSPPTSPIPVRRQGRGRPPTSLGSRGPLTSNRAPAAGGDVRRMKWTHSINENVMRAYFRATELGTNLTAYRVRLVSLFQELEPAVNVSAQRLSDQVRAIQRCHLLDDAALERIRSDIRNSLTVPSSSHVLNVVTNSTPQVPQNDDISELVDSEIISVSTQYNDRIRSTLEDAIREYRYANLNNRPRLPRLPIHKRNLALVSALDSLLPKYFSNSEDLSDTHSILYCAAIAVCRVAGVKFAEYTTTTRQENTLPAWQYRIERRIAEARTLIGKLMSFRSGNTRPRVMRFVKRAFLGTTISPQEYMSCVTERIDFLKQKVYAWANRIRRYRKRVDRYNQNRMFQRNEKWVYRKWENLSPCMSDGQVPDENATNSFWHNIWSVPVIHTEGDWCRDVERSCESLLPMEPISIDEEDVSCAVRSLPNWKAPGPDGLHNFWLKWFRSSHACLASQFQTALDSGSLPQFLTTGITHFLYKSGDAMDPKNFRPITCLPTLYKLLTSILRLKITTHINHNSILSISQNGCRSRTRGTKELLIIDMTISQQVRRNRKSLATCWIDYKKAFDSVPHTWLLRVLELYKIDTTLCTFLKVCMGQWRTALRYPGCRQSAMNDVLIKIERGIFQGDSLSPLWFCLALNPLSTLLEGSGLGYRLQKDDRVISHLLYMDDLKLLAPTKLQLTALLKVTENFSNSIKMEFGVDKCAVMYVKKGEIVESEGIELSDSTKLRSLSATETYKYLGFSQSLGIPESDMKQTLRERFFSRLKKVLKSLLSGGNKVRACIGWVMPVLMYSFGVLRWTQTELDAIDRRVRTLLTAFRMHHPRSSVMRLYIPRRLGGRGLLNIKTLHNREVYNLREYFLQTDVGVHRSVVTVDTGLTPLALAKENWRKPVVLSTNDRREVWKGKVLHGRFYRALNGPDIDFKASTSWLRYSDLFGETEGFVCAIMDEVIMTNNYRRYILRDGTVDICRACHRPGESIRHIISGCSRLANGEYLHRHNQVARIVHQQLALKYNLVISEVPYYRYVPDPVLENGRATLYWDRSIITDRTIVANKPDIVVIDRLERRAMIVDIAVPHDENLVKVEKEKQIKYLDLSHEIVDMWNVDSVIIVPIVVSAHGLIAKSLDQHLKRLTLGGWIKGLIQKAVLLDTARIVRRFLSLEP

SEQ ID NO: 11363 - protein, 1199 aa, Xestia c-nigrum
MLTRAAARRARLSPPDPSLSSASPPPEPSPIVSAVTPAVAVASSSSDEYFSPPTTPPPARRRGGRRPPDGLGPRGPPASDRVPAPGGSVQRMRWTQSNNENVMRAYYGATEGGINLTAYRVRMLSLFQVLEPAVNVSAQRLSDQVRVIQRNRMLDDTVLDRLRTEVQSSRVTATPPSQAVVPPQSTVTTPYCDGDVSSDMVTNVSTQCSEDMRSALEGAIREYRFMTPELRPRLPRLPMHNKNKMLMAVLDSQLSNYFDSCEDLTDIHSILYCAAVAACRVAHVKFSDDRATRPKPAVPAWQYRIEQRIGGARALIGKLICFREGNTRPRVMRFVRRAFSGTDISPRDYMFRVTERIDFLKQKVYAWASRIRRYKRRVDRYTQNRTFQRDERWVYRAWERPDQGVADTRLPDDDAMCSFWRSIWSVPVSHAEGEWTRVVERACDPVPEMGAITISPQDVACAVRPLPNWKSPGPDGLHNFWIKWFTRSHARLATLFQSALESGSLPEFLTTGITHLLHKSGSTAEPKNYRPITCLPTVYKVLTSILRAKITKHIDENSVMSASQNGCRNGSRGTKELLLIDMAISQQVRRSRKDLSTCWIDYKKAYDSVPHTWLRRVLELYKVDATLRTFLMSCMGQWRTVLRYPGCRQIQRNSEPIRIERGIFQGDSLSPLWFCLALNPLSTLLEDSGLGYQLRKDGRVISHLLYMDDLKLFAPNDLQLMELLKVTETFSSAIRMEFGVDKCAVMHVKRGGIVESVGTQLSDSINLRSLSATETYKYLGMSEALGISVADMKQSLKERFFGRLKKVFNSLLSGGNKVRAFNGWVMPVLMYSFGILKWTQTELDALDTKVRKLLTAYRMHHPRSSVMRLYIPRKCGGRGFLNAKTLHNREICSLREYFLAADVGMHRDVVAMDKGLTPLSLAKENWRIPVVFTTDDRRKEWQSKELHGRFYRALHGPDVDFQASVSWLRSGDLFGETEGFVCAIMDEVMMTNNYRRFIVKDGTVDICRACHRPGESIRHIISGCSRLANGEYLHRHNLVARIIHQQLALKYNLVESEVPYYRYVPDPVLNSGSITLYWDQSIITDRTVIANRPDIVVMDRSERRAMIVDITVPHDENLVKAEKDKQIKYLDLAREVVDMWEVDSAIIVPIVVSAHGLIAKSLDQYLRRLSLGSWIKGLIQKAVLLDTARIVRRFLSLEP

SEQ ID NO: 11364 - protein, 1199 aa, Xestia c-nigrum
MLTRAAARRARLPPPDPSLSSASPPPEPSPIVSAVTPAVAVASSSSDEYFSPPTTPPPARRRGGRRPPDGLGPRGPPASDRVPAPGGSVQRMRWTKSNNENVMRAYYGATEGGINLTAYRVRMLSLFQVLEPAVNVSAQRLSDQVRVIQRNRMLDDAVLDRLRTEVQSSRVTATPPSQAVVPPQSTVTTPYCDGDVSSDMVTNVSTQCSEDMRSALEGAIREYRFMTPELRPRLPRLPMHNKNKMLMAVLDSQLSNYFDSCEDLTDIHSILYCAAVAACRVAHVKFSDDRATRPKPAVPAWQYRIEQRIGGARALIGKLICFREGNTRPRVMRFVRRAFSGTNISPRDYMFRVTERIDFLKQKVYAWASRIRRYKRRVDRYTQNRTFQRDERWVYRAWERPDQGVADTRLPDDDAMCSFWRSIWSVPVSHAEGEWTRVVERACDPVPEMGAITISPQDVACAVRPLPNWKSPGPDGLHNFWIKWFTRSHARLATLFQSALESGSLPEFLTTGITHLLHKSGSTAEPKNYRPITCLPTVYKVLTSILRAKITKHIDENSVMSASQNGCRNGSRGTKELLLIDMAISQQVRRSRKDLSTCWIDYKKAYDSVPHTWLRRVLELYKVDATLRTFLMSCMGQWRTVLRYPGCRQIQRNSEPIRIERGIFQGDSLSPLWFCLALNPLSTLLEDSGLGYRLRKDGRVISHLLYMDDLKLFAPNDFQLMELLKVTETFSSAIRMEFGVDKCAVMHVKRGGIVESVGTQLSDSINLRSLSATETYKYLGMSEALGISVADMKQSLKERFFGRLKKVFNSLLSGGNKVRAFNGWVMPVLMYSFGILKWTQTELDALDTKVRKLLTAYRMHHPRSSVMRLYIPRKCGGRGFLNAKTLHNREICSLREYFLAADVGMHRDVVAMDKGLTPLSLAKENWRIPVVFTTDDRRKEWQSKELHGRFYRALHGPDVDFQGSVSWLRSGDLFGETEGFVCAIMDEVMMTNNYRRFIVKDGTVDICRACHRPGESIRHIISGCSRLANGEYLHRHNLVARIIHQQLALKYNLVESEVPYYRYVPDPVLVNGSITLYWDQSIITDRTVIANRPDIVVMDRSERRAMIVDITVPHDENLVKAEKDKQIKYLDLAREVVDMWEVDSAIIVPIVVSAHGLIAKTLDQHLRRLSLGSWIKGLIQKAVLLDTARIVRRFLSLEP

SEQ ID NO: 11365 - protein, 1198 aa, Griposia aprilina
MLTRSAARRARPPPPDSSLSSASLPPVSSPTVSAVTTPAAVVASSSSDEYFSPPTTPPPVRRRGGHRPPDGLGPRGPPASDRVPAPGGSVQRMRWTRSINENVMRSYYGATEGGNNLTAYRVRMLSLFQVLEPAVNVSAQRLSDQVRVIQRNHMLDDTVLDRLRNEMQSSHVIAPPSQTVVVLPQSNTSQADKESDDRATNVSTQCNDELRSALEDAIREYRFISPELRPRLPRLPMHNKNRVLVAALDAQLSNYFDDCVDLTDTHSILYCAAVAACRVAHVKFANDSRATRPKPAVPAWQCRIERRIGGARALIGKLICFREGNTRPRVMRFVRRAFAGTNISPQDYMSCVTERIDFLKQKVYAWANRIRRYKRRVERYTQNRTFQRDERWVYRGWERPDQGVADTCLPDDDAMCSFWRNIWSVPVSHTEGDWTREVERACDPIPEMGAITICPQDVTRAVRPLPNWKSPGPDGLHNFWIKWFGRSHARLAAQYQVALESGSLPQFLTTGVTHLLHKSGSTAEPKNYRPIACLPTVYKVLTSILRDKINKHIDTNYIMSPSQNGCRNGSRGTKELLLIDMAISQQVRRSRKDLSTCWIDYKKAYDSVPHTWLMRVLELYKVEATLRTFLMSCMGQWRTVLRYPACRNTQRNSEPIRIERGIFQGDSLSPLWFCLALNPLSTLLEDSGLGYRLRRGGQVISHLLYMDDLKLFAPNNSQLMDLLKVTETFSSAIRMEFGVDKCAVMHVKRGEIVESVGTQLSDSINLRALSASETYKYLGMSEALGINGTDMKQSLKDRFFGRLKKVFNSLLSGGNKVRAFNGWVMPVLMYSFGILKWTQTELDALDRKVRTLLTANRMHHPRSSVMRLYIPRKCGGRGFLNAKTLHNREICSLREYFLEADVGMHRDVVTVDKGLTPLSLGKENWRKPVVLDTNDRMEVWQSKELHGRFFRALHGPDVDQLASVAWLRFGDLFGETEGFVCAIMDEVMMTNNYRRFIVKDGTVDICRACHRPGESIRHIISGCSRLANEEYLHRHNLVARIIHQQLALKYSLVESEVPYYRYVPDPVLENGHITLYWDRSIITDRTIVANKPDIVMVDRLERRAMIVDITVPHDGNLVKAEKDKQIKYLDLAREVVDMWDVDSAIIVPIVVTANGLIAKSLDQHLRRLSLGSWIKGLIQKAVLLDTARIVRRFLSLEP

SEQ ID NO: 11366 - protein, 1045 aa, Griposia aprilina
MLDDAVLDRLRNEMQSSHVIAPPSQTVVVLPQSNTSQADEESDDRATNVSTQCNDELRSALEDAIREYRFISPDLRPRLPRLPMHNKNRVLVAALDAQLSNYFDDCVDLTDTHSILYCAAVAVCRVAHVKFANDSRATRPKPAVPAWQCRIERRIGEARALIGKLICFREGNTRPRVMRFVRRAFAGTNISPQDYMSCVTERIDFLKQKVYAWANRIRRYKRRVERYTQNRTFQRDERWVYRGWERPDQGVADTCLPDDDAMCSFWRNIWSVPVSHTEGDWTREVERACDPIPEMGAITICPQDVTRAVRPLPNWKSPGPDGLHNFWIKWFGRSHARLAAQYQVALESGSLPQFLTTGVTHLLHKSGSTAEPKNYRPIACLPTVYKVLTSILRDKINKHIDTNYIMSPSQNGGRNGSRGTKELLLIDMAISQQVRRSRKDLSTCWIDYKKAYDSVPHTWLMRVLELYKVEATLRTFLMSCMRQWRTVLHYPACRNTQRNSEPIRIERGIFQGDSLSPLWFCLALNPLSTLLEDSGLGYRLRRGGQVISHLLYVDDLKLFAPNNSQLMDLLKVTETFSSAIRMEFGVDKCAIMHVKRGEIVESVGTQLSDSINLRALSASETYKYLGMSEALGINGTDMKQSLKDRFFGRLKKVFNSLLSGGNKVRAFNGWVMPVLMYSFGILKWTQTELDALDRKVRTLLTANRMHHPRSSVMRLYIPRKCGGRGFLNAKTLHNREICSLREYFLEADVGMHRDVVTVDKGLTPLSLAKENWRKPVVLDTNDRMEVWQSKELHGRFFRALHGPDVDQLASVAWLRFGDLFGETEGFVCAIMDEVMMTNNYRRFIVKDGTVDICRACHRPGESIRHIISGCSRLANEEYLHRHNLEARIIHQQLALKYSLVESEVPYYRYVPDPVLENGHITLYWDRSIITDRTIVANKPDIVMVDRLERRAMIVDITVPHDGNLVKAEKDKQIKYLDLAREVVDMWDVDSAIIVPIVVTANGLIAKSLDQHLRRLSLGSWIKGLIQKAVLLDTARIVRRFLSLEP

SEQ ID NO: 11367 - protein, 1095 aa, Griposia aprilina
MRSYYGATEGGNNLTAYRVRMLSLFQVLEPAVNVSAQRLSDQVRVIQRNHMLDDTVLDRLRNEMQSSHVIAPPSQTVVVLPQSNTSQADEESDDRATNVSTQCNDELRSALEDAIREYRFISPELRPRLPRLPMHNKNRVLVAALDAQLSNYFDDCVDLTDTHSILYCAAVAACRVAHIKFANDSRPTRPKPAVPAWQCRIERRIGGARALIGKLICFREGNTRPRVMRFVRRAFAGTNISPQDYMSCVTERIDFLKQKVYAWANRIRRYKRRVERYTQNRTFQRDERWVYRGWERPDQGVADTCLPDDDAMCSFWRNIWSVPVSHTEGDWGREVERACDPIPEMGAISICPQDVTRAVRPLPNWKSPGPDGLQNFWIKWFGRSHARLAAQYQVAIESGSLPQFLTTGVTHLLHKSGSTAEPKNYRPITCLPTVYKVLTSILRAKINKHIDTNSIMSPSQNGCRNGSRGTKELLLIDMAISQQVRRSRKDLSTCWIDYKKAYDSVPHTWLVRVLELYKVDATLRTFLKSCMGQWRTILHYPGCRNIQRDNEPIRIERGIFQGDSLSPLWFCLALNPLSTLLEDSGLGYRLRRGGQVISHLLYMDDLKLFAPNNLQLMELLKVTETFSSAIRMEFGVDKCAVMHVKRGEIVESVGTQLSYSINLRALSASDTYKYLGMSEALGINGTDMKQSLKERFFGRLKKVFNSLLSGGNKVRAFNGWVMPVLMYSFGILKWTQTELDALDRKVRTLLTANRMHHPRSSVMRLYIPRKCGGRGFLNAKTLHNREICSLREYFLEADVGMHTDVVKVDKGLTPLSLAKENWRKPVVLDTNDRMEVWQSKELHGRFFRALHEPDVDQLASVAWLRFGDLFGETEGFVCAIMDEVILTNNYRRHIMKDGTVDVCRACHRPGESIRHIISGCSRLANEEYLHRHNLVARIIHQQLALKYSLVESEVPYYRYVPDPVLENGHITLYWDRSIITDRTIVANKPDIVVVDRLERRAMIVDITVPHDGNLVKAEKAKQIKYLDLAREIVDMWDVDSAIIVPIVVTANGLIAKSLDQHLRRLSLGSWIKGLIQKAVLLDTARIVRRFLSLEP

SEQ ID NO: 11368 - protein, 917 aa, Griposia aprilina
MSNLLTILELHDRNQPYQLGSAELSAVLVGPALIGKLICFREGNTRPRVMRFVRRAFAGTDISPQDYMSCVTERIDFLKQKVYAWVNRIRRYKRRVERYTQNRTFQRDERWVYRGWERPDHGVADTCLPDDDAMCSFWRNIWSVPVSHTEGDWTREVERACDPIPEMGAITICPQGVTRAVRPLPNWKSPGPDGLHNFWIKWFGRSHARLAAQYQVALESGSLPQFLTTGVTHLLHKSGSTAEPKNYRPIACLPTVYKVLTSILRDKINKHIDTNYIMSPSQNGCRNGSRGTKELLLIDMAISQQVRRSRKDLSTCWIDYKKAYDSVPHTWLMRVLELYKVEATLRTFLMSCMGQWRTVLRYPACRNTQRNSEPIRIERGIFQGDSLSPLWFCLALNPLSTLLEDSGLGYRLRRGGQVISHLLYMDDLKLFAPNNPQLMDLLKVTVTFSSAIRMEFGVDKCAVMHVKRGEIVESVGTQLSDSINLRALSASETYKYLGMSEALGINGTDMKQSLKDRFFGRLKKVFNSLLSGGNKVRAFNGWVMPVLMYSFGILKWTQTELDALDRKVRTQLTANRMHHPRSSVMRLYIPRKCGGRGFLNAKTLHNREICSLREYFLEADVGMHRDVVTVDKGLTPLSLAKENWRKPVVLDTNDRMEVWQSKELHGRFFRALHGPDVDQLASVAWLRFGDLFGETEGFVCAIMDEVMMTNNYRRFIVKDGTVDICRACHRPGESIRHIISGCSRLANEEYLHRHNLVARIIHQQLALKYSLVESEVPYYRYLLDPVLENGHITLYWDRSIITDRTIVANKPDIVMVDRLERRAMIVDITVPHDGNLVKAEKDKQIKYLDLAREVVDMWDVDSAIIVPIVVTVNGLIAKSLDQHLRRLSLGSWIKGLIQKAVLLDTARIGRRFLSLEP

SEQ ID NO: 11369 - protein, 1199 aa, Griposia aprilina
MMLTRSAKRRAHPPPPDSSLSSASPPPVSSPTVSAVTTPAAVVASSSSDEYFSPPTTPPPVRRRGGHRPPDGLGPRGPPASDRVPAPGGSVQRMRWTRSINENVMRSYYGATEGGNNLTAYRVRMLSLFQVLEPAVNVSAQRLSDQVRVIQRNHMLDDTVLDRLRNEMQSSHVIAPPSQTVVVLPQSNTSQAEEESDDRATNVSTQCNDELRNALEDAIREYRFISPELRPRLPRLPMHNKNRVLVAALDAQLSNYFDDCVDLTDTHSILYCAAVVACRVAHIKFANDSRPTRPKPAVPAWQCRIERRIGGARALIGKLICFREGNTRPRVMRFVRRAFAGTNISPQDYMSCVTERIDFLKQKVYAWANRIRRYKRRVERYTQNRTFQRDERWVYRDWERPDQGVADTCLPDDDAMCSFWRNIWSVPVSHTEGDWGREVERACDPIPEMGAISICPQDVTRAVRPLPNWKSPGPDGLQNFWIKWFGRSHARLAAQYQVAIESGSLPQFLTTGVTHLLHKSGSTAEPKNYRPITCLPTVYKVLTSILRAKINKHIDTNSIMSPSQNGCRNGSRGTKELLLIDMAISQQVRRSRKDLSTCWIDYKKAYDSVPHTWLVRVLELYKVDATLRTFLKSCMGQWRTILHYPGCRNIQRDNEPIRIERGIFQGDSLSPLWFCLALNPLSTLLEDSGLGYRLRRGGQVISHLLYMDDLKLFAPNNLQLMELLKVTETFSSAIRMEFGVDKCAVMHVKRGEIVESVGTQLSYSINLRALSASDTYKYLGMSEALGINGTDMKQSLKERFFGRLKKVFNSLLSGGNKVRAFNGWVMPVLMYSFGILKWTQTELDALDRKVRTLLTANRMHHPRSSVMRLYIPRKCGGRGFLNAKTLHNREICSLREYFLEADVGMHTDVVKVDKGLTPLSLAKENWRKPVVLDTNDRMEVWQSKELHGRFFRALHEPDVDQLASVAWLRFGDLFGETEGFVCAIMDEVILTNNYRRHIMKDGTVDVCRACHRPGESIRHIISGCSRLANEEYLHRHNLVARIIHQQLALKYSLVESEVPYYRYVPDPVLENGHITLYWDRSIITDRTIVANKPDIVVVDRLERRAMIVDITVPHDGNLVKAEKDKQIKYLDLAREVVDMWDVDSAIIVPIVVTANGLIAKSLDQHLRRLSLGSWIKGLIQKAVLLDTARIVRRFLSLEP

SEQ ID NO: 11370 - protein, 1197 aa, Griposia aprilina
MLTRSAALRARLPTPDSSLSSASPPPVSSPIVSAVTTSAAVVASSSSDEYFSPPTTPPPARRRGGHRPPDGLGSRGPPASDRVPAPGGSVQRMRWTQSINENVMRSYYGATEGGNNLTAYRVRMLSLFQVLEPAVNVSAQRLSDQVRVIQRNHMLDDTVLDRLRSEMQSSHVITPPSQTVVVLPQPITSHDEGSDDRATNVSTQCNEELRSALEGAIREYRFMSPELRPRLPRLPMHNKNRALVAALDSQLSNYFDDCVDLTDTHSILYCAAVAACRVAHVKFANDSRATRPKSAVPAWQCRIERRIGGARALIGKLICFREGNTRPRVMRFVRRAFAGTDVSPQDYISCVTERIDFLKQKVYAWASRIRRYKRRVERYTQNRTFQRDERWVYRDWERPDQGVADTCLPDDDAMCSFWHNIWSVPVSHTEGDWTREVERACERIPEMGAITICPQDVARAVRPLPNWKSPGPDGLHNFWIKWFLRSHARLAAQFQAALESGSLPQFLTTGVTHLLHKSGSIAEPKNYRPITCLPTVYKVLTSILRAKINKHIDTNSIMSASQNGCRNGSRGTKELLLIDMAISQQVRRSRKDLSTCWIDYKKAYDSVPHTWLVRVLELYKVEATLRTFLKSCMGQWRTVLRYPTCRNTQRNNEPIRIERGIFQGDSLSPLWFCLALNPLSTLLEDSGLGYRLRRGVRVISHLLYMDDLKLFAPNNLQLIELLKVTETFSSAIRMEFGLDKCAVMHVKRGEIVESVGTQLSDSMNLRALSASETYKYLGMSEALGVNNSDMKQSLKERFFGRLKKVFNSLLSGGNKVRAFNGWVMPVLMYSFGILKWTQTELDTLDRRVRTLLTANRMHHPRSSVMRLYIPRKCGGRGFLNAKTLHNREICSLREYFLEADVGMHRDVVAVDKGLTPLSLAKENWRKPVVLDTNDRMEVWQSKEFHGRFFRALHGPDVDVQASVAWLRFGDLFGETEGFVCAIMDEVMMTNNYRRFIVKDGTVDICRACHRPGESIRHIISGCSRLANEEYLHRHNLVARIIHQQLALKYSFVESEVPYYRYVPDPVLENGTITLYWDRSIITDRTIIANKPDIVLVDRRERRAMIVDITIPHDGNLVKAEKDKQIKYLDLAREVVDMWDVDSAIIVPIVVTANGLIAKSLDQHLRRLSLGSWIKGLIQKAVLLDTARIVRRFLSLEP

SEQ ID NO: 11371 - protein, 1196 aa, Griposia aprilina
MLTRSAARRARPPPPDSSLSSASLPPVSSPTVSAVTTPAAVVASSSSDEYFSPPTTPPPVRRRGGHRPPDGLGPRGPPASDRVPAPGGSVQRMRWTRSINENVMRSYYGATEGGNNLTAYRVRMLSLFQVLEPAVNVSAQRLSDQVRVIQRNHMLDDTVLDRLRNEMQSSHVIAPPSQTVVVLPQSNTSQADEESDDRATNVSTQCNDELRSALEDAIREYRFISPELRPRLPRLPMHNKNRVLVAALDAQLSNYFDDCVDLTDTHSILYCAAVAACRVAHVKFANDSRATRPKPAVPAWQCRIERRIGEARALIGKLICFREGNTRPRVMRFVRRAFAGTNISPQDYISCVTERIDFLKQKVYAWANRIRRYKRRVERYTQNRTFQRDERWVYRGWERPDQGVADTCLPDDDAMCSFWRNIWSVPVSHTEGDWTREVERACDPIPEMGAITICPQDVTRAVRPLPNWKSPGPDGLHNFWIKWFGYARLAAQYQVALESGSLPQFLTTGVTHLLHKSGSTAEPKNYRPIACLPTVYKVLTSILRDKINKHIDTNYIMSPSQNGCRNGSRGTKELLLIDMAISQQVRRSRKDLSTCWIDYKKAYDSVPHTWLMRVLELYKVEATLRTFLMSCMGQWRTVLHYPACRNTQRNSEPIRIERGIFQGDSLSPLWFCLALNPLSTLLEDSGLGYRLRRGGQVISHLLYMDDLKLFAPNNSQLMDLLKVTETFSSAIRMEFGVDKCAVMHVKRGEIVESVGTQLSDSINLRALSASETYKYLGMSEALGINGTDMKQSLKDRFFGRLKKVFNSLLSGGNKVRAFNGWVMPVLMYSFGILKWTQTELDALDRKVRTLLTANRMHHPRSSVMRLYIPRKCGGRGFLNAKTLHNREICSLREYFLEADVGMHRDVVTVDKGLTPLSLAKENWRKPVVLDTNDRMEVWQSKELHGRFFRALHGPDVDQLASVAWLRFGDLFGETEGFVCAIMDEVMMTNNYRRFIVKDGTVDICRACHRPGESIRHIISGCSRLANEEYLHRHNLVARIIHQQLALKYSLVESEVPYYRYVPDPVLENGHITLYWDRSIITDRTIVANKPDIVMVDRLERRAMIVDITVPHDGNLVKAEKDKQIKYLDLAREVVDMWDVDSAIIVPIVVTANGLIAKSLDQHLRRLSLGSWIKGLIQKAVLLDTARIVRRFLSLEP

SEQ ID NO: 11372 - protein, 1190 aa, Griposia aprilina
MLTRSAARRARPPPPDSSLSSASLPPVSSPTVSAVTTPAAVVASSSSDEYFSPPTTPPPVRRRGGHRPPDGLGPRGPPASDRVPAPGGSVQRMRWTRSINENVMRSYYGATEGGNNLTAYRVRMLSLFQVLEPAVNVSTQRLSDQVRVIQRNHMLDDTVLDRLRNEMQSSHVIAPPSQTVVVLPQSNTSQADEESDDRATNVSTQCNDELRSALEDAIREYRFISPELRPRLPRLPMHNKNRVLVAALDAQLSNYFDDCVDLTDTHSILYCAAVAACRVAHVKFANDSRATRPKPAVPAWQCRIERRIGEARALIGKLICFREGNTRPRVMRFVRRAFAGTNISPQDYISCVTERIDFLKQKVYAWANRIRRYKRRVERYTQNRTFQRDERWVYRGWERPDQAVADTCLPDDDAMCSFWRNIWSVPVSHTEGDWTREVERACDPIPEMGAITICPQDVTRAVRPLPNWKSPGPDGLHNFWIKWFGGSHARLAAQYQVALESGSLPQFLTTGVTHLLHKSGSTAEPKNYRLIACLPTVYKVLTSILRDKINKHIDTNYIMSPSQNGCRNGSRGTKELLLIDMAISQQVRRSRKDLSTCWIDYKKAYDSVPHTWLMRVLELYKVEATLRTFLMSCMGQWRTVLHYPACRNTQRNSEPIRIERGIFQGDSLSPLWFCLALNPLSTLLEDSGLGYRLRRGGQVISHLLYMDDLKLFAPNNSQLMDLLKVTETFSSAIRMEFGVDKCAVMHVKRGEIVESVGTQLSDSINLRALSASETYKYLGMSEALGINGTDMKQSLKDRFFGRLKKVFNSLLSGGNKVRAFNGWVMPVLMYSFGILKWTQTELDALDRKVRTLLTANRMHHPRSSVMRLYIPRKCGGRGFLNAKTLHNREICSLREYFLEADVGMHRDVVTVDKGLTPLSLAKENWRKPVVLDTNDRMEVWQSKELHGRFFRALHGPDVDQLASVAWLRFGDLFGETEGFVCAIMDEVMMTNNYRRFIVKDGTVDICRACHRPGESIRHIISGCSRLANEEYLHRHNLVARIIHQQLALKYSLVESEVPYYRYVPDPVLENGHITLYWDRSIITDRTIVANKPDIVMVDRLERRAMIVDITVPHDGNLVKAEKDKQIKYLDLAREVVDMWDVDSAIIVPIVVTANGLIAKSLDQHLRRLSLGSLFIYLLKLLAPNSIQRRT

SEQ ID NO: 11373 - protein, 1205 aa, Omphaloscelis lunosa
MLTRSRARKLTDTHPTSSGSSLSSASQLPDPAPDVSPVIPVAAVASSSSDEYFSPPTTPPPTRQRGRGRPPASLGLRGPPASDRVPAPGGSVQRMRWTQTVNENVMRAYFGATEGGSNLTAYRGRMLSLFQVLEPAVNVSAQRLSDQVRVIQRNHMLDDVVLDRLRLESRNNHVTPASPLVTVQLQNLPSSSPRSDRVGEEDDDGVISVSSQCNVRLRSALEDAFREYRSIPPGLRPKLPRLPMHKKNKALMCTLDSLLSNCFDGSKDLADTHSILYCAAVAACRVAHVKFPNSDRAPRPKPAVPAWQCRIERRIGEARVLIGKLICFREGNTRPRVMRFVKRAFSGTDISFQDYLTRVTERIDFLKQKIYAWANRIRRYRRRVERYTQNRTFQSDERWVYRAWERPDQGVIDTRLPDDDAMCSFWRSIWSAPVSHTEGDWTREIERACEQIPEMEALTISPQDIARAVRPLPNWKSPGPDGLHNFWIKWFQRSHARLASQFQSALESGSLPQFLTTGITHLLHKSGSTAEPKNYRPITCLPTVYKVFTSILRTKINKHIDTNSIMSASQNGCRNGSRGTKELLLIDMAINQQVRRSRRDLSTCWIDYKKAYDSVPHTWLMRVLELYKVNATLRTFLMSCMGQWRTVLRYPGCRQILRNSEPIRIERGIFQGDSLSPLWFCLALNPLSTLLEDSGLGYRLRRGGQVISHLLYMDDLKLFAPNNLQLLELLKVTETFSSAIRMEFGVDKCAVMHVKRGEIVESVGTQLSDSIQLRSLSSIETYKYLGMSEALGVNAADMKQSLKERFFNRLNKVLNSLLSGGNKVRAFNGWVMPVLMYSFGILKWTQTELDALDRRVRTLLTANRMHHPRSSVMRLYIPRKCGGRGFLNAKTLHNREVCSLREYFLEADVGMHRDVVTVDKGLTPLSLANENWRKPIVLDTNDRREVWQSKELHGRFYRALHGPDVDLLASVSWLRFGDLFGETEGFVFAIMDEVMMTNNYRKYIVKDGTVDICRACHRPGESIRHIISGCSRLANGDYLHRHNLVARIIHQQLALKYILVESEVPYYRYVPDPVLENGNITLYWDRSIITDRTIVANKPDIVVIDRLERRTMIIDIAVPHDENLVKAEKDKQIKYLDLAREVVDMWDVDTAIIVPIVVTANGIIAKSLDQHLKRLSLGSWIKGLIQKAVLLDTARIVRRFLSQEP

SEQ ID NO: 11374 - protein, 1205 aa, Omphaloscelis lunosa
MLTRSRARKLIDTHPTSSGSSLSSASQLPDPAPDVSPVIPVAAVASSSSDEYFSPPTTPPPTRQRGRGRPPASLGLRGPPASDRVPAPGGSVQRMRWTQTVNENVMRAYFGATEGGSNLTAYRGRMLSLFQVLEPAVNVSAQRLSDQVRVIQRNHMLDDVVLDRLRLESRNNHVTPASPLVTVQLQNLPSSSPRSDRVGEEDDDGVISVSSQCNVRLRSALEDAFREYRSIPPGLRPQLPRLPMHKKNKALMCTLDSLLSNCFDGSKDLADTHSILYCAAVAACRVAHVKFPNSGRAPRPKPAVPAWQCRIERRIGEARVLIGKLICFREGNTRPRVMRFVKRAFSGTDISFQDYLTRVTERIDFLKQKIYAWANRIRRYRRRVERYTQNRTFQSDERWVYRAWERPDQGVADTHLPDDDAMCSFWRSIWSVPFSHTEGDWTREVERACDPIPEMGAITICPQDVARAVRPLPNWKSPGPDGLHNFWIKWFQRSHARLASQFQSALESGSLPQFLTTGITHLLHKSGSTAEPKNYRPITCLPTVYKVFTSILRTKINKHIDTNSIMSASQNGCRNGSRGTKELLLIDMAINQQVRRSRRDLSTCWIDYKKAYDSVPHTWLMRVLELYKVNATLRNFLMSCMGQWRTVLRYPGCRQILRNSEPIRIERGIFQGDSLSPLWFCLALNPLSTLLEDSGLGYRLRRGGQVISHLLYMDDLKLFAPNNLQLLELLKVTETFSSAIRMEFGVDKCAVMHVKRGEIVESVGTQLSDSIQLRSLSSIETYKYLGMSEALGVNAADMKQSLKERFFNRLNKVLNSLLSGGNKVRAFNGWVMPVLMYSFGILKWTQTELDALDRRVRTLLTANRMHHPRSSVMRLYIPRKCGGRGFLNAKTLHNRVVCSLREYFLEADVGMHRDVVTVDKGLTPLSLANENWRKPIVLDTNDRREVWQSKELHGRFYRALHGPDVDLLASVSWLRFGDLFGETEGFVFAIMDEVMMTNNYRKYIVKDGTVDICRTCHRPGESIRHIISGCSRLANGDYLHRHNLVARIIHQQLALKYSLVESEVPYYRYVPDPVFENGNITLYWDRSIITDRTIVANKPDIVVIDRLERRTMIIDIAVPHDENLVKAEKDKQIKYLDLAREVVDMWDVDTAIIVPIVVTANGIIAKSLDQHLKRLSLGSWIKGLIQKAVLLDTARIVRRFLSQEP

SEQ ID NO: 11375 - protein, 1201 aa, Omphaloscelis lunosa
MLTRLAARRARLPPPDSPLSSASSPPVRSPTVNAVMTPAAAVASSSSDEYFSPPTTPPPARRRGRRRPPDGLGPRGPPASDRVPAPGGSVQRMRWTRSINENVMRSYYGATEGGNNLTAYRVRMLSLFQVLEPAVNVSAQRLSDQVRVIQRNHMLDDTVLDRLRSEMQSSHVIAPPLRSVIIPSQMSSVITSQADERIDDRATNVSTQCNEDLRSALEGAIQEYRFMSPELRPRLPRLPMHNKNKALVAVLDSQLSNYFDDCEDLTDTHSILYCAAVAVCRVAHLKFSNDSRATRPKPAAPAWQCRIERRISGARTLIGKLICFREGNTRPRVMRFVRRAFLGTDISPQDYMTRVTERIDFLKQKVYAWANRIRRYKRRVERYTQNRTFQSDERWVYRAWERPDQGVADTHLPDDDAMCSFWRSIWSVPVSHTEGDWTREVERACDPIPEMGAITICPQDVARAVRPLPNWKSPGPDGLHNFWIKWFVRSHARLAAQYQTALESGSLPQFLTTGVTHLLHKSGSTAEPKNYRPITCLPTVYKVLTSILRAKINKHIDTNSIMSVSQNGCRNGSRGTKELLLIDMAISQQVRRFRKDLSTCWIDYKKAYDSVPHTWLMRVLELYKVHTTLRTFLMSCMGQWRTVLRYPGCRNIQRNSEPIRIERGIFQGDSLSPLWFCLALNPLSTLLEDSGLGYRLRRGGQVISHLLYMDDLKLFAPNNLQLMELLKVTETFSSAIRMEFGVDKCAVMHVKRGEIMESVGTQLSDSINLRALSASETYKYLGMSEALGINVTDMKQSLKERFFGRLKKVLNSLLSGGNKVRAFNGWVMPVLMYSFGILKWTQTELDALDRRVRTLLTAYRMHHPRSSVMRLYIPRKCGGRGFLNAKTLHNREICSLREYFLGVDVGMHRDVVVVDKGLTPLSLAKENWRKPVVLDTKDRMEIWQSKELHGRYFRALHGPDVDLPASVTWLRFGDLFGETEGFVCAIMDEVMMTNNYRRFIVKDGTVDICRACHRPGESIRHIISGCSRLANEEYLHRHNLVARIIHQQLALKYSLVESEVPYYRYVPDPVLENGNITLYWDRSIITDRTIAANKPDIVVVDRGERRTMIIDITVPHDENLVKAEKDKQIKYLDLAREVVDMWDVDSAIIVPIVVTANGLIAKSLDQHLRRLSLGSWIKGLIQRAVLLDTARIVRRFLSLEP

SEQ ID NO: 11376 - protein, 1201 aa, Omphaloscelis lunosa
MLTRLAARRARLPPPDSPLSSASSPPVRSPTVNAVMTPAAAVASSSSDEYFSPPTTPPPARRRGRRRPPDGLGPRGPPASDRVPAPGGSVQRMRWTRSINENVMRSYYGATEGGNNLTAYRVRMLSLFQVLEPAVNVSAQRLSDQVRVIQRNHMLDDTVLDRLRSEMQSSHVIAPPLRSVIIPSQMSSVITSQADERIDDRATNVSTQCNEDLRSALEGAIQEYRFMSPELRPRLPRLPMHNKNKALVAVLDSQLSNYFDDCEDLTDTHSILYCAAVAVCRVAHLKFSNDSRATRPKPAAPAWQCRIERRIGGARTLIGKLICFREGNTRPRVMRFVRRAFLGTDISPQDYMTRVTERIDFLKQKVYAWANRIRRYKRRVERYTQNRTFQSDERWVYRAWERPDQGVADTHLPDDDAMCSFWRSIWSVPVSHTEGDWTREVERACDPIPEMGAITICPQDVARAVRPLPNWKSPGPDGLHNFWMKWFVRSHARLAAQYQTALESGSLPQFLTTGVTHLLHKSGSTAEPKNYRPIKCLPTVYKVLTSILRAKINKHIDTNSIMSASQNGCRNGSRGTKELLLIDMAISQQVRRSRKDLSTCWIDYKKAYDSLPHTWLMRVLELYKVHKTLRTFLMSCMGQWRTVLRYPGCRNIQRNSEPIRIERGIFQGDSLSPLWFCLALNPLSTLLEDSGLGYRLRRGGQVISHLLYMDDLKLFAPNNLQLMELLKVTETFSSAIRMEFGVDKCAVMHVKRGEIMESVGTQLSDSINLRALSASETYKYLGMSEALGINVTDMKQSLKERFFGRLKKVLNSLLSGGNKVRAFNGWVMPVLMYSFGILKWTQTELDALDRRVRTLLTAYRMHHPRSSVMRLYIPRKCGGRGFLNAKTLHNREICSLREYFLGVDVGMHRDVVVVDKGLTPLSLAKENWRKPVVLDTKDRMEIWQSKELHGRYFRALHGPDVDLPASVTWLRFGDLFGETEGFVCAIMDEVMMTNNYRRFIVKDGTVDICRACHRPGESIRHIISGCSRLANEEYLHRHNLVARIIHQQLALKYSLVESEVPYYRYVPDPVLENGNITLYWDRSIITDRTIAANKPDIVVVDRGERRTMIIDITVPHDENLVKAEKDKQIKYLDLAREVVDMWDVDSAIIVPIVVTANGLIAKSLDQHLRRLSLGSWIKGLIQRAVLLDTARIVRRFLSLEL

SEQ ID NO: 11377 - protein, 1205 aa, Omphaloscelis lunosa
MLTRSRARKLIDTHPTSSGSSLSSASQLPDSAPNVSPVIPVAAVASSSSDEYFSPPTTPPPTRQRGRGRPPASLGLRGPPASDRVPAPGGSVQRMRWTQTINENVMRAYFGATEGGSNLTAYRGRMLSLFQVLEPAVNVSAQRLSDQVRVIQRNHMLDDVVLDRLRLESRNNNVIPASPLVTVQLQNLTSSSPRPDRVGEEDDDGVISVSSQCNARLRSTLEDAFREYRSIPPGLRPHLPRLPMHKKNKALMCTLDSLLSNYFDGSKDLADTHSILYCAAVAACRVAHVKFPNSDRAPRPKPAVPAWQCRIERRIGEARVLIGKLICFREGNTRPRVMRFVKRAFSGTDISSQDYLTRVTERIDFLKQKIYAWANRIRRYRRRVERYTQNRTFQSNERWVYRAWERPDQGVIDTRLPDDDAMCSFWRSIWSAPVSHTEGDWTREIERACEHLPEMEALTISLQDIARAVRPLPNWKSPGPDGLHNFWIKWFQRSHARLASQFQSALDSGSLPQFLTTGITHLLHKSGSTAEPKNYRPITCLPTVYKVLTSILRTKINKHIDTNSIMSASQNGCKNGSRGTKELLLIDMAINQQVRRSRRDLSTCWIDYKKAYDSVPHTWLMRVLELYKVDATLRTFLMSCMRQWRTVLRYPGCRQILRNSEPIRIERGIFQGDSLSPLWFCLALNPLSTLLEDSGLGYRLRRGGQVISHLLYMDDLKLFAPNNLQLLELLKVTETFSSAIRMEFGVDKCAVMHVKRGEIVESVGTHLSDSIQLRSLSSIETYKYLGMSEALGVNAADMKQSLKERFFNRLNKLLNSLLSGGNKVRAFNGWVMPVLMYSFGILKWTQTELDALDRRVRTLLTANRMHHPRSSVMRLYIPRKCGGRGFLNAKTLHNHEVCSLREYFLEADVGMHRDVVTVDKGLTPLSLANENWRKPIVLDTNDRREVWQSKELHGRFYRALHGPDVDLLASVSWLRFGDLFGETEGFVFAIMDEVMMTNNYRKYIVKDGTVDICRACHRPGESIRHIISGCSRLANGDYLHRHNLVARIIHQQLALKYSLVESEVPYYRYVPDPVLENGNITLYWDRSIISDRTIVANKPDIVVIDRLERRTMIIDIAVPHDENLVKAEKDKQIKYLDLAREVVDMWDVDTAIIVPIVVTANGIIAKSLDQHLKRLSLGSWIKGLIQKAVLLDTARIVRRFLSQEP

SEQ ID NO: 11378 - protein, 963 aa, Sesamia nonagrioides
MLSVSTALLRLNLDHVYLDCPCIKKNKALVCALDSQLSNYLKDSKDLADTHSILYCGAVAICRVAHVKFPDSDRATRPKPAVPAWQCRIERRIGETRALIGKLISFREGNTRPRVMRFVRRAFSGTDVSTRDYLLRVTERIDFLKQKIYAWANRIRRYRRRVERYSQNRNFQSDERWVYRAWERSDQGVTDTCLPDDDATRSFWRNIWSVPVSHTEGGWTRDVERACDPVPEMGAITICPQDVARAVRPLPNWKSPGPDGLHNFWIKWFSGSHACLASQFQTALESGSLPQFLTTGITHLLHKSGSTAEPKNYRPITCLPTVYKVLTSILKAKINTHIDSNSIMSASQNGCRNGSRGTKELLLIDMAISQQVRRSRKDLSTCWIDYKKAYDSVPHTWLMRVLELYKVDATLRTFLMTCMSQWRTVLRYPGCRNIQRNSEPIRIERGIFQGDSLSPLWFCLALNPLSTLLEDSGLGYRLRRGGQVISHLLYMDDLKLFAHTNSQLKELLKITETFSSAIRMEFGVDKCAVMHVQRGEIVESVGTQLTGSINLRSLSASETYKYLGMSEALGINVTDMKQSLKERFFGRLKKVLNSLLSGGNKVRAFNGWVMPVLMYSFGLLKWTQTELDALDQRVRTLLTANRLHHPRSSVMRLYIPRKCGGRGFLNAKTLHNREVCSLREYFLKTDVGMHRDVVAVDKGLTPLSLAKENWRKPVVLETNDRMEVWQSKELHGRFFRALRGPDVDFQASVAWLRYGDLFGETEGFVCAIMDEVMMTNNYRKFIVKDGTVDICRACHRPGESIRHIISGCSRLANGEYLHRHNLVARIIHQQLALKYNLVESEVPYYRYMPDPVLENGHITLYWDRSIITDRTIVANKPDIVMVDRSERRAMIVDITIPHDENLVKAEKDKQIKYLDLAHEVVDMWEVDSAIIVPIVVTANGLIAKSLDQHLRRLSLGGWIKGLI

SEQ ID NO: 11379 - protein, 1094 aa, Sesamia nonagrioides
MRSYYGATEGGTNLTAYRVRMLSLFQVLEPAVNVSAQRLSDQVRVIQRNHMLDDTVLDRLRNEMQSSRVIAHQSQSAEIRPQPTNYADEGSNDRATNVSTQCNEELRNALEAAIREYRSISAELRPRLPRLPMHNRNRALMAALDAQLSNYFDTCEDLTDTHSILYCAAVAACRIAHVKFPSDSRATRPKPVVPACQHRIERRIGGARALIGKLICFREGNTRPRVMRFVRRAFSGTNTSPQNYMARVTERIDFLKQKVYAWANRIRRYKRRVERYTQNRTFQRNERRVYRDWERPEQGVTDTCLPDDDAMCSFWRSIWSVPVSHTEGDWARDVERACDPIPEMGAITICPQDVAHAVRPLPNWKSPGPDGLHNFWIKWFPRSHARLASQFQTALVSGSLPQFLTTGITHLLHKSGSIAEPKNYRPITCLPTVYKVLTSILKTKINKHIDSNSILSASQNGCRSGSRGTKELLLIDMANSQQVRRSRKDLSTCWIDYKKAYDSVPHTWLMRVLELYKVDATLRTFLMTCMRTWRTVLRYPGCRNIQRNSEPIRIERGIFQGDSLSPLWFCLALNPLSTLLEDSGLGYRLRRGGQVISHLVYMDDLKLFAPNNSQLNELLKITEIFSSSIRMEFGVDKCAVMHVKRGEIMEPVGTQLTSSINLRALSASETYKYLGMSEALGINVTDMKQSLKERFFGRLKKVLNSLLSGGNKVRAFNGWVMPVLMYSFGILKWTQTELDALDQRVRTLLTANRLHHPRSSVMRLYIPRKCGGRGFLNAKTLHNREICSLRDYFLETDVGMHRDVVAADKGLTPLSLAKENWRKPVVLDTNDRMEVWKSKELHGRFFRALHGLDVDFQASVAWLRFGDLFGETEGFVFAIMDEVMMTNNYRRFIVKDGTVDICRACHRPGESIRHIISGCSRLANGEYLHRHNLVARIIHQQLALKYKLVESEVPYYRYMPDPVLENGHITLYWDRSIITDRTIIANKPDIVLVDRSERRAMIVDITIPHDENLVKAEKDKQTKYLDLAHEVVDMWEVDSAIIVPIVVTANGLIAKSLDQHLRRLSLGSWIKGLIQKAVLLDTARIVRKFLSLEP

SEQ ID NO: 11380 - protein, 1200 aa, Sesamia nonagrioides
MLTRSAARRARSPPPDSSPSSASPPPVSSPTVNAVMTPAAAVALSSSDEYFSPPTTPPPVRRRGGRRPPDCLGPRGPLASDRAPATGGNVQRMKWTQSINENVMRAYFGATEGGSNLTAYRGRMLSLFQVLEPAVNVSAQRLSDQVRVIQRNHMLDDVVLDRLRLESRNSHVTPASSLVAVQLNSVPSRPNLVDEEDDDEAISVTPQCNEKVRSALEDAFREYRSTPPELRPRLPRLPMHKKNKALVCALDSQLSNYLKDSKDLADTHSILYCGAVAICRVAHVKFPDSDRATRPKPAVPAWQCRIERRIGETRALIGKLISFREGNTRPRVMRFVRRAFSGTDVSTRDYLLRVTERIDFLKQKIYAWANRIRRYRRRVERYSQNRNFQSDERWVYRAWERSDQGVTDTCLPDDDATRSFWRNIWSVPVSHTEGGWTRDVERACDPVPEMGAITICPQDVARAVRPLPNWKSPGPDGLHNFWIKWFSGSHACLASQFQTALESGSLPQFLTTGITHLLHKSGSTAEPKNYRPITCLPTVYKVLTSILKAKINTHIDSNSIMSASQNGCRNGSRGTKELLLIDMAISQQVRRSRKDLSTCWIDYKKAYDSVPHTWLMRVLELYKVDATLRTFLMTCMSQWRTVLRYPGCRNIQRNSEPIRIERGIFQGDSLSPLWFCLALNPLSTLLEDSGLGYRLRRGGQVISHLLYMDDLKLFAHTNSQLKELLKITETFSSAIRMEFGVDKCAVMHVQRGEIVESVGTQLTGSINLRALSASETYKYLGMSEALGINVTDMKQSLKERFFGRLKKVLNSLLSGGNKVRAFNGWVMPVLMYSFGILKWTQTELDALDRRVRTLLTANRLHHPRSSVMRLYIPRKCGGRGFLNAKTLHNREICSLREYFLTTDVGMHRDVVAVDKGLTPLSLAKENWRKPVVLDTNDRMEVWKSKELHGRFFKALHGPDVDLQASVAWLRLGDLFGETEGFVCAITDEVMMTNNYRRFIVKDGTVDICRACHRPGESIKHIISGCSRLANGEYLHRHNLVARIIHQQLALKYNLVESEVPYYRYTPDPVLENDHITLYWDRSIITDRTIIANKPDIVLVDRSERRAMIVDITIPHDENLVKAEKDKQIKYLDLAHEVVDMWEVDSAIIVPIVVTANGLIAKSLDQHLRRLSLGSWIKGLIQKAVLLDTARIVRKFLSLEP

SEQ ID NO: 11381 - protein, 962 aa, Sesamia nonagrioides
MHNRNRALMAALDAQLSNYFDTCEDLTDTHSILYCAAVAACRVAHVKFPTDSRATRPKPVVPAWQRRIERRIGGARALIGKLICFREGNTRPRVMRFVRRAFSGTNTSPQNYMARVTERIDFLKQKVYAWANRIRRYKRRVERYTQNRTFQSNERRVYRDWERSEQGVTDTCLPDDDAMCSFWRSIWSVPVSHTEGGWARDVERACDPIPEMGAITICPQDVAHAVRPLPNWKSPGPDGLHNFWIKWFPRSHARLASQFQTALVSGSLPQFLTTGITHLLHKSGSTAETKNYRPITCLPTVYKVLTSILKTKINKHIDSNSILSASQNGCRSGSRGTKELLLIDMAISQQVRRSRKDLSTCWIDYKKAYDSVPHTWLMRVLELYKVDATLRTFLMTCMRTWRTVLRYPGCRNIQRNSEPIRIERGIFQGDSLSPLWFCLALNPLSTLLEDSGLGYRLRRGGQVISHLLYMDDLKLFAPNNSQLNELLKITEIFSSSIRMEFGVDKCAVMHVKRGEIMEPVGTQLTSSINLRALSASETYKYLGMSEALGINVTDMKQSLKERFFGRLKKVLNSLLSGGNKVHAFNGWVMPVLMYSFGILKWTQTELDALDQRVRTLLTANRLHHPRSSVMRLYIPRKCGGRGFLNAKTLHNREICSLRDYFLETDVGMQRDVVAADKGLTPLSLANENWRKPVVLDTNDRMEVWKSKELHGRFFRALHGPDVDFQASVAWLRFGDLFGETEGFVFAIMDEVMMTNNYRRFIVKDGTGDICRACHRPGESIRHIISGCSRLANGEYLHRHNLVARIIHQQLALKYKLVESEVPYYRYMPDPVLENGHITLYWDRSIITDRTIIANKPDIVLVDRSERRAMIVDITIPHDENLVKAEKDKQTKYLDLAHEVVDMWEVDSAIIVPIVVTANGLIAKSLDQHLRRLSLDSWIKGLIQKAVLLDTARIVRRFLSLEP

SEQ ID NO: 11382 - protein, 1104 aa, Sesamia nonagrioides
MMEKRSFPDWPRSWMCMYLLAVYPRDIIIIIITLFQVLEPAVNVSAQRLSDQVRVIQRNHMLDDTVLDRLRNEMQSSRIIAHQSQSVEIPPQPTIYADEGSNDRATNVSTQCNEELRNALEAAIREYRSISAELRPRLPRLPMHNRNRALMGALDAQLSNYFDTCEDLTDTHSVLYCAAVAACRVAHVKFPSDSRATRPKPVVPAWQHRIERRIGGARALIGKLICFREGNTRPRVMRFVRRAFSGTNTSPQNYMARVTERIDFLKQKVYAWANRIRRYKRRVERYTQNRTFQSNERRVYRDWERPEQGVTDTCLPDDDAMCSFWRSIWSVPVSHTEGDWAQDVERACDPIPEMGAITICPQDVAHAVRPLPNWKSPGPDGLHNFWIKWFPRSHARLASQFQTALVSGSLPQFLTTGITHLLHKSGSTAEPKNYRPITCLPTVYKVLTSILKTKINKHIDSNSILSASQNGCRSGSCGTKELLLIDMAISQQVRRSRKDLSTCWIDYKKAYDSVPHTWLMRVLELYKVDATLRTFLMTCMRTWRTVLRYPGCRNIQRNSEPIRIERGIFQGDSLSPLWFCLALNPLSTLLEDSGLGYRLRRGGQVISHLLYMDDLKLFAPNNSQLSELLKITEIFSSSIRMEFGVDKCAVMHVKRGEIMEPVGTQLTSSINLRALSASETYKYLGMSEALGINVTDMKQSLKERFFGRLKKVLNSLLSGGNKVRAFNGWVMPVLMYSFGILKWTQTELDALDQRVRTLLTANRLHHPRSSVMRLYIPRKCGGRGFLNAKTLHNREICSLRDYFLETDVGMHRDVVAADKGLTPLSLAKENWRKPVVLDTNDRMEVWKSKELHGRFFRALHGPDVDFQASVAWLRFGDLFGETEGFVFAIMDEVMMTNNYRRFIVKDGTVDICRACHRPGESIRHIISGCSRLANGEYLHRHNLVARIIHQQLALKYKLVESEVPYYRYMPDPVLENGHITLYWDRSIITDRTIVANKPDIVLVDRSERRAMIVDITIPHDENLVKAEKDKQIKYLDLAHEVVDMWEVDSAIIVPIVVTANGLIAKSLDQHLRRLSLGSWIKGLIQKAVLLDTARIVRKFLSLEP

SEQ ID NO: 11383 - protein, 1044 aa, Sesamia nonagrioides
MLDDTVLDRLRNEMQSSRVITHQSQSAEIPPQPTNYADEGSNDRATNVSTQCNEELRNALEAAIREYRFMSAELRPRLPRLPMHNRNRALMAALDAQLSNYFDTCENLTDTHSILYCAAVAACRVAHVKFSSDSRATRPKPVVPAWQHRIERRIGGARALIGKLICFREGNTRPRVMRFVRRAFSGTNTSPQNYMARITERIDFLKQKVYAWANRIRRYKRRVERYTQNRTFQSNQRWVYRDWERPEQGVADTCLPDDDAMCSFWRSIWSVPVSHTEGDWARDVERACDPIPEMGAITICPQDVARAVRPLPNWKSPVPDGLHNFWIKWFPRSHASLASQFQTTLVSGSLPQFLTTGITHLLHKSGSTAEPKNYRPITCLPTVYKVLTSILKAKINNHIDSNSIMSVSQNGCRSGSRGTKELLLIDMAISQQVRRSRKDLSTCWIDYKKAYDLVPHTWLMRVLELYKVDTTLRTFLMTCMGQWRTVLRYPGCRNIQRNSEPIRIERGIFQGDSLSPLWFCLALNPLSTLLEDSGLGYRLRRGGQVISHLLYMDDLKLFAPNNLQLKELLKITETFSSAIRMEFGVDKCAVMHIKRGEIVESVGTQLTSSINIRALSASETYKYLGMSEALGINVTDMKQSLKERFFGRLKKVLNSLLSGGNKVRAFNGWVMPVLMYSFGILKWTQTELDALDQRVRTLLTANRLHHPRSSVMRLYIPRKCGGRGFLNAKTLHNREICSLREYFLETDVGMHRDVVAVDKGLTPLSLAKENWRKPVVLDTNDRMEVWKSKELHGRFFRALHGPDVDLQASVTWLRFGDLFGETEGFVCAIMDEVMMTNNYRRFIVKDGTVDICRACHRLGESIRHIISGCSRLANGEYLHRHNLVARIIHQQLALKYNLVESEVPYYRYMPDPVLENGHITLYWDRSIITDRTIVANKPDIVMVDRSERRAMIVDITIPHDENLVKAEKDKQIKYLDLAHEVVDMWEVDSAIIVPIVVTANGLIAKSLDQHLRRLSLGSWIKGLIQKAVLLDTARIVRKFLSLEP

SEQ ID NO: 11384 - protein, 1200 aa, Sesamia nonagrioides
MLTRSAARRARPPSPDSSLSSASPPPVSSPTVNAVMTPAAVVASSSSDEYFSPPTTPPPARRRGGRRPPDRLGPRGPSASDRVPAPGGSVQRMRWTQSINENVMRSYYGATEGGNNLTAYRVRMLSLFQVLEPAVNVSAQRLSDQVRVIQRNHMLDDVVLDRLRLESRNSHVTPASSLVAVQLNSVSPRPNHIDEEDDDRAISVSPQCNEKLRSALEDAFREYRSIPPELRPRLPRLPMHKKNKALVCALDSQLSNYLKDSKDLNDTHSILYCGAVAICRVAHVKFPDNDRATRPKSAVPAWQCRIERRIGETRALIGKLVSFREGNTRPRVMRFVRRAFSGTDTSTRDYLFRVTERIDFFKQKIYAWANRIRRYRRRVERYSQNRNFQSDERRVYRAWERSDQGVTDTCLPDDDATCSFWRNIWSVPVSHTEGSWTRVVERACDPVPEMGAITICPQDVARAVRPLPNWKSPGPDGLHNFWIKWFSGSHARLASQFQTALESGSLPQFLTTGVTHLLHKSGSTAEPKNYRPITCLPTVYKVLTSILKSKINTHIDSNSIMSASQNGCRSGSRGTKELLLIDMAISQQVRRSRKDLSTCWIDYKKAYDSVPHTWLMRVLELYKVDATLRTFLMTCMRTWRTVLRYPGCRNIQRNSEPIRIERGIFQGDSLSPLWFCLALNPLSTLLEDSGLGYRLRRGGQVISHLLYMDDLKLFAHTDSQLKELLKITETFSSSIRMEFGVDKCAVMHVKRGEIMESVGTQLTSSINLRALSASETYKYLGMSEALGINVTDMKQSLKERFFGRLKKVLNSLLSGGNKVRAFNGWVMPVLMYSFGILKWTQTELDALDRRVRTLLTANRLHHPRSSVMRLYIPRKCGGRGFLNAKTLHNREICSLREYFLTTDVGMHRDVVAVDKGLTALSLAKENWRKPVVLDTNDRMEVWKSKELHGRFFKALHGPDVDLQASVAWLRFGDLFGETEGFVCAITDEVMMTNNYRRFIVKDGTVDICRACHRPGESIRHIISGCSRLANGEYLHRHNLVARIIHQQLALKYNLVESEVPYYRYTPDPVLENDHITLYWDRSIITDRTIIANKPDIVLVDRSERRAMIVDITIPHDENLVKAEKDKQIKYLDLAHEVVDMWEVDSAIIVPIVVTANGLIAKSLDQHLRRLSLGSWIKGLIQKAVLLDTARIVRKFLSLEP

SEQ ID NO: 11385 - protein, 926 aa, Sesamia nonagrioides
MERALSLSVRLNQKMRRTAEEPKSPIQLFESLKLSNNNNNKLISKLISFREGNTRPRVMRFVKRAFSGTDVSTRDYLLRVTERIDFLKQKIYAWANRIRRYRRRVERYSQNRNFQSDERWVYRAWERSDQGVTDTCLPDDDATRSFWRNIWSVPVSHTEGGWTRDVERACDPVPEMGAITICPQDVARAVRPLPNWKSPGPDGLHNFWIKWFSGSHACLASQFQTALESGSLPQFLTTGITHLLHKSGSTAEPKNYRPITCLPTVYKVLTSILKAKINTHIDSNSIMSASQNGCRNGSRGTKELLLIDMAISQQVRRSRKDLSTCWIDYKKAYDSVPHTWLMRVLELYKVDATLRTFLMTCMSQWRTVLRYPGCRNIQRNSEPIRIERGIFQGDSLSPLWFCLALNPLSTLLEDSGLGYRLRRGGQVISHLLYMDDLKLFAHTNSQLKELLKITETFSSAIRMEFGVDKCAVMHVQRGEIVESVGTQLTGSINLRSLSASETYKYLGMSEALGINVTDMKQSLKERFFGRLKKVLNSLLSGGNKVRAFNGWVMPVLMYSFGILKWTQTELDALDQRVRTLLTANRLHHPRSSVMRLYIPRKCGGRGFLNAKTLHNREICSLREYFLKTDVGMHRDVVAVDKGLTPLSLAKENWRKPVVLETNDRMEVWQSKELHGRFFRALRGPDVDFQASVAWLRYGDLFGETEGFVCAIMDEVMMTNNYRKFIVKDGTVDICRACHRPGESIRHIISGCSRLANGEYLHRHNLVARIIHQQLALKYNLVESEVPYYRYMPDPVLENGHITLYWDRSIITDRTIVANKPDIVMVDRSERRAMIVDITIPHDENLVKAEKDKQIKYLDLAHEVVDMWEVDSAIIVPIVVTANGLIAKSLDQHLRRLSLGGWIKGLIQKAVLLDTARIVRKFLSLEP

SEQ ID NO: 11386 - protein, 975 aa, Apamea monoglypha
MSPELRPRLPRLPMHNKNRALVAVLDAQLSSYFDVCEDLTDTHSILYCAAVAACRVAHVKFVSDSRATRPKPAIPPWQCRIERRIGGARALIGKLICFREGNTRPRVMRFVRRAFSGTDISSQDYLSRVTERIDFLKQKVYAWANRIRRYKRRVDRYTQNRTFQSDERWVYRGWERPDQGVADTCLPDDDAMYSFWRSIWSVPVSHTEGDWAREVERACDPIPEMEAITICAQDVARAVRPLPNWKSPGPDGLHNFWVKWLTRSHARLASQFQIALESGSLPQFLTTGVTHLLHKSASTAEPKNYRPITCLPTVYKVLTSILRAKINKHIDTNSIMSASQNGCKNGSRGTKELLLIDMAISQQVRRSRKDLSTCWIDYKKAYDSVPHTWLMRVLELYKVDTTLRTFLMTCMGQWRTVLRYPGCRNIQRNSEPIRIERGIFQGDSLSPLWFCLALNPLSTLLEDSGLGYRLRRGGQVISHLLYMDDLKLFAPNNLQLMELLKITETFSSAIRMEFGVDKCAVMHVKRGEIVESVGTQLSDSTNLRALSASETYKYLGMSEALGINVTDMKQSLKERFFGRLKKVLNSLLSGGNKVRAFNSWVMPVLMYSFGILKWTQTELDALDRRVRTLLTANRLHHPRSSVMRLYIPRKCGGRGFLNAKTLHNREICSLREYFLETDVGMHRDVVAVDKGLTPLSLAKENWRKPVVLDTNDRMEVWQSKELHGRFYRALHGPDVDLLASVAWLRFGDLFGETEGFVCAIMDEVMMTNNYRRFIVKDGTVDICRACHRPGESIRHIISGCSRLANGEYLHRHNLVARIIHQQLALKYNLVESEVPYYRYVPDPVLENGNITLYWDRSIITDRTIVANKPDIVVVDRSERRAMIVDITVPHDENLVKAEKDKQIKYLDLAREVVDMWDVDSAIIVPIVVTANGLIAKSLDQHLRRLSLGSWIKGLIQKAVLLDTARIVRRFLSLEP

SEQ ID NO: 11387 - protein, 977 aa, Apamea monoglypha
MLHRILPWLKVPHQTFRTRSFFVSIWDKSTLVTKYIINCYCFIQTITKHLSFFFSFNNFFVTNNLTKIFVTVFTLVRHYYQIIIIIIIAIRALIGKLICFREGNTRPRVMRFVRRAFSGTDISSQDYLSRVTERIDFLKQKVYAWANRIRRYKRRVDRYTQNRTFQSDERWVYRGWERPDQGVADTCLPDDDAMYSFWRSIWSVPVSHTEGDWAREVERACDPIPEMEAITICAQDVARAVRPLPNWKSPGPDGLHNFWVKWLTRSHARLASQFQIALESGSLPQFLTTGVTHLLHKSASTAEPKNYRPITCLPTVYKVLTSILRAKINKHIDTNSIMSASQNGCKNGSRGTKELLLIDMAISQQVRRSRKDLSTCWIDYKKAYDSVPHTWLMRVLELYKVDTTLRTFLMTCMGQWRTVLRYPGCRNIQRNSEPIRIERGIFQGDSLSPLWFCLALNPLSTLLEDSGLGYRLRRGGQVISHLLYMDDLKLFAPNNLQLMELLKITETFSSAIRMEFGVDKCAVMHVKRGEIVESVGTQLSDSTNLRALSASETYKYLGMSEALGINVTDMKQSLKERFFGRLKKVLNSLLSGGNKVRAFNSWVMPVLMYSFGILKWTQTELDALDRRVRTLLTANRLHHPRSSVMRLYIPRKCGGRGFLNAKTLHNREICSLREYFIETDVGMHRDVVAVDKGLTPLSLAKENWRKPVVLDTNDRMEVWQSKELHGRFYRALHGPDVDLLASVAWLRFGDLFGETEGFVCAIMDEVMMTNNYRRFIVKDGTVDICRACHRPGESIRHIISGCSRLANGEYLHRHNLVARIIHQQLALKYNLVESEVPYYRYVPDPVLENGNITLYWDRSIITDRTIVANKPDIVVVDRSERRAMIVDITVPHDENLVKAEKDKQIKYLDLAREVVDMWHVDSAIIVPIVVTANGLIAKSLDQHLRRLSLGSWIKGLIQKAVLLDTARIVRRFLSLEP

SEQ ID NO: 11388 - protein, 1198 aa, Apamea monoglypha
MLTRSAARRARLPSPDSSLSSASLPPVPSPTVSAVTTPAAVVASSSSDEYFSPPTTPPPARRRGGRRPPDGLGPRGPLASDRVPAPGGSVQRMGWTRSINENVMRSYYGATEGGNNLTVYRVRMLSLFQVLEPAVNVSAQRLSDQVRVIQRNHMLDDTVLDRLRSEMQSSHVIAPQSQTAAVLPQSNTSHADEGSNDRATNVSIQCNEELRNTLEGAIREYRFMSPELRSRLPRLPMHNKNRALVAVLDAQLSSHFDACEDLTDTHSILYCAAVAACRVAHVKFDSDSRATRPKPAIPAWQCRIERRIDGARALIGKLICFREGNTRPRVMRFVRRAFLGTDISSQDYLSRVTERIDFLKQKVYAWANRIRRYKRRVERYTQNRTFQSDERWVYRGWERPDQDVADTCLPDDDAMCSFWRSIWSAPVSHTEGDWAREVERACDPIPEMEAITICPQDVARAVRPLPNWKSPGPDGLHNFWIKWFTRSHARLASQFQTALESGSLPQFLTTGITHLLHKSGSTAEPKNYRPITCLPTVYKVLTSILRAKINKHIDTNSIISASQNGCKNGSRGTKELLLIDMAISQQVRRSRKDLSTCWIDYKKAYDSVPHTWLMRVLDLYKVDATLRTFLMSCMGQWRTVLRYPGCRNIQRNSEPIRIERGIFQGDSLSPLWFCLALNPLSTLLEDSGLGYRLRRGGQVISHLLYMDDLKLFAPNNLQLMELLKVTETFSSAIRMEFGVDKCAVMHVKRGEIVESVGTQLSDSTNLRALSVSETYKYLGMSEALGINVTDMKQSLKERFFGRLKKVLNSLLSGGNKVRAFNSWVMPVLMYSFGILKWTQTELDALDRRVRTLLTANRMHHPRSSVMRLYIPRKCGGRGFLNAKTLHNREICSLREYFLETDVGMHRDVVAVDKGLTPLSLAKENWRKPVVLDTNDRMEVWQSKELHGRFYRALHGPDVDLLASVAWLRFGDLFGETEGFVCAIMDEVMMTNNYRRFIVKDGTVDICRACHRPGESIRHIISGCSRLANGEYLHRHNLVARIIHQQLALKYSLVESEVPYYRYVPDPVLENGNITLYWDRSIITDRTIVANKPDIVVVDRSERRAMIVDITVPHDENLVKAEKDKQIKYLDLAREVVDMWDMDSAVIVPIVVTANGLIAKSLDQHLRRLLLGSWIKGLIQKAVLLDTARIVRRFLSLEP

SEQ ID NO: 11389 - protein, 1196 aa, Furcula furcula
MLTRHKARLRPPDSSPRSASQPPAPSTGGPPAAVASSESDEYFSPPSSPPPVCRRRGRPPRDLGLLGQPAPNRVLVPGGVVRRMKWTLSINENVMRAYYEATEGGTNLTAYRDRMLSLFQTLEPAVNVSAQRLSDQVRAIQRGHMLDDAVLDRLRSEVQGSRVVPCIPSSQAVAPAVNTAPAPRLAATSGDDRDDMSTNISTNVSTQLRSTLEDVVREYRTMPQGLRPRLPRLPMHKRNRALVCALDSLLSSYFDSSEDLADAHSLLYCAAMTACRVARVKFPNSDAATRPRPAVPAWQCGIERRIGEARVLIGKLTCFREGNTRPRVMRFVRRAFSGTGIDPREYFSCVTERIDFLKQKVCAWANRIRRYRARVDRYSQNNMFQRDQRWVYRSWERPSQIGGEVQRPDDDAMIRFWRNIWSVPVTHSEGDWIRDVEQVCEPIPEMGAITIRPQDLADAVRPLPNWKAPGPDGLHNFWLKWLRSSHACLASLFQSAVESGSLPEFLTTGITHLLHKTNSTADPKNYRPITCLPTVYKTLTSILRAKIYRHVEGNSIMSASQNGCRSGARGTKELLLIDMAICQQARRNRRDLSTCWIDYKKAYDSVPHTWLVRVLELYKVNTTLRTFLASCMRQWRTVLLYPGSRQTLGDGEPIRIERDIFQGDSLSPLWFCLALNPLSTLLKSSGLGYRLRRGGQVISHLLYMDDLKLFAPTEVQLMGLLKVTETFSSSIRMEFGVDKCAVMHVKRGRLVESRSIQLSDSTDLRTLSATETYKYLGMSQALGINETDMKQSLRERFLGRLRKVLKSLLSGGNRVRAYNGWVMPVLMYSFGILKWTQTELDTLDRTVRTLLTAYRMHHPRSSVMRLYIPRKCGGRGFLNAKTLHNREIYNLREYFLHCGGEMHTDVVAVDSGLTPLSLAKGNWRRPVVLTTGDREAVWQSKELHGRFYRALHGPDVDFSASVAWLRFGDLFGETEGSVCAIMDEVVMTNNYRKYILRDGTIDICRACHRPGESLRHIISGCSRLANGEYLHRHNQVARIIHQQLALKYRLVTSEVPYYRYVPEPVLEDGHITLYWDRSIITDRTIVANRPDIVLIDRTERRAMIVDVTVPHDENLVKAEKDKECKYLDLAHEVVDLWDIDKAIIVPIVVSAHGLMAKSLDKHLKRLTLDGWIKGQMQKAVLLETARIVRKFLSLEP

SEQ ID NO: 11390 - protein, 1194 aa, Furcula furcula
MLTRSKAHLRPPDSSPHSASQPPGPSIDGSLAAVASSESDEYFSPPTSPPPVRRRRGRPPRELGLLEQPAPNRVLAPGGVVRRMRWTLSINENVMRAYYKATEGGTNLTAYRDRMLSLFQALEPAVNVSAQRLSDQVRAIQRGHMLDDAVLDRLRSEVQGSRVFPCIPSSQAVAPAVNTAPAPRPAANSDDDRDDMTTDVSTNVSSQLRSTLEDVVREYRTMPQSLRPRLPRLPMHKRNRALVCALDSLLSSYFDSSEDLADAHALLYCAAITACRVARVKFPDAATRPKPAVPAWQCRIERRIGEARVLIGKLTCFREGNMRPRVMRFVRRAFSGTGIDPREYLSRVTERIDFLKQKVCAWANRIRRYRARVDRYSQNNMFQRDQRWVYRSWERPSQIVGEVQRPDDDAMIRFWRNIWSVPVTHSEGDWIGDVEEVCEPLPEMGPITIGPQDVADAVRPLPNWKAPGPDGLHNFWLKCIRSSHICLASLFQSALESGSLPEFMTTGITHLLHKTDSTTNPKNYRPITCLPTVYKTLTSILRAKIYRHVEDNSIMSSSQNGCRSGARGTKELLLIDMAICQQARRNRKDLSTCWIDYKKAFDSVPHTWLMRVLELYKVNTTLRTFLASCMRQWRTVLLYPGSRQTLGNGDPIRIERGIFQGDSLSPLWFCLALNPLSTLLKSSGLGCRLRRGGQVISHLLYMDDLKLFAPTELRLMGLLKVTETFSNSIRMEFGVDKCAVMHVKRGRMVESRSVQLSDSTDLRTLSGTETYKYLGMSQALNINETAMKQSLRERFLGRLRKVLKSLLSGGNKVRAYNGWVMPVLMYSFGILKWTQTELDTLDRTVRTLLTTYRMHHPRSSVMRLYIPRKCGGRGFLNAKVLHNREICNLREYFLHCSGEMHTDVVAVDNGLTPLSLAKGNWRKPVVLTTGDREAVWQSKELHGRFYRALHGPDVDFTASVAWLRFGDLFGETEGFVCAIMDEVVMTNNYRRYILRDGTIDICRACHRPGESLRHIISGCSRLANGEYLHRHNQVARIIHQQLALKYRLVTSEVPYYRYAAEPVLEDGHITLYWDRSIITDRTIVANKPDIVLIDRTERRAMIVDITVPHDENLVKAEKDKQCKYLDLAHEVVDMWDIDDAIIVPIVVSAHGLMAKSLDKHLKRLSLDGWIKGQIQKAVLLETARIVRKFLSLEP

SEQ ID NO: 11391 - protein, 1196 aa, Furcula furcula
MLTRHKARLRPPDSSPRSASQPLAPSTGGPPAAVASSESDEYFSPPSSPPPVCRRRGRPPRDLGLLGQPAPNRVLVPGGVVRRMKWTLSINENVMRAYYEATEGGTNLTAYRDRMLSLFQTLEPAVNVSAQRLSDQVRAIQRGHMLDDAVLDRLRSEVQGSRVVPCIPSSQAVAPAVNTAPAPRLAATSGDDRDDMSTNISTNVSTQLRSTLEDVVREYRTMPQGLRPRLPRLPMHKRNRALVCALDSLLSSYFDSSEDLADAHSLLYCAAMTACRVARVKFPNSDAATRPRPAVPAWQCRIERRIGEARVLIGKLTCFREGNTRPRVMRFVRRAFSGTGIDPREYFSCVTERIDFLKQKVCAWANRIRRYRARVDRYSQNNMFQRDQRWVYRSWERPSQIGGEVQRPDDDAMIRFWRNIWSVPVTHSEGDWIRDVEQVCEPIPEMGAITIRPQDVADAVRPLPNWKAPGPDGLHNFWLKWLRSSHACLASLFQSAVESGSLPEFLTTGITHLLHKTNSTADPKNYRPITCLPTVYKTLTSILRAKIYRHVEGNSIMSASQNGCRSGARGTKELLLIDMAICQQARRNRRDLSTCWIDYKKAYDSVPHTWLVRVLELYKVNTTLRTFLASCMRQWRTVLLYPGSRQTLGDGEPIRIERGIFQGDSLSPLWFCLALNPLSTLLKSSGLGYRLRRGGQVISHLLYMDDLKLFAPTEVQLMGLLKVTETFSSSIRMEFGVDKCAVMHVKRGRLVESGSIQLSDSTDLRTLSATETYKYLGMSQALGINETDMKQSLRERFLGRLRKVLKSLLSGGNRVRAYNGWVMPVLMYSFGILKWTQTELDTLDRTVRTLLTAYRMHHPRSSVMRLYIPRKCGGRGFLNAKTLHNREIYNLREYFLHCGGEMHTDVVAVDSGLTPLSLAKGNWRRPVVLTTGDREAVWQSKELHGRFYRALHGPDVDFSASVAWLRFGDLFGETEGSVCAIMDEVVMTNNYRKYILRDGTIDICRACHRPGESLRHIISGCSRLANGEYLHRHNQVARIIHQQLALKYRLVTSEVPYYRYVPEPVLEDGHITLYWDRSIITDRSIVANRPDIVLIDRTERRAMIVDVTVPHDENLVKAEKDKECKYLDLAHEVVDLWDIDKAIIVPIVVSAHGLMAKSLDKHLKRLTLDGWIKGQMQKAVLLETARIVRKFLSLEP

SEQ ID NO: 11392 - protein, 1091 aa, Spodoptera exigua
MRWTQAINENVMRAYYGATEGGNNLTAYRVRMLSLFQVLEPAINVSAQRLSDQVRVIQRNRMLDNTVLDRLRTEMGSCAGTSSSRTVAPAMMPPSNRGIVSTAADEESTDTVTHVSTQCNDELRSALECAIREYRNMSPEIRPRLPRLPMHNKNRVLVAALDSQLSNHFDDCEDLSDTHSMMYCAAVAACRVAHVKFPTSDVATRLKPAVPAWQRRIERRIAGARALIGKLICFREGNTRPRVMRFVRRAFSGTDISPQDYMSRVTERIDFLKQKVYAWANRIRRYKRRVQRYTQNRTFRSNERWVYRAWERPDQGVTDTRLPDDDAMCSFWRSIWSVPVSHTEGDWIREVKRACDPIPQMGAINISPQDVARAVRPLPNWKSPGPDGLHNFWIKWFTRSHARLASQFQAALESGSLPQFLTTGVTHLLHKSGSTTEPKNYRPITCLPTVYKVLTSILRSKINSHIDKNNIMSTAQNGCKSGSRGTKELLLIDMTISQQVRRSRKDLSTCWIDYKKAYDSVPHTWLMRVLELYKIDTKLRTFLMSCMRQWSTVLRYPGCRNIQTNSETVRIERGIFQGDSLSPLWFCLALNPLSTLLKNSGLGYRLKRGGQVISHLLYMDDLKLFAPNRLQLMELLKLTETFSSAIRMEFGVDKCAVMHVKRGEIVESVGTQLTDSINLRPLSPTETYKYLGMSEALGINVTDMKQSLRERFFGRLKKVFNSFLSGGNKVRAFNDWVMPVLMYSFGVLKWSQTELDTLDRRVRTMLTAYRMHHPRSSVMRLYIPRKCGGRGFLNAKTLHNREVCSLREYFLTADVGMHRDVVAVDKGLTPLSLASENWRKPVVLDTNARREVWQSKELHGRFFRALHGPDVDQLASVSWLRSGDLFGETEGFVCAIMDEVIMTNNYRRFIVKDGTADICRACHRPEESIRHIISGCSRLANGEYLHRHNLVARIIHQQLALKYSLVGSEVPYYRYEPDPVLENGHITLYWDRSIITDRTIVANKPDIVVVDRNERRAMIVDIAVPHDENLVKAEKDKLIKYIDLAREVVDMWDVDSAVIVPIIVSANGLIAKSLDQHLKRLSLGGWIKGLI

SEQ ID NO: 11393 - protein, 1203 aa, Amphipyra berbera
MLTRARARKQTAHPRSPDSSLSSASQPPESSPPVSAVTPAAAVASSSSDEYYSPPSSPPPVRRRGGARPPACLGPRGQPATNRVPAAGGNVSRMRWTQSINENVMRAYYGATEGGINLTAYRERMLFLFQVLEPAINVSAQRLSDQVRVVQRNRRLDDTVLERLRSEARNSQTVTFPVQAAVQMQPIAVPPRPIHVDGEGDGEAINVSNQCSEELRSALDDAILEFRTTPPEIRPRLPRLPMHGKNRALMCALDSLLSNYFDGSEDLADTHSILYCAAIAACRVAHVKFTENERATRPKPAVPAWQSRIERRIGGARVLIGKLICFREGNNRPRVMRFVRRAFSGTDISPRDYMSRVTERIDFLKQKVYAWANRIRRYKRRVERYTQNRIFQSDQRRVYRAWERPDPGGGDVRLPDDDALSSFWRSIWSVPIAHTEDGWMRDIEQACEPIAEMEPITITPQDVADAARPLPNWKSPGPDGLHNFWLKWLRSSHARLASQLQSSLESGSLPQFLTTGVTHLLYKSGSTAEPKNYRPITCLPTVYKLLTSILRVKITTHIDNNCIMSASQNGCRKGSRGTKELLLIDMTISQQVRRSQKDLSTCWIDYKKAYDSVPHSWLMRVLELYKINTTLRTFLMSCMRHWRTVLRYPGCRRIRGSGEQIRIERGIFQGDSLSPLWFCLALNPLSTLLEGTGLGYQLRRGGQVISHLLYMDDLKLFAPTDLQLMELLKVTENFSNSIRMEFGVDKCAVMHVKRGRIAESEGIQLPNSVQLRSLSPTETYKYLGMSEALGISETDMRQSLRERFFGRLNKLLKSLLSGGNKVRAFNGWVMPVLMYSFGTLKWTQADLDALDRRVRALLTAHRMHHPRSSVMRLYIPRKCGGRGFLNVKTLHNREVYSLREYFLQAEGVMHRDVVAVDKGFTPLALARENWRKPAVLSTNDREVVWQSKELHGRYYRALHGPDVDFSASVSWLRSGNLFGETEGFVCAIMDEVMMTNNYRKYIVKDGTVDICRACHRPGESIRHIVSGCSRLANGEYLHRHNLVARIIHQQLALKYNLVESEVPYYRYVPDPVLENGHATLYWDRSIITDRTIVANKPDIVVIDRSERRTMIVDITVPHDENLVKAEKDKQIKYLDLAHEVVGMWDVDSAVIVPIVVTANGIIAKSLDIHLMRLSLGGWIKGLIQRAVLLDTARIVRRFLSLEP

SEQ ID NO: 11394 - protein, 868 aa, Amphipyra berbera
MRFVRRAFSGTDINPRDYLSRVTERIDFLKQKVYAWANRIRRYKRRVERYTQNRMFHSDERWVYRTWERPDHDVSDTHLPDNDVMNTFWRNIWSMPVTHTEGDWMQEVQRACEPIEEMGDITIVPQDVTSAVRPMANWKSPGPDGLHNFWLKWLRSSHARLASQFQSSLASGSLPEFLTTGVTHLLHKSGSTAEPKNYRPITCLPTVYKLLTSILRAKINSHIINNSIMSVSQNGCRNGSRGTKELLLIDMAISQQVRRSRKDLSTCWIDYKKAYDSVPHTWLMRVLELYKVNTTLCAFLTSCMGQWRTVLHYPGCRQIQGRGEPIRIERGIFQGDSLSPLWFCLALNPLSTLLEGSGLGYRLRRGGQVISHLLYMDDLKLFASNNLQLMKLLKVTETFSNSIRMEFGVDKCAVMHVKRGGIMESVGTQLSDSIHLRSLSSTETYKYLGMSEALGINETDMKQSLRECFYGRLKKVLKSLLSGGNKVRAFNGWVMPVLMYSFGILKWTQTELDALDRRVRTLLTAYRMHHPRSSVMRLYIPRKCGGRGFLNAKTLHNREVCSLREYFLQADVGMHRDVVAVDKGFTPLSLAKENWRKPVVLDTNGRREVWQSKELHGRFYRALHGPDVDFLASVAWLRFGDLFGETEGFVCAIMDEVMMTNNYRKYIVKDGTVDICRACHCPGESIRHIISGCSRLANGEYLHRHNLVARIIHQQLALKYNLVDAEVPYYKYVPDPVLENGHITLYWDRSIITDRTIVANKPDIVVIDRKERLTMIVDITVPHDENLVKAEKDKEIKYQDLAHEVVDMWEIDSAVIVPIVVTANGLIAKSLDHHLTRLSLGSWVKGLIQKAVLLDTARIVRKFLSLKP

SEQ ID NO: 11395 - protein, 993 aa, Amphipyra berbera
MNEQLRSALELAIREYRFTPPNIRPRIPRLPMHRKNRALMCALDSLLSSYFDNSENLEDTHSILYCAAVAACRVAHAKFDNNDRATRPKPAVPAWQCRIERRINEARALIGKLICFREGNTRPRVMRFVRRAFSGTDINPRDYMSRVTERIDFLKQKVYTWANRIRRYKRRVERYTQNRMFHSDERWVYRTWERPDHDVSDAHPPDNDVMNTFWRNIWSMPVTHTEGDWMQEVQRACEPIKEMGDITIVPQDVTSAVRPMANWKSPGPDGLHNFWIKWLRSSHARLASQFQSSLESGSLPEFLTTGVTHLLHKSGSTAEPKNYRPITCLPTVYKLLTSILRAKINSHILYNSIMSVSQNGCKNGSRGTKELLLIDMAISQQVRRSRKDLSTCWIDYKKAYDSVPHTWLMRVLELYKVNTTLCAFLTSCMGQWRTVLHYPGCRQIQGRGEPIRIERGIFQGDSLSPLWFCLALNPLSTLLEGSGLGYRLRRGGQVISHLLYMDDLKLFAPNNLQLMKLLKVTETFSNSIRMEFGMDKCAVMHVKRGGIMESVGTQLSDSIHLRSLSSTETYKYLGMSEALGINETDMKQSLGGRFYGRLKKVLKSLLSGGNKVRAFNGWVMPVLMYSFGILKWTQTELDALDMRVRTLLTAYRMHHPRSSVMRLYIPRKCGGRGFLNAKTLHNREVCSLREYFLQADVGMHRDVVAVDKGFTPLSLAKENWRKPVVLDTNGRREVWQSKELHGRFYRALHGPDVDFLASVAWLRFGDLFGETEGFVCAIMDEVMMTNNYRKYIVKDGTVDICRACHCPGESIRHIISGCSRLANGEYLHRHNLVARIIHQQLDLKYNLVDAEVPYYKYVPDPVLENGHITLYWDRSIITDRTIVANKPDIVVIDRTERLTMIVDITVPHDENLVKAEKDKEIKYQDLAHEVVDMWEVDSTVIVPIVVTANGLIAKSLDHHLTRLSLGSWVKDLIQKAVLLDTARIVRKFLSLRP

SEQ ID NO: 11396 - protein, 1207 aa, Amphipyra berbera
MLTRSRAKAIAQNTRPRPSASSLGSASQPPDSSIVSDVTPAAAVASSSSDEYFSPPSTPPPPPPRRRGRGRPPASLGPRGPPASDRVPAPGGSVQRMRWTPTMNENCMRAYFGATEGGTNLTAYRGRMLSLFQVLEPAVNVSAQRLSDQVRVIQRDHRLTDDALDRLRSEVQSNCIISLQSQTAAQPQVPPMVPPQPIRADEESDDRVTIVSAQCNEQLRSALELAIREYRFTPPNLRPRIPRLPMNRQNRALMCALDSLLSNYFDNSEGLEDTHSILYCAAVAACRVAHVKFDNNDRATRPKPAVPAWQCRIERRINEARALIGKLICFREGNTRPRVMRFVRRAFSGTDINPREYMSRVTERIDFLKQKVYAWANRIRRYKRRVERYTQNRMFHSDERWVYRTWERPEHDVSDTHLPDNDVMNTFWRNIWSMPVTHTEGDWMQEVQRACEPIEEMGDIIIVPQDVTSAVRPMVNWKSPGPDGLHNFWLKWLRSSHARLASQFQSSLESGSLPPFLTTGITHLLHKSGSTVEPKNYRPITCLPTIYKLLTSILRAKINTHIINNSIMSASQNGCKNGSRGTKELLLIDMAISQQVRRSRKDLSTCWIDYKKAYDSVPHTWLMRVLELYKVNTTLCAFLTSCMGQWRTVLHYPGCRQIQGRGEPIRIERGIFQGDSLSPLWFCLALNPLSTLLEGSGLGYRLRRGGQVISHLLYMDDLKLFAPNNLQLMKLLKVTETFSNSIRMEFGVDKCAVMHVKRGGIMESVGTQLSNSIHLRSLSSTETYKYLGMSEALGINETDMKQSLRERFYGRLKKVLKSLLSGGNKVRAFNGWVMPVLMYSFGILKWTQTELDALDRRVRTLLTAYRMHHPRSSVMRLYIPRKCGGRGFLNAKTLHNREVCSLREYFLQADVGMHRDVVAVDKGFTPLSLAKENWRKPVVLDTNGRREVWQSKELHGRFYRALHGPDVDFLASVAWLRFGDLFGETEGFVCAIMDEVMMTNNYRKYIVKDGTVDICRACHCPGESIRHIISGCSRLANGEYLHRHNLVARIIHQQLALKYNLVDAEVPYYKYVPDPVLENGHITLYWDRSIITDRTIVANKPDIVVIDRTERLTMIVDITVPHDENLVKAEKDKEIKYQDLAHEVVDMWEVDSAVIVPIVVTANGLIAKSLDHHLTRLSLGSWVKGLIQKAVLLDTARIVRKFLSLRP

SEQ ID NO: 11397 - protein, 1205 aa, Amphipyra berbera
MLTRSRAKALTETTRPRSSAPSLSSASQPPDSSIVSDVTPAAAVASSLSDEYFSPPTSPPPARRRGRGRPPDSLRPRGPLASDRVPAAGGSVQRMRWTPTMNENCMRAYFGATEGGTNLTAYRGRMLSLFQVLEPTVNVSAQRLSDQVRVIQRDHRLTDAALDRLRSEVQSNAIISLQSQTAAQPRTPTVVPPLPTHGNEESDDRVTNVSTQCNEQLRSALELAIQEYRFTPPNIRPRIPRLPMHRKNRALMCALDSLLSSYFDNSENLEDTHSILYCAAVAACRVAHAKFDNSDKATRPKRAVPAWQCRIERRINEARALIGKLICFREGNTRPRVMRFVRRAFSGTDINPRDYMSRVTERIDFLKQKVYAWANRIRRYKRRVERYTQNRMFHSDERWVYRTWERPDHDVNDTHPPDNDVMNTFWRNIWSMPVTHTEGDWMHEVQRACEPIEEMGDITIVPQDVTSAVRPMANWKSPGPDGLHNFWIKWLRSSHARLASQFQSSLESGSLPEFLTTGVTHLLHKSGSTAEPKNYRPITCLPTVYKLLTSILRAKINSHIINNSIMSVSQNGCKNGSRGTKELLLIDMAISQQVRRSRKDLSTCWIDYKKAYDSVPHTWLMRVLELYKVNTTLCAFLTSCMGQWRTVLHYPGCRQIQGRGEPIRIERGIFQGDSLSPLWFCLALNPLSTLLEGSGLGYRLRRGGQVISHLLYMDDLKLFAPNNLQLMKLLKVTETFSNSIRMEFGVDKCAVMHVKRGGIMESVGTQLSDSIHLRSLSSTETYKYLGMSEALGINETDMKQSLRERFYGRLKKVLKSLLSGGNKVRAFNGWVMPVLMYSFGILKWTQTELDALDRRVRTLLTAYRMHHPRSSVMRLYIPRKCGGRGFLNAKTLHNREVCSLREYFLQADMGMHRDVVAVDKGFTPLSLAKENWRKPVVLDTNGRREVWQSKELHGRFYRALHGPDVDFLASVAWLRFGGLFGETEGFVCAIMDEVILTNNYRKYIVKDGTVDICRACHCPGESIRHIISGYSRLANGEYLHRHNLVARIIHQQLALKYNLVDAEVPYYKYVPDPVLENGHITLYWDRSIITDRTIVANKPDIVVIDRSERLAMIVDITVPHDENLVKAEKDKEIKYQDLAHEVVDMWEVDSAVIVPIVVTANGLIAKSLDQHLTRLALGSWIKGLMQKAVLLDTARIVRKFLSLRP

SEQ ID NO: 11398 - protein, 1197 aa, Noctua janthe
MLTRSATRRARLSPPDPSLSSASPPPESSPIVSAVTPAVAVASSSSDEYFSPPTTPPPVRRRGGRRPPDGLGPRGPPASDRVPAPGGSVPRMRWTQSINANVMRAYYGATEGGNNLTAYRVRMLSLFQVLEPAVNVSAQRLSDQVRVIQRNGMLDDTVLDRLRTEMQSSHVIATPPQTVVPPQSTIIPTHDNNVSNDMVTNVSTQCNEEMRCALEGAIREYRFMQPDLRPRVPRLPMHNKNKVLVAVLDSQLSNYFDNCENLTDAHSVLYCAAVAACRVAHVKFSDDRATRPKPAVPSWQYRIERRIGKARALIGKLICFREGNTRPRVMRFVRRAFSGTDISARDYMSRVTERIDFLKQKVYAWANRIRRYKRRVDRYTQNRTFQRDERWVYRAWERPDQGVADTHLPDDDAMCSFWRSIWSVPVSHTEGEWTREVERACDLVPEMGAITISPQDVVRAVRPLPNWKSPGPDGLHNFWIKWFTRSHARLAILFQSALESGSLPEFLTTGITHLLHKSGSTAEPKNYRPIACLPTVYKVLTSILRAKINKHIDDNSVMSASQNGCRNGSRGTKELLLIDMAISQQVRRSRRDLSTCWIDYKKAYDSVPHTWLMRVLELYKVDSTLRIFLMSCMGQWRTVLRYPGCRQIQRNSEPIRIERGIFQGDSLSPLWFCLALNPLSTLLEDSGLGYRLRRGGQVISHLLYMDDLKLFAPNDLQLMELLKVTETFSSAIRMEFGVDKCAVMHVKRGEIVESVGTQLSDSINLRSLSATETYKYLGMSEALGINVADMKQSLKERFFGRLKKVFNSLLSGGNKVRAFNGWVMPVLMYSFGILKWTQTELDALDRRVRTLLTTYRMHHPRSSVMRLYIPRRCGGRGFLNAKTLHNREIYSLREYFLETDVGMHRDVVAVDKGLTPLSLAKENWRKPVVLDTNDRMEVWQSKELHGRFFRALHGPDVDLPASVAWLRSGDLFGETEGFVCAIMDEVMMTNNYRRFIVKDGTVDICRACHRPGESIRHIISGCSRLANGEYLHRHNLVARIIHQQLALKYNLVESEVPYYKYVPDPVLENGNITLYWDRSIVTDRTIVANKPDIVVVDRSERRAMIVDITVPHDGNLVKAEKDKQIKYLDLAHEVVDMWDVDSAIIVPIVVSAHGLIAKSLDQYLRRLSLGSWIKGLIQKAVLLDTARIVRRFLSLEP

SEQ ID NO: 11399 - protein, 1106 aa, Noctua janthe
MRWTQSINANVMRAYYGATEGGNNLTAYRVRMLSLFQVLEPAVNVSAQRLSDQVRVIQRNGMLDDTVLDRLRTEMQSSHVIATPPQTVVPPQSTIIPTHDNNVSNDMVTNVSTQCNEEMRCALEGAIREYRFMQPDLRPRVPRLPMHNKNKVLVAVLDSQLSNYFDNCENLTDAHSVLYCAAVAACRVAHVKFSDDRATRPKPAVPSWQYRIERRIGEARALIGKLICFREGNTRPRVMRFVRRAFSGTDISARDYMSRVTERIDFLKQKVYAWANRIRRYKRRVDRYTQNRTFQRDERWVYRAWERPDQGVADTHLPDDDAMCSFWRSIWSVPVSHTEGEWTREVERACDLVPEMGAITISPQDVVRAVRPLPNWKSPGPDGLHNFWIKWFTRSHARLAILFQSALESGSLPEFLTTGITHLLHKSGSTAEPKNYRPIACLPTVYKVLTSILRAKINKHIDDNSVMSASQNGCRNASRGTKELLLIDMAISQQVRRSRRDLSTCWIDYKKAYDSVPHTWLMRVLELYKVDSTLRIFLMSCMGQWRTVLRYPGCRQIQRNSEPIRIERGIFQGDSLSPLWFCLALNPLSTLLEDSGLGYRLRRGGQVISHLFYMDDLKLFAPNDLQLMELLKVTETFSSAIRMEFGVDKCAVMHVKRGEIVESVGTQLSDSINLRSLSATETYKYLGMSEALGINVADMKQSLKERFFGRLKKVFNSLLSGGNKVRAFNGWVMPVLMYSFGILKWTQTELDALDRRVRTLLTTYRMHHPRSSVMRLYIPRRCGGRGFLNAKTLHNREIYSLREYFLETDVGMHRDVVAVDKGLTPLSLAKENWRKPVVLDTNDRMEVWQSKELHGRFFRALHGPDVDLPASVAWLRSGDLFGETEGFVCAIMDEVMMTNNYRRFIVKDGTVDICRACHRPGESIRHIISGCSRLANGEYLHRHNLVARIIHQQLALKYNLVESEVPYYKYVPDPVLENGNITLYWDRSIVTDRTIVANKPDIVVVDRSERRAMIVDITVPHDGNLVKAEKDKQIKYLDLAHEVVDMWDVDSAIIVPIVVSAHGLIAKSLDQYLRRLSLGSWIKGLIQKAVLLDTARIVRRFLSLEP

SEQ ID NO: 11400 - protein, 1197 aa, Noctua janthe
MLTRSATRRARLSPPDPSLSSASPPPESSPIVSAVTPAVAVASSSSDEYFSPPTTPPPVRRRGGRRPPDGLGPRGPPASDRVPAPGGSVPRMRWTQSINANVMRAYYGATEGGNNLTAYRVRMLSLFQVLEPAVNVSAQRLSDQVRVIQRNGMLDDTVLDRLRTEMQSSHVIATPPQTVVPPQSTIIPTHDNNVSNDMVTNVSTQCNEEMRCALEGAIREYRFMQPDLRPRVPRLPMHNKNKVLVAVLDSQLSNYFDNCENLTDAHSVLYCAAVAACRVAHVKFSDDRATRPKPAVPSWQYRIERRIGEARALIGKLICFREGNTRPRVMRFVRRAFSGTDISARDYMSRVTERIDFLKQKVYAWANRIRRYKRRVDRYTQNRTFQRDERWVYRAWERPDQGVADTHLPDDDAMCSFWRSIWSVPVSHTEGEWTREVERACDLVPEMGAITISPQDVVRAVRPLPNWKSPGPDGLHNFWIKWFTRSHARLAILFQSALESGSLPEFLTTGITHLLHKSGSTAEPKNYRPIACLPTVYKVLTSILRAKINKHIDDNSVISASQNGCRNGSRGTKELLLIDMAISQQVRRSRRDLSTCWIDYKKAYDSVPHTWLMRVLELYKVDSTLRIFLMSCMGQWRTVLRYPGCRQIQRNSEPIRIERGIFQGDSLSPLWFCLALNPLSTLLEDSGLGYRLRRGGQVISHLLYMDDLKLFAPNDLQLMELLKVTETFSSAIRMEFGVDKCAVMHVKRGEIVESVGTQLSDSINLRSLSATETYKYLGMSEALGINVADMKQSLKERFFGRLKKVFNSLLSGGNKVRAFNGWVMPVLMYSFGVLKWTQTELDALDRRVRTLLTTYRMHHPRSSVMRLYIPRRCGGRGFLNANTLHNREICSLREYFLETDVGMHRDVVAVDKGLTPLSLAKENWRKPVVLDTNDRMEVWQSKELHGRFFRALHGPDVDLPASVAWLRSGDLFGETEGFVCAIMDEVMMTNNYRRFIVKDGTVDICRACHRPGESIRHIISGCSRLANGEYLHRHNLVARIIHQQLALKYNLVESEVPYYKYVPDPVLENGNITLYWDRSIVTDRTIVANKPDIVVVDRSERRAMIVDITVPHDGNLVKAEKDKQIKYLDLAHEVVDMWDVDSAIIVPIVVSAHGLIAKSLDQYLRRLSLGSWIKGLIQKAVLLDTARIVRRFLSLEP

SEQ ID NO: 11401 - protein, 1197 aa, Noctua janthe
MLTRSATRRARLSPPDPSLSSASPPPESSPIVSAVTPAVAVASSSSDEYFSPPTTPPPVRRRGGRRPPDGLGPRGPPASDRVPAPGGSVPRMRWTQSINANVMRAYYGATEGGNNLTAYRVRMLSLFQVLEPAVNVSAQRLSDQVRVIQRNGMLDDTVLDRLRTEMQSSHVIATPPQTVVPPQSTIIPTHDNNVSNDMVTNVSTQCNEEMRCALEGAIREYRFMQPDLRPRVPRLPMHNKNKVLVAVLDSQLSNYFDNCENLTDAHSVLYCAAVAACRVAHVKFSDDRATRPKPAVPSWQYRIERRIGEARALIGKLICFREGNTRPRVMRFVRRAFSGTDISARDYMSRVTERIDFLKQKVYAWANRIRRYKRRVDRYTQNRTFQRDERWVYRAWERPDQGVADTHLPDDDAMCSFWRSIWSVPVSHTEGEWTRGVERACDLVPEMGAITISPQDVVRAVRPLPNWKSPGPDGLHNFWIKWFTRSHARLAILFQSALESGSLPEFLTTGITHLLHKSGSTAEPKNYRPIACLPTVYKVLTSILRAKINKHIDDNSVMSASQNGCRNGSRGTKELLLIDMAISQQVRRSRRDLSTCWIDYKKAYDSVPHTWLMRVLELYKVDSTLRIFLMSCMGQWRTVLRYPGCRQIQRNSEPIRIERGIFQGDSLSPLWFCLALNPLSTLLEDSGLGYRLRRGGQVISHLLYMDDLKLFAPNDLQLMELLKVTETFSSAIRMEFGVDKCAVMHVKRGEIVESVGTQLSDSINLRSLSATETYKYLGMSEALGINVADMKQSLKERFFGRLKKVFNSLLSGGNKVRAFNGWVMPVLMYSFGILKWTQTELDVLDRRVRTLLTTYRMHHPRSSVMRLYIPRRCGGRGFLNAKTLHNREIYSLREYFLETDVGMHRDVVAVDKGLTPLSLAKENWRKPVVLDTNDRMEVWQSKELHGRFFRALHGPDVDLPASVAWLRSGDLFGETEGFVCAIMDEVMMTNNYRRFIVKDGTVDICRACHRPGESIRHIISGCSRLANGEYLHRHNLVARIIHQQLALKYNLVESEVPYYKYVPDPVLENGNITLYWDRSIVTDRTIVANKPDIVVVDRSERRAMIVDITVPHDGNLVKAEKDKQIKYLDLAHEVVDMWDVDSAIIVPIVVSAHGLIAKSLDQYLRRLSLGSWIKGLIQKAVLLDTARIVRRFLSLEP

SEQ ID NO: 11402 - protein, 1197 aa, Noctua janthe
MLTRSATRRARLSPPDPSLSSASPPPESSPIVSAVTPAVAVASSSSDEYFSPPTTPPPARRRGGRRPPDGLGPRGPPASDRVPAPGGSVPRMRWTQSINANVMRAYYGATEGGNNLTAYRVRMLSLFQVLEPAVNVSAQRLSDQVRVIQRNGMLDDTVLDRLRTEMQSSHVIATPPQTVVPPQSTIIPTHDNNVSNDMVTNVSTQCNEEMRCALEGAIREYRFMQPDLRPRVPRLPMHNKNKVLVAVLDSQLSNYFDNCENLTDAHSVLYCAAVAACRVAHVKFSDDRATRPKPAVPSWQYRIERRIGEARALIGKLICFREGNTRPRVMRFVRRAFSGTDISARDYMSRVTERIDFLKQKVYAWANRIRRYKRRVDRYTQNRTFQRDERWVYRAWERPDQGVADTHLPDDDAMCSFWRSIWSVPVSHTEGEWTREVERACDLVPEMGAITISPQDVVRAVRPLPNWKSPGPDGLHNFWIKWFTRSHARLAILFQSALESGSLPEFLTTGITHLLHKSGSTAEPKNYRPIACLPTVYKVLTSILRAKINKHIDDNSVMSASQNGCRNGSRGTKELLLIDMAISQQVRRSRRDLSTCWIDYKKAYDSVPHTWLMRVLELYKVDSTLRIFLMSCMGQWRTVLRYPGCRQIQRNSEPIRIERGIFQGDSLSPLWFCLALNPLSTLLEDSGLGYRLRRGGQVISHLLYMDDLKLFAPNDLQLMELLKVTETFSSAIRMEFGVDKCAVMHVKRGEIVESVGTQLSDSINLRSLSATETYKYLGMSEALGINVADMKQSLKERFFGRLKKVFNSLLSGGNKVRAFNGWVMPVLMYSFGILKWTQTELDALDRRVRTLLTTYRMHHPRSSVMRLYIPRRCGGRGFLNAKTLHNREICSLREYFLETDVGMHRDVVAVDKGLTPLSLAKENWRKPVVLDTNDRMEVWQSKELHGRFFRALHGPDVDLPASVAWLRSGDLFGETEGFVCAIMDEVMMTNNYRRFIVKDGTVDICRACHRPGESIRHIISGCSRLANGEYLHRHNLVARIIHQQLALKYNLVESEVPYYKYVPDPVLENGNITLYWDRSIVTDRTIVANKPDIVVVDRSERRAMIVDITVPHDGNLVKAEKDKQIKYLDLAHEVVDMWDVDSAIIVPIVVSAHGLIAKSLDQYLRRLSLGSWIKGLIQKAVLLDTARIVRRFLSLEP

SEQ ID NO: 11403 - protein, 1197 aa, Noctua janthe
MLTRSATRRARLSPPDPSLSSASPPPESSPIVSAVTPAVAVASSSSDEYFSPPTTPPPVRRRGGRRPPDGLGPRGPPASDRVPAPGGSVPRMRWTQSINANVMRAYYGATEGGNNLTAYRVRMLSLFQVLEPAVNVSAQRLSDQVRVIQRNGMLDDTVLDRLRTEMQSSHVIATPPQTVVPPQSTIIPTHDNNVSNDMVTNVSTQCNEEMRCALEGAIREYRFMQPDLRPRVPRLPMHNKNKVLVAVLDSQLSNYFDNCENLTDAHSVLYCAAVAACRVAHVKFSDDRATRPKPAVPSWQYRIERRIGEARALIGKLICFREGNTRPRVMRFVRRAFSGTDISARDYMSRVTERIDFLKQKVYAWANRIRRYKRRVDRYTQNRTFQRDERWVYRAWERPDQGVADTHLPDDDAMCSFWRSIWSVPVSHTEGEWTREVERACDLVPEMGAITISPQDVVRAVRPLPNWKSPGPDGLHNFWIKWFTRSHARLAILFQSALESGSLPEFLTTGITHLLHKSGSTAEPKNYRPIACLPTVYKVLTSILRAKINKHIDDNSVMSASQNGCRNGSRGTKELLLIDMAISQQVRRSRRDLSTCWIDYKKAYDSVPHTWLMRVLELYKVDSTLRIFLMSCMGQWRTVLRYPGCRQIQRNSEPIRIERGIFQGDSLSPLWFCLALNPLSTLLEDSGLGYRLRRGGQVISHLLYMDDLKLFAPNDLQLMELLKVTETFSSAIRMEFGVDKCAVMHVKRGEIVESVGTQLSDSINLRSLSATETYKYLGMSEALGINVADMKQSLKERFFGRLKKVFNSLLSGGNKVRAFNGWVMPVLMYSFGILKWTQTELDALDRRVRTLLTTYRMHHPRSSVMRLYIPRRCGGRGFLNAKTLHNREIYSLREYFLETDVGMHRDVVAVDKGLTPLSLAKENWRKPVVLDTNDRMEVWQSKELHGRFFRALHGPDVDLPASVAWLRSGDLFGETEGFVCAIMDEVMMTNNYRRFIVKDGTVDICRACHRPGESIRHIISGCSRLANGEYLHRHNLVARIIHQQLALKYNLVESEVPYYKYVPDPVLENGNITLYWDRSIVTDRTIVANKPDIVVVDRSERRAMIVDITVPHDGNLVKAEKDKQIKYLDLAHEVVDMWDVDSAIIVPIVVSAHGLIAKSLDQYLRRLSLGSWIKGLIQKAVLLDTARIVRRFLSLEP

SEQ ID NO: 11404 - protein, 1109 aa, Mythimna ferrago
MRWTQSTNENVMRAYYGATEGGNNLTAYRVRMLSVFQVLEPAVNVSAQRLSDQVRVIQRNHMLDDTVLDRLRTEMSDRVITAPSLPVVPVVAPPPSHISFHTDEVSTDTVTNVSTQCNNELRSALECAIREYRNMPLEFRPRLPRLPMRNKNKALVAALDSQLSNYFDDCEDLTDTHSIMYCAAVAACRVAHVKFPNSDVATRPKPAVPAWQCRIERRIGGARALIGKLICFREGNTRPRVMRFVRRAFSGTDISPRDYMSRVTERIDFLKQKVYAWANRIRRYKRRVERYTQNSTFRSNERWVYRAWERPDQGVTDTRLPDDDAMCLFWRNIWSVPVSHTEGGWTREVERACESITEMGAITISPQDVARAVRPLPNWKSPGPDGLHNFWIKWLQRSHARLASQYQAALESGSLPEFLTTGVTHLLHKSGSTAEPKNYRPITCLPTVYKVLTSILRAKINHHVDNNAIMSASQNGCRNGSRGTKELLLIDMAISQQVRRSRKDLSTCWIDYKKAYDSVPHTWLMRVLELYKVDATLRTFLMSCMRQWRTVLRYPGCRNIQRNSEPVRIERGIFQGDSLSPLWFCLALNPLSTLLENSGLGYRLKRGGQTISHLLYMDDLKLFAPNNLQLMELLKVTETFSSAIRMEFGVDKCAVMHIKRGEIVESVGIQLSDSIHLRSLSPTETYKYLGMSEALGINATDMKQSLRERFFGRLKKVLNSLLSGGNKVRAFNGWVMPVLMYAFGVLKWTQTELDALDRRVRTLLTAYRMHHPRSSVMRLYIPRKCGGRGFLNAKTLHNREVCSLREYFLAADGGMHRAVVAVDKGLTPLSLANENWRKPVVLDTNVRKEVWQSKELHGRFFRALHGPDVDQLASVAWLRVGDLFGETEGFVCAIMDEVIMTNNYRRFIVKDGTVDICRACHRPGESIRHIISGCSRLANGEYLHRHNLVARIIHQQLALKYSLVESEVPYYRYVPDPVLDSGDITLYWDRSIITDRTIVANKPDIVVVDRRERRAMIVDISVPHDENLVKAEKDKQIKYIDLAREVVDMWNVDSAIIVPIVVSANGLIAKSLDQHLRRLSLSGWIKGLIQKAVLLDTARIVRRFLSLEP

SEQ ID NO: 11405 - protein, 1078 aa, Mythimna ferrago
MLSLFQVLEPAVNVSAQRLSDQVRVIQRNNMLDDTVLDRLRTEMSNRVITPPSQPVVPVVVPQSSHISLHTDEVSTDTVTNVSTQCNNELRSALECAIREYRNMPLELRPRLPRLPMHNKNKALVAALDSQLSNYFDDCEDLTDTHSIMYCAAVAACRVAHVKFPNSDVATRPKPAVPAWQCRIERRIGGARALIGKLICFREGNTRPRVMRFVRRAFSGTDISPRDYMSRVTERIDFLKQKVYAWANRIRRYKRRVERYIQNSTFRSNERWVYRAWERPDQGVTDTRPPDDDAMCSFWRNIWSVPVSHTEGGWTREVERACESVTEMGAITISPQDVARAVRPLPNWKSPGPDGLHNFWIKWLQRSHARLASQYQAALESGSLPEFLTTGVTHLLHKSGSTAEPKNYRPITCLPTVYKVLTSILRAKINHHVDNNAIMSASQNGCRNGSRGTKELLLIDMAISQQVRRSRKDLSTCWIDYKKAYDSVPHTWLMRVLELYKVDATLRTFLMSCMRQWRTVLRYPGCRNIQRNSEPVRIERGIFQGDSLSPLWFCLALNPLSTLLENSGLGYRLKRGGQVISHLLYMDDLKLFAPNNLELMELLKVTETFSSAIRMEFGVDKCAVMHIKRGEIVESVGIQLSDSIHLRSLSPTETYKYLGMSEALGINATDMKQSLRERFFGRLKKVLNSLLSGGNKVRAFNGWVMPVLMYAFGVLKWTQTELDALDRRVRTLLTAYRMHHPRSSVMRLYIPRKCGGRGFLNAKSLHNREVCSLREYFLAADGGMHRDVVAVDKGLTPLSLANENWRKPVVLDTNVRREVWQSKELHGRFFRALHGPDVDQLASVAWLRVGDLFGETEGFVCAIMDEVIMTNNYRRFIVKDGTVDICRACHRPGESIRHIISGCSRLANGEYLHRHNLVARIIHQQLALKYSLVESEVPYYRYVPDPVLDSGDITLYWDRSIITDRTIVANKPDIVVVDRSERRAMIVDISVPHDENLAKAEKDKQIKYIDLAREVVDMWEVDSAIIVPIVVSANGLIAKSLDQHLRRLSLGDWIKGLIQKAVLLDTARIVRRFLSLEP

SEQ ID NO: 11406 - protein, 1048 aa, Mythimna ferrago
MLDDTVLDRLRTEMSDRVITPPSQPVVPAVVPPSSYISFHTDEVSSDTVTNVSNQCNSELRSALECAIREYRNIPPELRPRIPRLPMCNKNRALVAALDSQLSNYFDDCEDLTDTHSIMYCAAVAACRVAHVKFPNSDVATRPKPAVPAWQCRIERRIGGARALIGKLICFREGNTRPRVMRFVRRAFSGTDISPRDYMSRVTERIDFLKQKVYAWANRIRRYKRRVERYTQNRTFRSNERWVYRAWERPDQGVTDARLPDDDAMSSFWRSIWSVPVSHTEGDWTREVERACDPIPQMGAIDISPQDVARAVRPLPNWKSPGPDGLHNFWIKWFTRSHARLAYQFQSALESGSLPQFLTTGITHLLHKSGSTAEPKNYRPITCLPTVYKVLTSILRSKINSHIDENSIMSPSQNGCRNGSRGTKELLLIDMTISQQVRRSRKDLSTCWIDYRKAYDSVPHTWLMRVLELYKIDTTLRTFLMSCMRQWSTVLRYPGCRNIQRNSEPVRIERGIFQGDSLSPLWFCLALNPLSILLENSGLGYRLKRGGQVISHLLYMDDLKLFAPNNLQLMELLKVTEIFSSAIRMEFGVDKCAVMHVKRGEVVESVSTQLTDSINLRSLSPTETYKYLGMSEALGISITGMKQSLRERFFGRLKKVFNSLLTGGNKVRAFNGWVMPVLMYSFGVLKWTQTELDALDRRVRTLLTAYRMHHPRSSVMRLYIPRKCGGRGFLNAKTLHNREVCSLREYFLAADVGMHRDVVAVDKGLTPLSLANENWRKPIVLDTNDRREVWQSKELHGRFFRALHGPDVDQLASVAWLRFGDLFGETEGFVCAIMDEVIMTNNYRRFIVKDGTVDICRACHRPGESIRHIISGCSRLANGEYLHRHNLVARIIHQQLALKYSLVESEVPYYRYEPDPVLDNGHITLYWDRPIITDRTIVANKPDIVVVDRSERRAMIVDISVPHDENLVKAEKDKQIKYIDLAREVVDMWEVDSAVIVPIVVSANSLIAKSLDQHLRRLSLGDWIKGLIQKAVLLDTARIVRRFLSLEP

SEQ ID NO: 11407 - protein, 1076 aa, Mythimna ferrago
MLSLFQVLEPAVNVSAQRLSDQVRVIQRNRMLDDAVLDRLRLESRNGRVSPVSPPAAVQLQPIVSPRPDHVGEDDDDGAISVSTQCNARLWSALEDAFREYRSIPPELRPRLPRLPMHRKNRALVCALDSQLSNCFDSSEDLTDTHSILYCAAAAACRVAHVKIPNSDRATRPAKPAWQCRIERRIGEARALIGKLICFREGNTRPRVMRFVRRAFSGTDVSPRDYLPRITERIDFLRQKVYAWANRIRRYKRRVERYTQNRAFQSNERWVYRAWERPDQSVIDTRLPDDDAMYSFWRSIWSVPVSHTEGDWTRGVERECELIPEMGAITISPQDVARAVRPLPNWKSPGPDGLHNFWLKWFKSSHARLASQFQSALESGSLPQFLTTGITHLLHKSGSTAEPKNYRPITCLPTVYKVLTSILRAKINSHIETNSIMSASQNGCRNGSRGTKELLLIDVAISQQVRRSRRDLSTCWIDYKKAYDSVPHTWLMRVLELYKIDVTLRTFLMSCMGQWRTVLHYPGCRRVSENSEPLRIERGIFQGDSLSPLWFCLALNPLSTLLEGSGLGYRLRREGQVISHLLYMDDLKLFASNNLQLMELLKVTETFSSAIRMEFGLDKCAVMHVKRGEIMESVGTQLSDSIHLRSLSSTETYKYLGMSEALGINAADVKQSLRERFFCRLNKVLKSLLSGGNKVRAFNGWVMPVLMYSFGILKWTQTELDALDRRVRTLLTANRMHHPRSSVMRLYIPRKCGGRGFLNAKTLHNREVCSLREYFLETDVGMHRDVVAVDKGLTPLSLASENWRKPIVMDTNERKEVWKGKELHGRFYRALHGPDVDLLASVSWLRFGNLFGETEGFVFAIMDEVMMTNNYRKYIVKDGTVDICRACHRPGESIRHIISGCSHLANGDYLHRHNLVARIIHQQLALKYNLVESEVPYYRYVPDPVLENGSVTLYWDRSIITDRTIVANKPDIVVIDRLERRTMIVDIAVPHDENLVKAEKDKQTKYLDLARDVVDMWEVDKAIIVPIVVTANGLIAKSLDQHLRRLSLGSWIKGLIQKAVLLDTARIVRRFLSQEP

SEQ ID NO: 11408 - protein, 1001 aa, Mythimna ferrago
MVTHVSTECNNELRSALECAIREYRNIPPELRPRIPRLPMCNKNRALVAALDSQLSNYFDDCEDLTDTHSIMYCAAVAACRVAHVKFPNTDVAARPKPAVPAWQCRIERRIGGARALIGKLICFREGNTRPRAMRFVRRAFSGTDISPRDYMSRVTERIDFLKQKVYAWANRIRRYKRRVERYIQNSTFRSNERWVYRTWERPDQGVTDTHLPDDDAMCSFWRNIWSVPVSHTEGGWTREVERACESITEMGAITISPQDVARAVRPLPNWKSPGSDGLHNFWIKWLQRSHARLASQYQTALESGSLPEFLTTGVTHLLHKSGSTAEPKNYRPITCLPTVYKVLTSILRAKINNHVDNNAIMSASQNGCRNGSRGTKELLLIDMAISQQVRRSRKDLSTCWIDYKKAYDSVPHTWLMRVLELYKVDATLCTFLMSCMRQWRTVLRYPGCRNIQRNSEPVRIERGIFQGDSLSPLWFCLALNPLSTLLENSGLGYRLKRGGQVISHLLYMDDLKLFAPNNLQLMELLKVTETFSSAIRMEFGVDKCAVMHIKRGEIVESVGTQLSDSIHLRSLSPTETYKYLGMSEALGINATDMKQSLKERFFGRLKKVLNSLLSGGNKVRAFNGWVMPVLMYAFGVLKWTQTELDALDRKVRTLLTAYRMHHPRSSVMRLYIPRKCGGRGFLNAKTLHNREVCSLREYFLAADMGMHRDVVAVDKGLTPLSLANENWRKPVVLDTNVRKEVWQSKELHGRFFRALHEPGVDQLASVAWLRVGDLFGETEGFVCAIMDEVIMTNNYRRFIVKDGTVDICRACHRPGESIRHIISGCSRLANGEYLHRHNLVARIIHQQLAPKYSLVESEVPYYRYVPDPVLDNGDITLYWDRSIITDRTIVANKPDIVVVDRSERRAMIVDISVPHDENLAKAEKDKQIKYIDLAREVVDMWEVDSAIIVPIVVSANGLIAKSLDQHLRRLSLGDWIKGLIQKAVLLDTARIVRRFLSLEP

SEQ ID NO: 11409 - protein, 1200 aa, Mythimna ferrago
MLTRAAARRARPPPLASSLSSASLPPEPSLTVSAVTPAAAAASSSSDEYYSPPTTPPPARRRGGRRPPACLGPRGPPVSDRVPAAGGSVPRMRWTQSTNENVMRAYYGATEGGNNLTAYRVRMLSLFQVLEPAVNVSAQRLSDQVRVIQRNNMLDDTVLDRLRTEMSNRVITPPSQPVVPVVVPQSSHISLHTDEVSTDTVTNVSTQCNNELRSALECAIREYRNMPLELRPRLPRLPMHNKNKALVAALDSQLSNYFDDCEDLTDTHSIMYCAAVAACRVAHVKFPNSDVATRPKPAVPAWQCRIERRIGGARALIGKLICFREGNTRPRVMRFVRRAFSGTDISPRDYMSRVTERIDFLKQKVYAWANRIRRYKRRVERYIQNSTFRSNERWVYRAWERPDQGVTDTRPPDDDAMCSFWRNIWSVPVSHTEGGWTREVERACESVTEMGAITISPQDVARAVRPLPNWKSPGPDGLHNFWIKWLQRSHARLASQYQAALESGSLPEFLTTGVTHLLHKSGSTAEPKNYRPITCLPTVYKVLTSILRAKINHHVDNNAIMSASQNGCRNGSRGTKELLLIDMAISQQVRRSRKDLSTCWIDYKKAYDSVPHTWLMRVLELYKVDATLRTFLMSCMRQWRTVLRYPGCRNIQRNSEPVRIERGIFQGDSLSPLWFCLALNPLSTLLENSGLGYRLKRGGQVISHLLYMDDLKLFAPNNLQLMELLKVTETFSSAIRMEFGVDKCAVMHIKRGEIVESVGIQLSDSIHLRSLSPTETYKYLGMSEALGINATDMKQSLRERFFGRLKKVLNSLLSGGNKVRAFNGWVMPVLMYAFGVLKWTQTELDALDRRVRTLLTAYRMHHPRSSVMRLYIPRKCGGRGFLNAKSLHNREVCSLREYFLAADGGMHRDVVAVDKGLTPLSLANENWRKPVVLDTNVRREVWQSKELHGRFFRALHGPDVDQLASVAWLRVGDLFGETEGFVCAIMDEVIMTNNYRRFIVKDGTVDICRACHRPGESIRHIISGCSRLANGEYLHRHNLVARIIHQQLALKYSLVESEVPYYRYVPDPVLDSGDITLYWDRSIITDRTIVANKPDIVVVDRSERRAMIVDISVPHDENLAKAEKDKQIKYIDLAREVVDMWEVDSAIIVPIVVSANGLIAKSLDQHLRRLSLGDWIKGLIQKAVLLDTARIVRRFLSLEP

SEQ ID NO: 11410 - protein, 1192 aa, Eilema sororculum
MLTRAQAKRNRSAPITSPDSSLSSAAQPPAVEPAASSSSSSDEFFSPPTSPTPVRRPGRGRPPTCLGPRRPPASNGAPTTGGDVHRMRWTNSINENVMRAYFAATEGGTNLSAYRTRMLPLFQALEPSINVSAQRLSDQVRVIQRNRMLNETVLETLRLECLRNICVTPAPVPVPASTVELNDDTCVAPDDTPIPVSIQYNEEIKEALECALREYRSMPVHVRPRLPRLPIHRRNIALVSALDSLLPRYLENSENLGDTHSILYCTAVAACHMAGAKFPIKDPAIRPKSAIPAWQCRIERRVTEARVLIGKLICFRSGNTRPRVMRYVTRAFAGTDISPQDYTSRVTERIDFLKQKVYAWANRIRRYKKRVDRYTVNRMFQRDQRWVYRSWERTEESVDDVRRPDAEVTNAFWRSIWSVPVSHTEGDWMHEVERACETIPEMEEINIDAIDVDCAVRSLSNWKSPGPDGLHNFWLKWLRSSHVVLASQFQSAVESRTLPAFMTTGVTHLLHKTGSTLEPNNYRPITCLPTVYKLLTSILRAKINNHINNNSIMCASQNGCRNGARGTKELLLIDMAISQQARRNRKDLTACWIDYKKAFDSVPHTWLLRVLELYKVNTTLCTFLRSCMGQWRTVLFYPGCRQALGGGVPITIERGIFQGDSLSPLWFCLALNPLSTLLVNSGLGYRLRREGQMVSHLFYMDDLKLFAHTNPQLITLLKITETFSNSIKMAFGVDKCAVIHVKRGRVVESEGIQLSDSTNLRSLLVTETYKYLGMSQALCINEVDMKQMLQERFFGRLKKVLNSLLSGGNKVRACNSWVMPLLMYSFGILKWTQTELDTIDRKVRTQLTAFRMHHPRSSVMRLYIPRKCGGRGFLNAKTLHNREVCNLRDYFLKSNVGMHRDVVNVDTGLTPLGLAKENWRRPTIVSTDSRREVWQSKELHGRFYRALHRPEVDLLASVSWLRFSDLFGETEGFVCAIADEVIKTNNYRKYIMRDGTIDICRACHQPGESLRHITSGCSRLANGEYLHRHNQVARIIHQRLALKYNLVELEVPYYRYVPEPVLENTHITFYWDRSIITDRTVVANKPDIVVIDRSERRALIVDVTIPHDENLVKAEKDKQVKYLDLAHEVVDMWNVDSAIIVPIVVSVNGLIAKSLDQHLKRLGMDGWVKGQMQKAVLLDTARIVRKFLSLEP

SEQ ID NO: 11411 - protein, 1192 aa, Eilema sororculum
MLTRAQAKRHRNAPTTSPDSSLSSAAQPPAVEPAASSSSSSDEFFSPPTSPTPVRRPGRGRPPTCLGPRRPPASSGAPATGGDVHRMRWTTSINENVMRAYFAATEGGTNLSAYRTRMLPLFQALEPSINTSAQRLSDQVRVIQRNHMLNETVLETLRLECLRNICVTPAPAPAPASTAERNDDTRVAPDDTPIPVSIQYNEEIKEALKCALREYRSMPVHIRPRLPRLPIHRRNIALVSALDSLLPSYLENSENLGNTHSILYCTAVAACRMAGAKFPIKDPAIRPKFTIPAWQCRIERRVAEARVLIGKLICFRSGNTRPRVMRYVTRAFAGTDISPQDYTSRVTERIDFLKQKVCAWANRIRRYKKRVDRYTVNRMFQRDQRWVYRSWERTDESVDDVRRPDAEATNAFWRSIWSVPVSHTEGDWMRVVERACETIPEMEEIYIDATDVDCAVRSLSNWKSPGPDGLHNFWLKWLRSSHVVLASQFQSAIESGTLPACMTTGVTHLLHKTGSTLEPNNYRPITCLPTVYKLLTSILRAKINNHINNNSIMCASQNGCRNGARGTKELLLIDMAISQQARRNRKDLTACWIDYKKAFDSVPHTWLLRVLELYKVNTTLCTFLRSCMRQWRTVLFYPGCRQALGGGVPITIERGIFQGDSLSPLWFCLALNPLSALLVNSGLGYRLRREGQMVSHLFYMDDLKLFAHTNPQLIALLKVTETFSNSIKMAFGVDKCAVIHVKRGRVVESEGIQLSDSTNLRSLLVTETYKYLGMSQALCINEVDMKQMLQERFFGRLKKVLNSLLSGGNKVRACNSWVMPLLMYSFGILKWTQTELDTIDRKVRTQLTAFRMHHPRSSVMRLYIPRKCGGRGFLNAKTLHNREVCNLRDYFLKSNVDMHRDVVNVDTGLTPLGLAKENWRRPTIVSTDSRREVWQSKELHGRFYRALHRPEVDILASISGLRFSDLFGETEGFVCAIADEVIKTNNYRKYIMRDGTIDICRACHQPGESLRHITSGCSRLANGEYLHRHNQVARIIHQRLALKYNLVEVEVPYYRYVPEPVLENSHITLYWDRSIITDRTVVANKPDIVVIDRSERRALIVDVTIPHDENLVKAEKDKQVKYLDLAHEVVDMWNVDSAIIVPIVVSVNGLIAKSLDQHLKRLGLDGWVKGQMQKAVLLDTARIVRKFLSLEP

SEQ ID NO: 11412 - protein, 975 aa, Eilema sororculum
MPIHVRPRLPRLPIHRRNIALVSALDSLLPKYLENSENLGDTHSILYCTAVAACRMAGAKFPIKDPAIRPKPAIPAWQCRIERRVAEARVLIGKLICFRSGNTRPRVIRYVTRAFAGTNISPQDYTSRVTERIDFLKQKVCAWANRIRRYKKRVDRCTVNRMFQRDQRWVYRSWERTDESVDDVRRPDAEATNAFWRSIWSVPVSHTEGDWMREVERACETIPEMEEIYIDATNVDCAVRSLSNWKSPGPDGLHNFWLKWLRSSHVVLASQFQSAIESGTLPAFMTTGVTHLLHKTGSTLEPNNYRPITCLPTVYKLLTSILRAKINNHINNNSIMCATQNGCRNGARGTKELLLIDMTISQQARRNRKDLVACWIDYKKAFDSVPYTWLLRVLELYKVNTTLCTFLRSCMGQWRTVLLYPGCRQALGSGEPITIERGIFQGDSLSPLWFCLALNPLSTLLVNSGLGYRLRREGQMVSHLFYMDDLKLFAHTNPQLIALLKVTETFSNSIKMAFGVDKCAVIHVKRGRVVESEGIQLSDSTNLRSLLVTETYKYLGMSQVLCINEVGMKQMLQELFFGRLKKVLNSLLSGGNKVRACNSWVMPLLMYSFGILKWTQTELDTIDRKVRTQLTAFRMHHPRSSVMRLYIPRKCGGRGFLNAKTLHNREVCNLRDYFLKSNVDMYRDVVNVDTGLTPLGLAKENWRRPTIVGTDSRREVWQSKELHGRFYRALHRPEVDLLASVSWLRFSDLFGETEGFVCAIADEVIETNNYRKYIMRDGTIDICRACHQPGESLRHITSGCSRLANGEYLHRHNQVARIIHQRLALKYNLVEVEVPYYRYVPEPVLENSHITLYWDRSIITDRTVVANKPDFVVIDRSERRALIVDVTIPHDENLVKAEKDKQVKYLNLAHEVVDMWNVDSAIIVPIVVSVNGLIAKSLDQHLKRLGLDGWVKGQMQKAVLLDTARIVRKFLSLEP

SEQ ID NO: 11413 - protein, 1196 aa, Eilema sororculum
MLTRAKTKIIIQDAHLTPTDSSCSSASQAPGTTSPRPTPVEASSSDEYFSPPTSPTPVRRPGRGRPPTCLGPRRPPASNRAPAAGGNVHRMRWTNSINENVMRAYFAATEGGTNLSAYRSRMLPLFQALEPSVNTSAQRLSDQVRVIQRNHMLNETVLETLRQECLRNICVTPALAPVPASTTALNEDSHVTRDDTPIPVSIQYNEEIKEALEYALREYRSMPIHVRPRLPRLPIHRRNIALVSALDSLLPKYLENSENLGDTHSILYCTAVAACRMAGAKFPIKDPAIRPKPAIPAWQCRIERRVAEAKVLIGKLICFRSGNTRPRVMRYVTRAFAGTNISPQDYTSLVTERIDFLKQKVCAWANRIRRYKKRVDRYTVNRMFQRDQRWVYRSWERTDESVDDLRRPDAEATNAFWRSIWSVPVSHTEGDWMREVERACETIPEMEEIYIDATDVDCAVRSLSNWKSPGPDGLHNFWLKWLRSSHVVLASQFQSAIESGTLPAFMTTGVTHLLHKTGSTLEPNNYRPITCLPTVYKLLTSILRAKINNHINNNSIMCTSQNGCRNGARGTKELLLIDMTISQQARRNRKDLVACWIDYKKAFDSVPHTWLLRVLELYKVNTTLCTFLRSCMGQWRTVLLYPGCRQALGSGEPITIERGIFQGDSLSPLWFCLALNPLSTLLVNSGLGYRLRREGQMVSHLFYMDDLKLFAHTNPQLIALLKVTETFSNSIKMAFGVDKCAVIHVKRGRVVESEGIQLSDSTNLRSLLVTETYKYLGMSQALCINEVGMKQMLQERFFGRLKKVLNSLLSGGNKVRACNSWVMPLLMYSFGILKWTQTELDTIDRKVRTQLTAFRMHHPRSSVMRLYIPRKCGGRGFLNAKTLHNREVCNLRDYFLKSNVDMHRDVVNVDTGLTPLGLAKENWRRPTIVGTDSRREVWQSKELHGRFYRALHRPEVDLLASVSWLRFGDLFGETEGFVCAIADEVIKTNNYRKYIMRDGTIDICRACHQPGESLRHITSGCSRLANGEYLHRHNQVARIIHQRLALKYNLVEVEVPYYRYVPEPVLENSHITLYWDRSIITDRTVVANKPDIVVIDRSERRALIVDVTIPHDENLVKAEKDKQVKYLDLAHEVVDMWNVDSAIIVPIVVSVNGLIAKSLDQHLKRLGLDGWVKGQMQKAVLLDTARIVRKFLSLEP

SEQ ID NO: 11414 - protein, 1193 aa, Eilema sororculum
MLTRAKARQFAHPTPSDSSCSSASQPPETTSSRPTTAEASSSDEYFSPPTSPTPVRRPGRGRPPSSLGSRGPPASNRAPAAGGDVHRMRWTTSINENVMRAYFAATEGGTNLSAYRSRMLPLFQALEPSVNTSAQRLSDQVRVIQRNHLLNETVLETLRQECLRNMCVTPAPAPAPASTTALNEDSHVTRDDTPIPVSIQYNEEIKEALEYALREYRSMPIHVRPRLPRLPIHRRNIALVSALDSLLPKYLENSENLGDTHSILYCTAVAACRMAGAKFPIKDPAIRPKPAIPAWQCRIERRVAEARVLIGKIICFRSGNTRPRVMRYVTRAFAGTNISPQDYTSRVTERIDFLKQKVCAWANRIRRYKKRVDRYTVNRMFQRDQRWVYRNWERTDESVDDVRRPDAEATNAFWRSIWSVPVSHTEGDWMREVERACEPIPEMEEIYIDATDVDCAVRSLSNWKSPGPDGLHNFWLKWLRSSHVVLASQFQSAVESGTLPAFMTTGVTHLLHKTGSTLEPNNYRPITCLPTVYKLLTSILRAKINNHINNNSIMCASQNGCRNGARGTKELLLIDMTISQQARRNRKDLAACWIDYKKAFDSVPHTWLLRVLELYKVNTTLCTFLRSCMGQWRTVLFYLGCRQALGSGEPITIERGIFQGDSLSPLWFCLALNPLSTLLVNSGLGYRLRREGQMVSHLFYMDDLKLFAHTNPQLIALLKVTETFSNSIKMAFGVDKCAVIHVKRGQVVESEGIQLSDSTNLRSLLVTETYKYLGMSQALCIKEVDMKQMLQERFFGRLKKVLNSLLSGGNKVRACNSWVMPLLMYSFGILKWTQTELDTIDRKVRTQLTAFRMHHPRSSVMRLYIPRKCGGRGFLNAKTLHNREVCNLRDYFLKSNVEMHRDVVNVDTGLTPLGLAKENWRRPTIVGTDSRREVWQSKELHGRFYRALHRPEVDLLASVSWLRFSDLFGETEGFVCAIADEVIKTNNYRKYIMRDGTIDICRACHQPGESLRHITSGCSRLANGEYLHRHNQVARIIHQRLALKYNLVEVEVPYYRYVPEPVLENSHITLYWDRSIITDRTVVANKPDIVVIDRSERRALIVDVTIPHDENLVKAEKDKQVKYLDLAHEVVDMWNVNSAIIVPIVVSVNGLIAKSLDQHLKRLGLDGWVKGQMQKAVLLDTARIVRKFLSLEP

SEQ ID NO: 11415 - protein, 1192 aa, Eilema sororculum
MLTRAQANRNRSAPTTSPDSSLSSAAQPPAVEPAASSSSSSDEFFSPPTSPTPVRRPGRGRPPTCLGPRRPPASNRAPATGGDVHRMRWTTSINENVMRAYFAATEGGTNLSAYRTRMLPLFQALEPSINVSAQRLSDQVRVIQRNRMLNETVLETLRLECLRNICVTPAPAPAPASTVEINDDTCVAPDDTPIPVSIQYNEEIKEALECALREYRSMPVHVRPRLPRLPIHRRNIALVSALDSLLPRYLENSENLGDTHSILYCTAVAACRMAGAKFPNKDPAIRLKSAIPAWQCRIERRVAEARVLIGKLICFRSGNTRPRVMRYVTRAFAGTDISPQDYTSRVTERIDFLKQKVYAWANRIRRYKKRVDRYTVNRMFQRDQRWVYRSWERTEESVDDVRRPDAEATNAFWRSIWSVPVNHTEGDWMREVERACETIPEMEKINIDAIDVDCAVRSLSNWKSPGPDGLHNFWLKWLRSSHVVLASQFQSAVESGTLPAFMMTGVTHLLHKTGSTLEPNNYRPITCLPTVYKLLTSILRAKINNHINNNSIMCASQNGCRNGARGTKELLLIDMAISQQDRRNRKDLTACWIDYKKAFDSVPHTWLLRVLELYKVNTTLCTFLRSCMGQWRTVLFYPGCRQALGSGEPITIERGIFQGDSLSPLWFCLALNPLSTLLVNSGLGYRLRREGQMVSHLFYMDDLKLFAHTNPQLIALLKVTETFSNSIKMAFGVDKCAVIHVKRGRVVESEGIQLSDSTNLRSLLVTETYKYLGMSQALCINEVDMKQMLQERFFGRLKKVLNSLLSGGNKVRACNSWVMPLLMYSFGILKWTQTELDTIDRKVWTQLTAFRMHHPRSSVMRLYIPRKCGGRGFLNAKTLHNREVCNLRDYFLTSNVDMHRDVVNVDTGLTPLGLAKENWRRPTIVSTDSRREVWQSKELHGRFYRALHRPEVDLLASVAWLRFSDLFGETEGFVCAIADEVIKTNNYRKYIMRDGTIDICRACHQPGESLRHITSGCSRLANGEYLHRHNQVARIIHQRLALKYNLVEVEVPYYKYVPEPVLENSHITLYWDRSIITDRTVVANKPDIVVIDRSERRALIVDVTIPHDENLVKAEKDKQVKYLDLAHEVVDMWNVGSAIIVPIVVSVNGLIAKSLDQHLKRLGLDGWVKGQMQKAVLLDTARIVRKFLSLEP

SEQ ID NO: 11416 - protein, 1192 aa, Eilema sororculum
MLTRAQASRNRSAPTTSPDSSLSSAAQPPAVEPAASSSSSSDEFFSPPTSPTPVRRPGRGRPPTCLGPRRPPASNRAPATGGDVHRMRWTTSINENVMRAYFAATEGGTNLSAYRTRMLPLFQALEPSINVSAQRLSDQVRVIQRNRMLNETVLETLRLECLRNICVTPAPAPAPASTIEINDDTCVAPDDTPIPVSIQYNEEIKEALEYALREYRSMPVHVRPRLPRLPIHRRNIALVSALDSLLPRYLENSENLGDTHSILYCTAVAACRMAGAKFPNKDPAIRLKSAIPAWQCRIERRVAEARVLIGKLICFRSGNTRPRVMRYVTRAFAGTDISPQDYTSRVTERIDFLKQKVYAWANRIRRYKKRVDRYTVNRMFQRDQRWVYRSWERTEESVDDVRRPDAETTNAFWRSIWSVPVSHTEGDWMREVERACETIPEMEKINIDAIDVDCAVRSLSNWKSPGPDGLHNFWLKWLRSSHVVLASQFQSAVESGTLPAFMTTGVTHLLHKTGSTLEPNNYRPITCLPTVYKLLTSILRAKINNHINNNSIMCASQNGCRNGARGTKELLLIDMAISQQARRNRKDLTACWIDYKKAFDSVPHTWLLRVLELYKVNTTLCTFLRSCMGQWRTVLFYPGCRQALGRGEPITIERGIFQGDSLSPLWFCLALNPLSTLLVNSGLGYRLRREGQMVSHLFYMDDLKLFAHTNPQLIALLKVTETFSNSIKMAFGVDKCAVIHVKRGRVVESEGIQLSDSTNLRSLLVTETYKYLGMSQALCINEVDMKQMLQERFFGRLKKVLNSLLSGGNKVRACNSWVMPLLMYSFGILKWTQTELDTIDRKVRTQLTAFRMHHPRSSVMRLYIPRKCGGRGFLNAKTLHNREVCNLRDYFLKSNVDMHRDVVNVDTGLTPLGLAKENWRRPTIVGTDSRREVWQSKELHGRFYRALHRPEVDLLASVSWLRFSDLFGETEGFVCAIADEVIKTNNYRKYIMRDGTIDICRACHQPGESLRHITSGCSRLANGEYLHRHNQVARIIHQRLALKYNLVEIEVPYYRYVPEPVLENSHITLYWDRSIITDRTVVANKPDIVVIDRSERRALIVDVTIPHDENLVKAEKDKQVKYLDLAHEVVDMWNVDSAIIVPIVVSVNGLIAKSLDQHLKRLGLDGWVKGQMQKAVLLDTARIVRKFLSLEP

SEQ ID NO: 11417 - protein, 1203 aa, Agrochola circellaris
MLTRSATRRARPPPPDSSLSSALPPPVSSPIISAVTTPVAVVASSSSDEYFSPPTSPTPVRRQGRGRPPRSLGLRGQPAPNRVPAAGGCVRRMRWTQNVNENVMRAYFGATEGGSNLTAYRGRMLSLFQVLEPAVNVSAQRLSDQVRVIQRNHMLDDAVLDRLRLESRNNRVTPASPLVAVQLQNSPSATPRADHVGEEDDDGVISVSSQCNARLRNALEDAFRDYRSTPPGLRPRLPRLPMHKKNKALVCTLDSLLSNYFDGSKDLADTHSILYCAAVAACRVAHVKFPSSDRAPRPKPAVPAWQCRIERRIGEARVLIGKLICFREGNTRPRVMRFVKRAFSGTDTSSRDYLARVTERIDFLKQKICAWANRIRRYRRRVERYTQNRTFQSDERWVYRAWERLDQGVIDTRLPDDDAMCSFWRSIWSAPVNHTEGDWTGKIERACERILEMGAITISPQDVACAVRPLPNWKSPGPDGLHNFWIKWFQRSHARLASQFQSALESGSLPQFLTTGITHLLHKSGSTAEPKNYRPITCLPTVYKVFTSILRTKINKHIDTNSIMSASQNGCKNGSRGTKELLLIDMAISQQVRRPRRDLSTCWIDYKKAYDSVPHTWLMRVLELYKVDATLRTFLISCMGQWRTVLRYPGCRQIQRNSEPIRIERAIFQGDSLSPLWFCLALNPLSTLLEDSGLGYRLRRGGQVISHLLYMDDLKLFAPNNLQLVELLKVTETFSSAIRMEFGVDKCAVMHVKRGGIVESGGTQLSDSIHLRSLSSIETYKYLGMSEALGINTADMKQSLRERFFNRLNKVLNSLLSGGNKVRAFNGWVMPVLMYSFGILKWTQTELDALDRRVRTLLTVNRMHHPRSSVMRLYIPRKCGGRGFLNAKTLHNREVCSLREYFLEADVGMHRDVVSVDKGLTPLSLANENWRKPIVLDTKDRREVWQSKELHGRFYRALHGPDVDLLASVSWLRFGDLFGETEGFVFAIMDEVMMTNNYRKYIVKDGTVDICRACHRPGESIRHIISGCSRLANGDYLHRHNLVARIIHQQLALKYSLVESEVPYYRYMPDPVLENGNITLYWDRSIITDRTIVANKPDIVVIDRLERRTMIIDIAVPHDENLVKAEKDKQIKYLDLAREVVDMWDVDTAVIVPIVVTANGIIAKSLDQHLRRLSLGSWIKGLIQKAVLLDTARIVRRFLSQGP

SEQ ID NO: 11418 - protein, 1203 aa, Agrochola circellaris
MLTRSATRRARPPPPDSSLSSALPPPVSSPIISAVTTPVAVVASSSSDEYFSPPTSPTPVRRQGRGRPPRSLGLRGQPAPNRVPAAGGCVRRMRWTQNVNENVMRAYFGATEGGSNLTAYRGRMLSLFQVLEPAVDESAQRLSDQVRVIQRNHMLDDAVLDRLRLESRNNRVTPASPLVAVQLQNSPSATPRADHVGEEDDDGVISVNSQCNARLRNALEDAFRDYRSTPPGLRPRLPRLPMHKKNKALVCTLDSLLSNYFDGSKDLADTHSILYCAAVAACRVAHVKFPSSDRAPRPKPSVPAWQCRIERRIGEARVLIGKLICFREGNTRPRVMRFVKRAFSGTDTSSRDYLARVTERIDFLKQKICAWANRIRRYRRRVERYTQNRTFQSDERWVYRAWERLDQGVIDTRLPDDEAMCSFWRSIWSAPVNHTEGDWTGKIERACERIPEMGAITISPQDVACAVRPLPNWKSPGPDGLHNFWIKWFQRSHARLASQFQSALESGSLPQFLTTGITHLLHKSGSTAEPKNYRPITCLPTVYKVFTSILRTKINKHIDTNSIMSASQNGCKNGSRGTKELLLIDMAISQQVRRSRRDLSTCWIDYKKAYDSVPHTWLMRVLELYKVDATLRTFLISCMGQWRTVLRYPGCRQIQRNSEPIRIERGIFQGDSLSPLWFCLALNPLSTLLEDSGLGYRLRRGGQVISHLLYMDDLKLFAPNNLQLVELLKVTETFSSAIRMEFGVDKCAVMHVKRGGIVESGGTQLSDSIHLRSLSSIETYKYLGMSEALGINTADMKQSLRERFFNRLNKVLNSLLSGGNKVRAFNGWVMPVLMYSFGILKWTQTELDALDRRVRTLLTVNRMHHPRSSVMRLYIPRKCGGRGFLNAKTLHNREVCSLREYFLEADVGMHRDVVSVDKGLTPLSLANENWRKPIVLDTKDRREVWQSKELHGRFYRALHGPDVDLLASVSWLRFGDLFGETEGFVFAIMDEVMMTNNYRKYIVKDGTVDICRACHRPGESIRHIISGCSRLANGDYLHRHNLVARIIHQQLALKYSLVESEVPYYRYMPDPVLENGNITLYWDRSIITDRTIVANKPDIVVIDRLERRTMIIDIAVPHDENLVKAEKDKQIKYLDLAREVVDMWDVDTAVIVPIVVTANGIIAKSLDQHLRRLSLGSWIKGLIQKAVLLDTARIVRRFLSQEP

SEQ ID NO: 11419 - protein, 1201 aa, Hydraecia micacea
MLTRSAAARRARLPPPDSSLSSASPPAPLVSSPTVSAVTAPAAAVASSSSDEYFSPPTTPPPARRRGGRRPPDSLGPRGPLASDRVPAPGGSVQRMRWTRSINENVMRSYYGATEGGSNLTAYRVRMLSLFQVLEPAVNVSAQRLSDQVRVIQRNHMLDDTVLDRLRNEIQSSHAIAPQSQTAVILPQSNTSHADEGSNDRATNVSTQCNEELSSALEDAIQEYRFMSPELRPRLPRLPMHNKNRALVAVLNSQLSKYFDDCEDLTDTHSILYCAAVAACRVAHVKFTNDSRATRPKPAVPAWQCRIERRIGGARALIGKLICFREGNTRPRVMRFVRRAFLGTDISPQDYTSCVTERIDFLKQKVYAWANRIRRYKRRVERYTQNRTFQSDERWVYRDWERPDQSVADTCLPDDDAMCSFWRSIWSVPVSHTEGDWARDVERACDPIPEMEAITICPQDVARAVRPLPNWKSPGPDGLHNFWIKWFSRSHARLASQFQTALESGSLPQVLTTGITHLLHKSGSTAEPKNYRPITCLPTVYKVLTSILRAKINKHIDTNFIMSASQNGCRNGSRGTKELLLIDMTISQQVRRFRKDLSTCWIDYKKAYDSVPHTWLIRVLELYKVDTTLRTFLMSCMGQWRTVLRYPGCRNIQRNSEPIRIERGIFQGDSLSPLWFCLALNPLSTLLEDSGLGYRLRRGGQVISHLLYMDDLKLFAPNNLQLMELLKVTQTFSNAIRMEFGVDKCAVMHVKRGEIVESVGNQLSDSTNLRALSASETYKYLGMSEALGINVTDMKQSLKERFFGRLKKVLNSLLSGGNKVRAFNGWVMPVLMYSFGILKWTQTELDALDRRVRTLLTANRMHHPRSSVMRLYIPRKCGGRGFLNSKTLHNREICSLREYFLETDVGMHRDVVMVDKGLTPLSLAKENWRKPVVLDTNDRMEVWQSKELHGRFFRALHGPDVDLLASVAWLRFGDLFGETEGFVCAIMDEVMMTNNYRRFIVKDGTVDICRACHRPGESIRHIISGCSRLANGEYLHRHNLVARIIHQQLALKYSLVESEVPYYRYVPDPVLENGNITLYWDRSIITDRTIVANKPDIVVVDRSERRAMIVDITVPHDENLVKAEKDKQIKYLDLAREVVDMWDVDSAIIVPIVVTANGLIAKSLDQHLRRLSLASWIKGLIQKAVLLDTARIVRRFLSLEP

SEQ ID NO: 11420 - protein, 1206 aa, Amphipyra tragopoginis
MLTRSRAKAQNTRPPSSASSHSSASQPPEPASIVSDVTPAAAVASSSSDEYFSPATSPSPPPARRRGRGRPPTCLGPRGPPASDRVPAPGGSVQRMRWTQSMNENCMRAYFGATEGGTNLTAYRGRMLSLFRALEPAVNVSAQRLSDQVRVIQRDHRLDDAALDRLRSEMQNSHAAPLPSQIRTQTLVPPAVPLESNYADEEGEDRAISAGTQYSEIMRSALEDALREFRSTPPELRPRLPRLPMHNKNRALVCALDSLLPNVFESSEDLGDTQSILYCAAVAACRVAHVKFPNDNRATRPKSAVPAWQCRIERRIDEARVLIGKLTCFREGNRRPRVMRFVRRAFSGTDIGPGEYASRVTERIDFLKQKVYAWANRIRRYRRRVDRYTQNRIFQSDQRWVYRTWERPDQGVSDTHLPDNDVMNAFWRNVWSVPVTHTEGDWMQEVQRACEPIQEMGAVTIGPQDVTSAVRPMPNWKSPGPDGLHNFWIKWLRSSHARLASQFQSSLESGSLPAFLTTGITHLLFKSGSTAEPKNYRPITCLPTVYKLLTSILRAKLNHHIDSNAIMCATQNGCRNGSRGTKELLLIDMAISQQVRRSRKDLSTCWIDYKKAYDSVPHTWLMRVMELYKVNTTLRTFLMSCMGQWRTVLHYPGCRQIQGNGELIRIERGIFQGDSLSPLWFCLALNPLSTLLEGSGLGYRLRRGGQVISHLLYMDDLKLFAPNNLQLVELLKVTETFSNSIRMEFGVDKCAVMHVKRGRIMESVGTQLSDSIHLRSLSSTETYKYLGMSEALGINEADTKQSLRERFFGRLIKVLKSLLSGGNKVRAFNGWVMPVLMYSFGILRWTQTELDALDRRVRTLLTAYRMHHPRSSVMRLYIPRKCGGRGFLNAKTLHNREVCSLREYFSQADVGMHRDVVAVDKGLTPLSLAKENWRKPVVHDAKGRMEVWRSKELHGRFYRALHGPDVDFLASVAWLRFGDLFGETEGFVCAIMDEVMMTNNYRKYIVKDGTVDICRACHCPGESIRHIVSGCSRLANGEYLHRHNLVARIIHQQLALKYNLVDTEVPYYKYVPDPVLENGHVTLYWDRSIITDRTIVANKPDIVVIDRLERRTMIVDITVPHDENLVKAENDKKIKYLDLAHEVVDMWDVDSAVIVPIVVTANGLIAKSLDQHLMRLSLGSWIKGLIQKAVLLDTARIVRKFLSLEP

SEQ ID NO: 11421 - protein, 1204 aa, Amphipyra tragopoginis
MITRSRAKTQSTQPPPSASSLSSASQPPEPASIVSDVTPAAAVASSSSDEYYSPPTSPPPARRRGRGRPPACLGPRGPPASDRVPASGGSVQRMRWTQSMNENCMRAYFGATEGGTNLTAYRGRMLSLFQALEPAVNVSAQRLSDQVRVIQRDHRLDGAALDRLRSEMQSSHVVPLQSQTAVQSQVPSVVAPRSIPADEESDDRVTNVSTQSNEQLRSALELAFREYRSTLPDLRPRLPRLPMNNKNKALMCALDSLLSSYFDGSEDLADTHSILYCAAVAACRVAHVKVDNNDRATRPKPAVPAWQCRIERRIGEARALIGKLICFREGNTRPRVMRFVRRAFSGTDTSPRDYMSRVAERIDFLKQKVYAWANRIRRYKRRVERYTQNRMFQRDQRWVYRAWERPDQGVGDVHLPDDDAMNSFWRSIWSVPVSHAEGDWMRDVERVCEPILDMGAISISPQDVASAVRPLPNWKSPGPDGLHNFWLKWLRSSHARLASQFQSSLETGTLPQFLTTGVTHLLHKSGSTAEPKNYRPITCLPTVYKLLTSILRCKISSHIENNSIVSASQNGCRNGSRGTKELLLIDMAISQQVRRSRKDLSTCWIDYKKAYDSVPHTWLLRVLELYKVNATLCAFLTSCMGQWRTVLRYPGCRQIQGRGEPIRIERGIFQGDSLSPLWFCLALNPLSTLLEGSGLGYRLRRGGQVISHLLYMDDLKLFAPNNLQLMELLKVTETFSNSIRMEFGVDKCAVMHVKRGRIMESVGTELSDSIHLRSLSSTETYKYLGMSEALGINEADMRQSLRERFYGRLKKVLKSLLSGGNKVRAFNGWVMPALMYSFGILKWTQTELDALDRRVRTLLTAYRMHHPRSSVMRLYISRKCGGRGFLNAKTLHNREVCSLREYFSQADVGMHRDVVAVDKGLTPLSLAKENWRMPVVLDTNGRKDVWRSKELHGRFYRALHGPDVDFQASVAWLRFGDLFGETEGFVCAIMDEVMMTNNYRRYVVKDGTVDICRACHCPGESIRHIVSGCSRLANGEYLHRHNLVARIIHQQLALKYNLVDAEVPYYKYVPDPVLENGHVTLYWDRSVITDRTIVANKPDIVVIDRSERRAMIVDITVPHDENLVKAENDKKIKYLDLAHEVVDMWNVDSAVIVPIVVSANGLIAKSLNQHLMRLSLGSWIKGLIQKAVLLDTARIVRKFLSLEP

SEQ ID NO: 11422 - protein, 1203 aa, Amphipyra tragopoginis
MLTRSRAKALITQPPPSASSLSSASQPPEPASIVSDVTPAAAVASSSSDEYFSPPTSPPPRRRGRGRPPASLGPRGPPASDRVPAAGGSVQRMRWTQSMNENCMRAYFGATEGGTNLTAYRGRMLSLFQALEPAVNVSAQRLSDQVRVIQRDHRLDDAALDRLRSEMQSGHVVPLQSQTAVQSQVTPVVAPRSIPADEESDDRATNVSTQSNEQLRSALELAIREYRSTLPDLRPRLPRLPMNNKNKALMCALDSLLSSYFDGSEDLADTHSILYCAAVAACRVAHVKVDNNDRATRPKPAVPAWKCRIERRIGEARALIGKLICSREGNTRPRVMRFVRRAFSGTDTCPRDYMSRVAERIDFLKQKVYAWANRIRRYRRRVERYTQNRMFQRDQRWVYRAWERPDQGVRDEHLPDNDAMNSFWRSIWSVPVSHTEGDWMRDVERVCEPILDMGAISISPQDVASAVRPLPNWKSPGPDGLHNFWLKWLRSSHARLASQFQSSLETGTLPQFLTTGVTHLLHKSGSTAEPKNYRPITCLPTVYKLLTSILRCKISSHIENNSIMSASQNGCRNGSRGTKELLLIDMAISQQVRRSRKDLSTCWIDYKKAYDSVPHTWLMRVLELYKVNTTLCTFLTSCMGQWRTVLHYPGCRQIQGIGEPIRIERGIFQGDSLSPLWFCLALNPLSTLLEGSGLGYRLRRGGQVISHLLYMDDLKLFAPNNLQLLDLLKVTETFSNSIRMEFGVDKCAVMHVKRGRIMESVETQLSDSIQLRSLSSTETYKYLGMSEALGIYEADMKQSLRERFYSRLKKVLKSLLSGGNKVRAFNGWVMPVLMYSFGILKWTQTELDALDRRVRTLLTAYRMHHPRSSVMRLYIPRKCGGRGFLNAKTLCSREVCSLREYFSQADVGMHRDVVAVDKGLTPLSLAKENWRKPAVLDTNGRKDVWRSKELHGRFYRALHGPDVDFLASVAWLRFGDLFGETEGFVCAIMDEVMMTNNYRKYVVKDGTVDICRACHCPGESIRHIVSGCSRLANGEYLHRHNLVARIIHQQLALKYNLVDAEVPYYRYVPDPVLENGHITLYWDRSIITDRTIVANKPDIVVIDRSERRAMIVDITVPHDENLVKAENDKKIKYLDLAHEVVDMWEIDSAVIVPIVVTANGLIAKSLDQHLMRLSLGSWIKGLIQKAVLLDTARIVRKFLSLEP

SEQ ID NO: 11423 - protein, 1111 aa, Amphipyra tragopoginis
MRWTQSMNENCMRAYFGATEGGTNLTAYRGRMLSLFQALEPAVNVSAQRLSDQVRVIQRDRRLDDAALDRLRSEVQSSRIGALQSQTAVQSQVPLEVVPRSIPADEEGNDRATNVSTQCNEQLRSALELAVREYRSTPPDLRPRLPRLPMNKKNKALMCALDSLLSSYFDGSEDLTDTHSILYCAAVAACRVAHVKVDNNDRATRPKLAVPAWQCRIERRIGGARALIGKLICFREGNTRPRVMRFVRRAFSGTDTNPRDYMSRVTERIDFLKQKVYAWANRIRRYKRRVERYTQNRMFQRDQRWVYRAWERSDQGVGDAHLPDDDAMNSFWRSIWSVPVSHTEGGWIRDIERVCEPILDMGAISISPQDVASAVRPLPNWKSPGPDGLHNFWLKWLRSSHARLASQFQSSLETGSLPQFLTTGVTHLLHKSGSTAEPKNYRPITCLPTVYKLLTSILRGRISSHIENNSIMSASQNGCRNGSRGTKELLLIDMAISQQVRRSRKDLSTCWIDYKKAYDSVPHTWLMRVLELYKINATLRTFLMSCMGQWRTVLHYPGCRQIQGNGELIRIERGIFQGDSLSPLWFCLALNPLSTLLEGSGLGYRLRRGGQVISHLLYMDDLKLFAPNNLQLLELLKVTETFSNSIRMEFGVDKCAVMHVKRGRIMESVGTQLSDSIQLRSLSSTETYKYLGMSEALGINEADMKQSLKERFFGRLIKVLKSLLSGGNKVRAFNGWVMPVLMYSFGMLRWTQTELDALDRRVRTLLTAYRMHHPRSSVMRLYIPRKCGGRGFLNAKTLHNREVCSLREYFSQADVGMHRDVVAVDKGLTPLSLAKENWRKPVVLDAKGRMEVWRSKELHGRFYRALHGPDVDFLASVAWLRFGDLFGETEGFVCAIMDEVMMTNNYRKYIVKDGTVDICRACHCPGESIRHIVSGCSRLANGEYLHRHNLVARIIHQQLALKYDLVDSEVPYYRYVPDPVLENGHVTLYWDRSIITDRTIVANKPDIVVIDRSERRAMIVDITVPHDENLVKAENDKKIKYLDLAHEVVDMWDIDSAVIVPIVVTANGLIAKSLDQHLMRLSLGSWIKGLIQRAVLLDTARIVRRFLSLEP

SEQ ID NO: 11424 - protein, 1202 aa, Amphipyra tragopoginis
MLTRSKARARNHHAHPPPPDSSPSSASQQQELDPAPPAAAVASSSSDEYFSPPSSPPPVRRRGVARPPASLGLRDRPAPNRVPAAGGNVSRMRWTQSINENVMRAYYGATEGGINLTAYRDRMLSLFQVLEPAINVSTQRLSDQVRVIQRNRRLDDAVLERLRSEEQNNRAVTPPVQAAEQPQLLAVAPRPIHVDGESDGAVINVSSQCSDELRSALEGAILEYRATPPELKPRLPRLPMHKKNRALVCALDSLLSNYFDGSEDLGDTHSILYCAAIAACRVAHVKLTTQNERATRPKPAVPAWQCRIERRIDGARALIGKLICFREGNTRPRVMRYVRRAFSGTDISPRDYMSRVTERIDFLKQKVYAWANRIRRYKRRVERYTQNRTFQSDQRRVYRTWERPVPGVSDMRLPDDDAMSSFWRSIWSVPVAHTEGDWMRDIERACETIPEMGEIVISPQDVATAARPLPNWKSPGPDGLHNFWIKWLRSSHACLASQFQASLESGSLPQFLTTGVTHLLYKSGSTAEPKNYRPITCLPTVYKLFTSILRVKISNHIDNNYILSPSQNGCRSGSRGTKELLLIDMAISQQVRRSRKDLSTCWIDYKKAYDSVPHTWLMRVMELYKINTTLRTLLMSCMRQWRTVLRYPGCREILGRGEPIRIERGIFQGDSLSPLWFCLALNPLSTLLEGTRLGYRLRREGQVISHLLYMDDLKLFAPTDLQLMELLKVTENFSNSIRMEFGADKCAVMHVKRGGIVESEGIQLSNSIQLRSLSPTETYKYLGMSEALGISEADMRQSLRERFFGRLNKVLKSLLSGGNKVRAFNGWVMPVLMYSFGILKWTQTDLDALDRRVRALLTVHRMHHPRSSVMRLYIPRKCGGRGFLNAKTLHNREVYSLREYFLQAEGEMHRDVVAVDGGLTPLALAKENWRKPVVLSTNDREEVWQSKELHGRFYRALHGPDVDFLASVSWLRFGDLFGETEGFVCAIMDEVMMTNNYRKYIVKDGTVDICRACHRPGESIRHIISGCSRLANGEYLHRHNLVARIIHQQLALKYNLVESEVPYYRYVPDPVLENGHATLYWDRSIITDRTIVANKPDIVVIDRSERRTMIVDITVPHDENLVKAEKDKQLKYLDLAHEVVAMWDVDSAVIVPIVVTANGLIAKSLDQHLKRLSLDGWIKGLIQKAVLLDTARIVRRFLSLEP

SEQ ID NO: 11425 - protein, 1111 aa, Amphipyra tragopoginis
MRWTQSMNENCMRAYFGATEGGTNLTAYRGRMLSLFQTLEPAVNVSAQRLSDQVRVIQRDHRLDDAALDRLRSEVQSSHVISLQSQTAVQLQVPTVVPPRSIFADEESDDRVTNVSTQCSDQLRSALELAIREYRSTPPDLRPRLPRLPMNKKNRALMCALDSLLSSYFDGSEDLADAHSILYCAAVAACRVARVKFDNNDRATRPKPAVPAWQCRIERRIGGARALIGKLICFREGNTRPRVMRFVRRAFSGTDTSPRDYMSRVTERIDFLKQKVYAWANRIRRYKRRVERYTQNRMFQRDQRWVYRAWERSDQGVGDAHLPDDDAMNSFWRSIWSVPVSHTEGDWVRDVERVCEPILDMGAISISPQDVASAVRLLPNWKSPGPDGLHNFWLKWLRSSHARLASHFQSSLETGTLPQFLTTGVTHLLHKSGSTAEPKNYRPITCLPTVYKLLTSILRCKISCHIENNSIMSASQNGCRNGSRGTKELLLIDMAISQQVRRCRKDLSTCWIDYKKAYDSVPHTWLMRVLELYKVNTTLCTFLTSCMGQWRTVLRYPGCRQIQGIGEPIRIERDIFQGDSLSPLWFCLALNPLSTLLEGSGLGYRLRRGGQVISHLLYMDDLKLFAPNNLQLLELLKVTETFSNAISMEFGVDKCAVMHVKRGRIMESVGTQLSDSINLRSLSSTETYKYLGMSEALGINEADMKQSLRERFYGRLKKVLKSLLSGGNKVRAFNGWVMPVLMYSFGILKWTQTELDALDRRVRTLLTAYRMHHPRSSVMRLYIPRKCGGRGFLNAKTLHNREVCSLREYFSQADVGMHRDVVAVDKGFTPLSLAKENWRKPVVLDTNGRKEVWRSKELHGRFYRALHGPDVDFLASVAWLRFGDLFGETEGFVCAIMDEVMMTNNYRRYIVKDGTVDICRACHCPGESIRHIVSGCSRLANGEYLHRHNLVARIIHQQLALKYNLVDAEVPYYRYVPDPVLENGHVTLYWDRSIITDRTIVANKPDIVVIDRSERRAMIVDITVPHDENLVKAENEKKIKYLDLAREVVDMWEIDSAVIVPIVVTANGLIAKSLDQHLMRLSLGSWIKGLIQKAVLLDTARIVRKFLSLGP

SEQ ID NO: 11426 - protein, 1203 aa, Amphipyra tragopoginis
MLTRSRAKALITQPPPSASSLSSASQPPEPASIVSDVTPAAAVASSSSDEYFSPPTSPPPRRRGRGRPPASLGPRGPPASDRVPAAGGSVQRMRWTQSMNENCMRAYFGATEGGTNLTAYRGRMLSLFQALEPAVNVSAQRLSDQVRVIQRDHRLDDAALDRLRSEMQSSHVVPLQSQTAVQSQVTSVVAPRSIPADEESDDRATNVSTQSNEQMRSALELAIREYRSTLPDLRPRLPRLPMNNKNKALMCALDSLLSSYFDGSEDLADTHSILYCAAVAACRVAHVKVDNNDRATRPKPAVPAWQCRIERRIGEARALIGKLICFREGNTRPRVMRFVRRAFSGTDTCPRDYMSRVAERIDFLKQKVYAWANRIRRYGRRVERYTRNRMFQRDQRWVYRAWERPDQGVRDEHLPDDDAMNSFWRSIWSVPVSHTEGDWMRDVERVCEPILDMGAISISPQDVASAVRPLPNWKSPGPDGLHNFWLKWLRSSHARLAFQFQSSLETGTLPQFLTTGVTHLLHKSGSTAEPKNYRPITCLPTVYKLLTSILRCKISSHIENNSIMSASQNGCRNGFRGTKELLLIDMAISQQVRRSRKDLSTCWIDYKKAYDSVPHTWLLRVLELYKVNTTLCAFLTSCMGQWRTVLHYPGCRQIQGIGEPIRIERGIFQGDSLSPLWFCLALNPLSTLLEGSGLGYRLRRGGQVISHLLYMDDLKLFAPNNLQLLDLLKVTETFSNSIRMEFGVDKCAVMHVKRGRIMESVGTQLSDSIQLRSLSSTETYKYLGMSEALGINEADMKQSLRERFYGRLKKVLKSLLSGGNKVRAFNGWVMPVLMYSFGILKWTQTELDALDRRVRTLLTAYRMHHPRSSVMRLYIPRKCGGRGFLNAKTLHNREVCSLREYFSQADVGMHRDVVAVDKGLTPLSLAKENWRKPVVLDTNGRKDVWRSKELHGRFYRALHGPDVDFLASVAWLRFGDLFGETEGFVCAIMDEVMMTNNYRKYVVKDGTVDICRACHCPGESIRHIVSGCSRLANGEYLHRHNLVARIIHQQLALKYNLVDAEVPYYRYVPDPVLENGHITLYWDRSIITDRTIVANKPDIVVIDRSERRAMIVDITVPHDENLVKAENDKKIKYLDLAHEVVDMWEIDSAVIVPIVVTANGLIAKSLDQHLMRLSLGSWIKGLIQKAVLLDTARIVRKFLSLEP

SEQ ID NO: 11427 - protein, 1202 aa, Amphipyra tragopoginis
MMLTRSQARARNYYAHPSPPDSSPSSASQQQELDPAPPAAAVASSSSDEYFSPPSSPPPVRRRGGARPPACLGPRGQPAPNRVPAAGGNVSRMRWTQSINENVMRAYYGATEGGINLTAYRDRMLSLFQVLEPAINVSTQRLSDQVRVIQRNRRLDDTVLERLRSEVQNNRTVTTPLQAAEQPQLPAVSPRPIHVDEAGDGEVIVVSNQCSDELRSALEGAILEYRATPPELKPRLPRLPMHKKNRALVCALDSLLSNYFDGSEDLGDTHSILYCAAIAACRVAHVKPTQNERATRPKPAVPAWQCRIERRIDGARALIGKLICFREGNTRPRVMRFVRRAFSGTDISPRDYMSRVTERIDFLKQKVYAWANRIRRYKRRVERYTQNRTFQSDQRRVYRTWERPVPGVSDMRLPDDDAMSSFWRSIWSVPVAHTEGDWMRDIERACETIPEMGEIVISPQDVATAARPLPNWKSPGPDGLHNFWIKWLRSSHACLASQFQSSLESGSLPQFLTTGVTHLLYKSGSTAEPKNYRPITCLPTVYKLFTSILRVKISNHIDNNYILSPSQNGCRSGSRGTKELLLIDMAISQQVRRSRKDLSTCWIDYKKAYDSVPHTWLMRVMELYKINTTLRTLLMSCMRQWRTVLRYPGCREILGRGEPIRIERGIFQGDSLSPLWFCLALNPLSTLLEGTRLGYRLRREGQVISHLLYMDDLKLFAPTDLQLMELLKVTENFSNSIRMEFGVDKCAVMHVKRGGIVESEGIQLSNSIQLRSLSPTETYKYLGMSEALGISEADMRQSLRERFFGRLNKVLKSLLSGGNKVRAFNGWVMPVLMYSFGILKWTQTDLDALDRRVRALLTVHRMHHPRSSVMRLYIPRKCGGRGFLNAKTLHNREVCSLREYFLQAEGEMHRDVVAVDRGLTPLALAKENWRKPVVLSTNDREEVWQSKELHGRFYRALHGPDVDFLASVSWLRFGDLFGETEGFVCAIMDEVMMTNNYRKYIVKDGTVDICRACHRPGESIRHIISGCSRLANGEYLHRHNLVARIIHQQLALKYNLVESEVPYYRYVPDPVLENGHATLYWDRSIITDRTIVANKPDIVVIDRSERRTMIVDITVPHDENLVKAEKDKQLKYLDLAHEVVAMWDVDSAVIVPIVVTANGLIAKSLDQHLKRLSLDGWIKGLIQKAVLLDTARIVRRFLSLEP

SEQ ID NO: 11428 - protein, 1081 aa, Noctua pronuba
MLSLFQALEPAVNVSAQRLSDQVRVIQNNHRLDDATLDRLRSELRISPASNPLPCQNVTHVPATLPLQANQHAEEEDDRAVSAENLCNVELRSALEGAIREYRFMSPDLRPRLPRLPMNKKNRALVCALDALLPNFIESSANLCDTHSILYCTAVAACRVANVKFPNTDSATRPKSAVPVWQCRIERRINEARALIGKLICFREGNTRPRVMRFVRRAFSGTDISPREYMSRVTERIDFLKQKIYAWANRIRRYRRRVDRYTQNRMFQSDERWVYRTWERPVTIQGVTDAHLPENDAMSAFWRSIWSVPVSHTEGDWMRVVEKACDSIPEMEAISISPLDVARAVRPLPNWKSPGPDGLHNFWIKWLQRSHACLASQFQSSLETGSLPSFFTTGVTHLLHKSGSTAEPKNYRPITCLPTVYKVLTSILRAKIVRHIDSNSIMSVSQNGCRNGSRGTKELLLIDMAISQQVRRSRRDLSTCWIDYKKAYDSVPHTWLRRVLELYKIDATLRTFLVSCMGQWSTVLLYPGCRQVLGNDEPIRIERGIFQGDSLSPLWFCLALNPLSTLLEDSGLGYRLRRGGQVISHLLYMDDLKIFAPSNLQLMELLKVTETFSSAIRMEFGVDKCAVMHVKRGEIMESVGTQLSDSICLRSLSSTETYKYLGMSEALGINAADMKQSLKERFFGRLSKVLKSLLSGGNKVRAFNGWVMPVLMYSYGILKWTQTELDALDRKVRTLLTANRMHHPRSSVMRLYIPRKCGGRGFLNAKTLHNREVCSLREYFLETDVGMHRDVVSVDKGLTPLSLANENWRKPVVLDTNDRKEVWQSKELHGRFFRALHGLDVDLLASVSWLRFGDLFGETEGFVCAIMDEVIMTNNYRKYIVKDGTVDICRACHRPGESIRHIVSGCSRLANGEYLHRHNLVARIIHQQLALQYNLVGTEVPYYKYVPDPVLENGHATLYWDRSIITDRTILANKPDIVVIDRRERRAMIVDITVPHDENLVKAENDKKIKYLDLAHEVVDMWDVDSAIIVPIVVTVNGLIAKSLDQHLRRLSLRGWVKGLIQKAVLLDTARIVRRFLSLEP

SEQ ID NO: 11429 - protein, 1197 aa, Noctua pronuba
MLTRAAARRARLSPPDPSLSSASPLPESSPIVSAVTPAVAVASSSSDEYFSPPTTPPPVRRRRGRRPPDGLGPRGPPASDRVPALGGSVQRMRWTQSINENVMRSYYGATEGGNNRTAYRVRMLSLFQVLEPAVNVSAQRLSDQVRVIQRNRMLDDIVLDRLRTEMQSSHVITPSAQAVVLPQSNTIPNRANDESNDMVTNVSTQCNEEIRSALEGAIREYRSMQPDLRPRIPRLPMHNKNRALVAVLDSQLSNYFDNCEDLTDAHSILYCAAVAACRVAHVKFSDDRATRPKPAVPAWQYRIERRIGGARALIGKLICFREGNTRPRVMRFVRRAFSGTEISPRDYLARVTERIDFLKQKICAWASRIRRYKRRVERYTQNRTFQSDERWVYRAWERPDQGVTDTRLPGDDAMCLFWRSIWSVPVSHTEGDWTREVEQACDPIQEMGAIIISPQDVVCAVRPLPNWKSPGPDGLHNFWIKWFTRSHARLATLFQSALESGSLPEFLTTGITHLLHKSGSTAEPKNYRPITCLPTVYKVLTSILRTKISKHINDNSIMSPSQNGCRNGSRGTKELLLIDMAISQQVRRFRRDLSTCWIDYKKAYDSVPHTWLMRVLELYKVDTTLRTFLMSCMGQWRTVLRYPGCRQIQRDSEPIRIERGIFQGDSLSPLWFCLALNPLSTLLEDSGLGYRLRRGGQVISHLLYMDDLKLFAPNDLQLMELLKVTETFSSAIRMEFGVDKCAVMHVKRGEIVESVRTQLSDSINLRSLSATETYKYLGMSEALGINVTDMKQSLKERFFGRLKKVFNSLLSGGNKVRAFNGWVMPVLMYSFGILKWTQTELDALDRRVRTLLTAYRMHHPRSSVMRLYIPRRCGGRGFLNAKTLHNREICSLREYFLETDVGMHRDVVAVDKGLTPLSLAKENWRKPVVLDTNDRREVWQSKELHGRFFRVLHGPDVDLSASVAWLRSGDLFGETEGFVCAIMDEVMMTNNYRRFIVKDGTVDICRACHRPGESIRHIISGCSRLANGEYLHRHNLVARIIHQQLALKYNLVESEVPYYKYVPDPVLENGCVTLYWDRSIITDRTIVANKPDIVVVDRSERRAMIVDITVPHDENLVKAEKDKQIKYLDLAHEVVDLWDVDSAIIVPIVVSAHGLIAKSFDQHLRRLSLGSWIKGLIQKAVLLDTARIVRRFLSLEP

SEQ ID NO: 11430 - protein, 1206 aa, Noctua pronuba
MLTRLRAKQLAHPPSPGSSLSSASQPPGRATSVSTLSPVAAVASSSSDEFFSPPSTPPPPPPQRRRGRGRPPAGLGPRGQQAPNRVPAAGGNVSRMRWTQSINEQVMRAYYGATEGGSNLTAYRGRMLSLFQVIEPAVSVSAQRLSDQVRVIQRNHMLDDTVLDRLRSESRSNPVTPASPMIAVQLQSATSASPRSDHGGEEDDSEVISVSTQCNAQLRSALEGAFREYRSTPPELRPRLPRLPMHKKNKALMCALDSQLSNYFDSSKDLADTHSVLYCGAVAACRVAHVKFPNNDRATRPKLAVPAWQCRIERRIGEARALIGKLICFREGNTRPRVMRFVRRAFSGTDISFRDYLARVTERIDFLKQKICAWASRIRRYKRRVERYTQNRTFQSDERWVYRAWERPDQGVTDTHLPDDDAICSFWRSIWSVPVSHIEGDWTREVERACDPIPQMGAINISPQDVACAVRPLPNWKSPGPDGLHNFWIKWFQRSHVRLASQFQSALESGSLPQFLTTGITHLLHKSGSTAEPKNYRPITCLPTVYKVLTSILRAKINHHIDSNSIMSASQNGCRNGSRGTKELLLIDMAISQQVRRSRKNLSTCWIDYKKAYDSVPHTWLMRVLELYKVDATLRTFLMSCMGHWRTVLRYPGCRQIQGNSEPIRIERGIFQGDSLSPLWFCLALNPLSTLLEGSGLGYRLRRGGQVISHLLYMDDLKLFAPNNLQLMKLLKVTETFSSAISMEFGVDKCAVMHVKRGEIMESVGTQLSDSIQLRSLSSTDTYKYLGMSEALGINTTDMKQSLRERFFGRLNKVLSSLLSGGNKVRAFNGWVMPVLMYSFGILKWTQSELDALDRRVRALLTANRMHHPRSSVMRLYIPRKCGGRGFLNAKTLHNREVCSLREYFLEADVGMHRDVVSVDKGLTPLSLANENWRKPRVLDTNDRKEVWQGKELHGRFYRALHGPDVDFLASVSWLRFGDLFGETEGFVCAIMDEVMMTNNYRKYIVKDGTVDICRACHRPGESIRHIISGCSRLANGEYLHRHNLVARIIHQQLALKYNLVESEVPYYKYAPDPVLDNGNITLYWDRSIITDRTIVANKPDIVVIDRLERRAMIVDITVPHDENLVKAEKDKQFKYLDLAREVVDMWDVNTAVIVPIVVSANGLIAKSLDQHLRRLALGSWIKGLIQKAVLLDTARIVRRFLSQEP

SEQ ID NO: 11431 - protein, 1197 aa, Noctua pronuba
MLTRAAARRARLSPPDPSLSSASPLPESSPIVSAVTPAVAVASSSSDEYFSPPTTPPPVRRRRGHRPPDGLGPRGPPASDRVPALGGSVQRMRWTQSINENVMRSYYGATEGGNNRTAYRVRMLSLFQVLEPAVNVSAQRLSDQVRVIQRNRMLDDTVLDRLRTEMQSSHVITPSAQAVILPQSNTIPNRGNDESNDMVTNVSTQCNEEIRSALEGAIREYRSMQPDLRPRIPRLPMHNKNRALVAVLDSQLSNYFDNCEDLTDAHSILYCAAVAACRVAHVKFSDDRATRPKPAVPAWQYRIERRIGGARALIGKLICFREGNTRPRVMRFVRRAFSGTDISPRDYMFRVTERIDFLKQKVYAWANRIRRYKRRVDRYTQNRTFQRDERWVYRAWERPDQGVADTRLPDDDAMCSFWRSIWSVPVSHTEDEWTREVERACDPVQEMGAITISPQDVVCAVRPLPNWKSPGPDGLHNFWIKWFTRSHARLATLFQSALESGSLPEFLTTGITHLLHKSGSTAEPKNYRPITCLPTVYKVLTSILRTKISKHINDNSIMSPSQNGCRNGSRGTKELLLIDMPISQQVRRFRRDLSTCWIDYKKAYDSVPHTWLMRVLELYKVDTTLRTFLMSCMGQWRTVLRYPGCRQIQRDSEPIRIERGIFQGDSLSPLWFCLALNPLSTLLEDSGLGYRLRRGGQVISHLLYMDDLKLFAPNDLQLMELLKVTETFSSAIRMEFGVDKCAVMHVKRGEIVESVRTQLSDSINLRSLSATETYKYLGMSEALGINVADMKQSLKERFFGRLKKVFNSLLSGGNKVRAFNGWVMPVLMYSFGILKWTQTELDALDRRVRTLLTAYRMHHPRSSVMRLYIPRRCGGRGFLNAKTLHNREICSLREYFLEADVGMHRDVVAVDKGLTPLSLAKENWRKPVVLDTNDRREVWQSKELHGRFFRPLHGPDVDLSASVAWLRSGDLFGETEGFVCAIMDEVMMTNNYRRFIVKDGTVDICRACHRPGESIRHIISGCSRLANGEYLHRHNLVARIIHQQLALKYNLVESEVPYYKYVPDPVLENGCVTLYWDRSIITDRTIVANKPDIVVVDRSERRAMIVDITVPHDENLVKAEKDKQIKYLDLAHEVVDLWDVDSAIIVPIVVSAHGLIAKSFDQHLRRLSLGSWIKGLIQKAVLLDTARIVRRFLSLEP

SEQ ID NO: 11432 - protein, 1197 aa, Noctua pronuba
MLTRAAARRARLSPPDPSLSSASPLPESSPIVSAVTPAVAVASSSSDEYFSPPTTPPPVRRRRGRRPPDGLGPRGPPASDRVPALGGSVQRMRWTQSINENVMRSYYGATEGGNNRTAYRVRMLSLFQVLEPAVNVSAQRLSDQVRVIQRNRMLDDTVLDRLRTEMQSSHVITPSAQAVVLPQSNTIPNRANDESNDMVTNVSTQCNEEIRSALEGAIREYRSMQPDLRPRIPRLPMHNKNRALVAVLDSQLSNYFDNCVDLTDAHSILYCAAVAACRVAHVKFSDDRATRPKPAVPAWQYRIERRIGGARALIGKLICFREGNTRPRVMRFVRRAFSGTDISPRDYMSRVTERIDFLKQKVYAWANRIRRYKRRVDRYTQNRTFQRDERWVYRAWERPDQGVADTRLPDDDAMCSFWRSIWSVPVSHTEDEWTREVERACDPVQEMGAITISPQDVVCAVRPLPNWKSPGPDGLHNFWIKWFTRSHARLATLFQSALESGSLPEFLTTGITHLLHKSGSTAEPKNYRPITCLPTVYKVLTSILRTKISKHINDNSIMSPSQNGCRNGSRGTKELLLIDMAISQQVRRFRRDLSTCWIDYKKAYDSVPHTWLMRVLELYKVDTTLRTFLMSCMGQWRTVLRYPGCRQIQRDSEPIRIERGIFQGDSLSPLWFCLALNPLSTLLEDSGLGYRLRRGGQVISHLLYMDDLKLFAPNDLQLMELLKVTETFSSAIRMEFGVDKCAVMHVKRGEIVESVRTQLSDSINLRSLSATETYKYLGMSEALGINVADMKQSLKERFFGRLKKVFNSLLSGGNKVRAFNGWVMPVLMYSFGILKWTQTELDALDRRVRTLLTAYRMHHPRSSVMRLYIPRRCGGRGFLNAKTLHNREICSLREYFLETDVGMHRDVVAVDKGLTPLSLAKENWRKPVVLDTNDRREVWQSKELHGRFFRALHGPDVDLSASVAWLRSGDLFGETEGFVCAIMDEVMMTNNYRRFIVKDGTVDICRACHRPGESIRHIISGCSRLANGEYLHRHNLVARIIHQQLALKYNLVESEVPYYKYVPDPVLENGCVTLYWDRSIITDRTIVANKPDIVVVDRSERRAMIVDITVPHDENLVKAEKDKQIKYLDLAHEVVDLWDVDSAIIVPIVVSAHGLIAKSFDQHLRRLSLGSWIKGLIQKAVLLDTARIVRRFLSLEP

SEQ ID NO: 11433 - protein, 1200 aa, Tinea trinotella
MLTRSRARHQRTQLPSSGSSLSSASQPPESMPTVSPVISVAAVASSSSDECFSPPTISPSARRRGGGRPPASLEPRGPSASGGVPATSGRVQRMRWTQSINENVMRSYFGATEGGISLTAYRGRMLTLFQVLEPAVNVSAQRLSDQVRVIQRNRMLDDVVLDRLRLESRSSHVSPVSPPVAVQLQPSALPRPNNIEENDDDVTISVSNQYNEQLRSALENAFREYRSTPPGLRPRIPRLPMHKKNRALVCALDSQLANQFESSKDLADTHSILYCAAVAVCRVAHVKFPNNDRAARLAVPAWQCRIERRIGDARALIGKLISFREGNTRPRVMRFVRRAFSGTDISSRDYQTRVTERIDFLKQKIYAWANRIRRYKRRVERYTQNRTFENNERWVYRAWERPDQDVSDTCLPDDDAMSLFWRNIWSVPVGHTEGEWTREVERACDLIPEMGAINISPQDVACAVRPLPNWKSPGLDGLHNFWIKYFQRSHACLAAQFQSALELGSLPQFLTTGITHLLHKSGSTAEPKNYRPITCLPTVYKVLTSILRAKINNHIDANCIMSASQNGCRSGSRGTKELLLIDVAISQQVRRSRRDLSTCWIDYKKAYDSVPHTWLMRVLELYKVDAALRTFLVSCMGQWRTVLHYPGCRRILGNGEPIKIERGIFQGDSLSPLWFCLALNPLSTLLDGSGQGYRLRRDGQVISHLLYMDDLKLFAPNNLQLMKLLKVTETFSSAISMEFGADKCATMHVKRGEIMESVGIQLSDSIHLRSLCSTETYKYLGMSEALGINAVDVKQSLKDRFFGRLNKVLNSLLSGGNKVRAFNGWVMPVLMYSFGILKWTQTELDALDRRVRTLLTANRMHHPRSSVMRLYIPRKCGGRGFLNAKTLHNREVCSLREYFLKTDVGMHRDVVAVDKGLTSLSLANENWRKPVVLDTNDRREVWQSKELHGRFFRALHGPDVDFLASVSWLRFGDLFGETEGFVCAIMDEVMMTNNYRKYIVKDGTVDICRACHRPGESIRHIISGCSRLANGDYLHRHNLVARIIHQQLALKYNLVESEVPYYRYVPDPVLENGNITLYWDRSIITDRTIVANKPDIVVIDRLERRTIIVDVAVPHDENLVKAEKDKQIKYLDLAREVVDMWEVDAAIIVPIVVTANGLIAKSLDKHLKRLSLGSWIKRLIQKAVLLDTARIVRRFLAQEP

SEQ ID NO: 11434 - protein, 1200 aa, Tinea trinotella
MLTRSRARNQSAQLTSSGSSLSSASQPPRSTPTVSPVISVAAVASSSSDECFSPPTTPPSARRRGGGRPPASLEPRGPSASGGVPATSGRVQRMRWTQSINENVMRSYFGATEGGISLTAYRGRMLTLFQVLEPAVNVSAQRLSDQVRVIQRNRMLDDVVLDRLRLESRSSHVSPVSPPVAVQLQPSALPRPNNIEENDDDVTISVSNQYNEQLRSALEDAFRECRSTPPGLRPRIPRLPMHKKNRALVCALDSQLVNHFKSSKDLADTHSILYCAAVAVCRVAHVQFPNNDRAARLAVPAWQCRIERRIGEARALIGKLISFREGNTRPRVMRFVRRAFSGTDISSRDYQTRVTERIDFLKQKIYAWANRIRRYKRRVERYTQNRTFQSNERWVYRAWERPDQDVSDMCLPDDDAMSLFWRNIWSVPVGHTEGEWTREVERACDLIPEMGAIIISPQDVACAVRPLSNWKSPGLDGLHNFWIKYFQRSHARLAAQFQSALELGSLPQFLTTGITHLLHKSGSTAEPKNYRPITCLPTVYKVLTSILRAKIDKHIDTNCIMSASQNGCRSGSRGTKELLLIDVAISQQVRRSRRDLSTCWIDYKKAYDSVPHTWLMRVLELYKVDAALRTFLVSCMGQWRTVLHYPGCRRILGNGEPIKIERGIFQGDSLSPLWFCLALNPLSTLLDGSGQGYRLRRDGQVISHLLYMDDLKLFAPNNLQLMKLLKVTETFSSAISMEFGVDKCAIMHVKRGEIMESVGTQLSDSIHLRSLCSTETYKYLGMSEALGINAVDVKQSLRDRFFGRLNKVLNSLLSGGNKVRAFNGWVMPVLMYSFGILKWTQTELDALDRRVRTLLTANRMHHPRSSVMRLYIPRKCGGRGFLNAKTLHNREVCSLREYFLKTDVGMHRDVVAVDKGLTSLSLANENWRKPVVLDANDRREVWQSKELHGRFYRALHGPDVDFLASVSWLRFGDLFGETEGFVCAIMDEVMMTNNYRKYIVKDGTVDICRACHRPGESIRHIISGCSRLANGDYLHRHNLVARIIHQQLALKYNLVESEVPYYRYVPDPVLENGNITLYWDRSIITDRTIVANKPDIVVIDRLERRTIIVDVAVPHDENLVKAEKDKQIKYLDLAREVVDMWEVDAAIIVPIVVTANGLIAKSLDEHLKRLSLGSWIKRLIQKAVLLDTARIVRRFLSQEP

SEQ ID NO: 11435 - protein, 868 aa, Spilosoma lubricipeda
MRFVKQAFLGTTISPQQYMSSVTERIDFLKQKVYAWANRIRRYRKRVDRFIQNRMFQRNEKWVYRKWEEPSPRVGEGRFPDENVTNTFWRNIWSVPVTHTEGDWYRDVERSCESITSMEPITISKDDIGCAVRSLPNWKSPGPDGLHNFWLKWFRSSHACLASQYQAAVDSGSLPQFLTTGITHLLYKSGSAMDPKKFRPITCLPTMYKLLTSILRLKISTHINNNLIMSVSQNGCRSGSRGTKELLIIDMTISQQVRRNRKSLATCWIDYKKAYDSVPHTWLLRVLELYKIDTTLCTFLKSCMGQWRTVLRYPGCRQTAVNDVLINIERGIFQGDSLSPLWFCLALNPLSALLEDSGLGYRLQKDDQVISHLFYMDDLKLLAPTKLQLTALLKVTENFSNSIKMKFGVDKCAVMYVKKGVIVESEGTELSDSTRLRSLFATETYKYLGFSQSLGIPEPDMKQSLRERFFGRLKKVLKSLLSGGNKVRAYNGWVMPVLMYSFGILRWTQTELDALDRRVRTLLTAFRMHHPRSSVMRLYIPRKFGGRGLLNAKTLHNREIYNLREYFLHTDVGVHRSVVTVDTGLTPLALAKENWRKPVVLSTNDRREVWKGKELHGRFYRALNGPDIDFKASTSWLRYGDLFGESEGFVCAIMDEVIMTNNYRKYILKDGTVDICRACHRPGESIRHIISGCSRLANGEYLHRHNQVARIVHQQLALKYHLVSSEVPYYRYVPDPVLENGRATLYWDRSIITDRIIVANKPDIVVIDRLERRAMIVDIAVPHDENLVKVEKEKQIKYLDLSHEIVDMWNVDSAIIVPIVVSAHGLIAKSLDQHLKRLTLEGWIKGLMQKAVLLDTARIVRRFLSLEP

SEQ ID NO: 11436 - protein, 1198 aa, Spilosoma lubricipeda
MLTRARSRAQLPTSDSSLRSALPSSDARTEVPTVAEASSSSSSDEFFSPPTSPTPVRRQGRGRPPTSLGSRGPLTSNRAPATGGDVRRMKWTHSINENVMRAYFRATELGTNLTAYRVRLVSLFQELEPAINVSAQRLSDQVRAIQRCHLLDDVVLERIRSDVRNTLTVPSSSHAVDVVGNTQQLPYIEDVDEHVESEIISVSTQYNDRIRSALEDAIQEYRYVNYINRPRLPRLPIHKRNLALVSALNSLLPDYFGNSEDLSDTHSILYCAAIAVCRVAGIKFNVEQVTTRPKNTVPAWQYRIERRIAETRTLIGKLIAFKLGNTRPRVMRFVKQAFLGTTISPQQYMSSVTERIDFLKQKVYAWANRIRRYKKRGDRFNQNRMFQRNEKWVYRKWEAPNPFESDGDLPDENTTNSFWRNIWSVPVTHTDGDWMRDVSRSCESITSMEPVIIDEEDISCAVRSLSNWKSPGPDGLHNFWLKWFRSSHACLASQLQAALDSGSLPQFLTTGITHLLHKSGSTMDPKNFRPITCLPTLYKLLTSILRLKITKHINNNSIISVSQNGCRSGTRGTKELLIIDMTISQQVRRNRKSLATCWIDYKKAFDSVPHTWLLKVLELYKIDTTLCTFLKSCMRQWRTVLRYPGCRQTAVNDVPIKIERGIFQGDSLSPLWFCLALNPLSTLLEGSGLGYRLQKDDRVISHLFYMDDLKLLAPTKLQLTALLRVTENFSNSIKMEFGVDKCAVMHVKKGVIVESEGIELSDSTRLRSLSATETYKYLGFSQSLGIPESDMKQSLRERFFGRLKKVLKSLLSGGNKVRAYNGWVMPVLMYSFGILRWTQTELDALDRRVRTLLTAFRMHHPRSSVMRLYIPRKFGGRGLLNAKTLHNREIYNLREYFLHTDVGMHRSVVAVDTGLTPLALAKENWRKPVVLGTDERREVWKGKELHGRFYRALNGSDIDFKASTSWLRYGDLFGETEGFVCAIMDEVIMTNNYRRYILKDGTVDICRACHRPGESIRHIISGCSRLANGEYLHRHNQVARIVHQQLALKYKLVNSEVPYYRYVPDPVLENGRATLYWDRSIITDRTIVANKPDIVVVDRSERRAMIVDIAVPHDENLVKVEKEKQMKYLDLSHEIVDMWNVDSVIIVPIVVSVHGLIAKSLDQHLKRLTLDGWIKGLMQKAVLLDTARIVRRFLSLEP

SEQ ID NO: 11437 - protein, 868 aa, Spilosoma lubricipeda
MRFVKQAFLGTTISPQQYMSCVTERIDFLKQKVYAWANRIRRYRKRIDRYNQNRMFQRNEKWVYRKWENLSPCMSGGQVPDENATNSFWRSIWSVPVAHTEGDWYRDVERSCESLLPMELINIDKEDVSCAVRSLPNWKAPGPDGLHNFWLKWFRSSHACLASQFQTALDSGSLPQFLTTGITHLLYKSGSAMDPKNFRPITCLPTLYKLLTSILRLKITTHINQNSILSVSQNGCRSGTRGTKELLIIDMTISQQVRRNRKSLATCWIDYKKAFDSVPHTWLLKVLELYKIDTTLCTFLKSCMRQWRTVLRYPGCRQTAVNDVPIKIERGIFQGDSLSPLWFCLALNPLSTLLEGSGLGYRLQKEAPVISHLFYMDDLKLFAPTKLQLTALLRVTENFSNSIKMEFGIDKCAVMHVKKGVIVESEGIELSDSTRLRSLSATETYKYLGFSQSLGIPESDMKQSLRERFFGRLKKVLKSLLSGGNRVRAYNGWVMPVLMYSFGILRWTQTELDALDRRVRTLLTAFRMHHPRSSVMRLYIPRKFGGRGLLNVKTLHNREIYNLREYFLHTDVGVHRSVVAMDTGLTPLALAKENWRKPVVLGTDERREVWKGKELHGRFYRALNGPDIDFKASTSWLRYGDLFGETEGFVCAIMDEVIMTNNYRKYILKDGTVDICRACHRPGESIRHIISGCSRLANGEYLHRHNQVARIVHQQLALKYKLVNSEVPYYRYVPDPVLENGRATLYWDRSIITDRTIVANKPDIVVIDRSERRAMIVDIAVPHDENLVKVEKEKQIKYLDLSHEIVDMWDVDSVIIVPIVVSVHGLIAKSLDQHLKRLALDGWIKGLMQKAVLLDTARIVRRFLSLEP

SEQ ID NO: 11438 - protein, 1196 aa, Spilosoma lubricipeda
MLTRARSRALLPSSDSSLCSALPSSDARTEVPTVAEASSSSSSDEFFSPPTSPTPVRRQGRGRPPTSLGSRGPLTSNRAPAAGGDVRRMKWTQSINENVMRAYFRATELGTNLTAYRVRLVSLFQELEPAVNVSAQRLSDQVRAIQRCHLLDETVLERICSDIRNSLTVPSSPHVVDVVTNSTPQNEDVSELVDSEIISVSTLYNDKIRSTLEDVIREYRCVNFNNRPRLPRLPIHKRNLALVSALDSLLPDYFGNSEDLSDTHSILYCAAIAVCRVAGIKFAENITTTRPENTVPAWQCRIERRIAGARTLIGKLISFRSGNTRPKVMRFVKQAFLGTTISPQQYMSCVTERIDFLKQKVYAWANRIRRYRKRIDRYNQNCMFQRNEKWVYRKWENLSPCMSDGQVPDENATNSFWRSIWSVPVAHTEGDWYRDVERSCESLLPMELINIDKEDVSCAVRSLPNWKAPGPDGLHNFWLKWFRSSHACLASQFQTALDSGSLPQFLTTGITHLLYKSGSAMDPKNFRPITCLPTLYKLLTSILRLKITTHINQNSILSVSQNGCRSGTRGTKELLIIDMTISQQVRRSRKNLATCWIDYKKAYDSVPHTSLLKVLKLYKIDTTLCTFLKSCMGQWRTVLRYPGCCQTAVNDVPIKIERGIFQGDSLSPLWFCLALNPLSTLLESSGLGYRLQKDAALISHLFYMDDLKLFAPTKLQLTALLRVTENFSNSIKMEFCVDKCAVMHVKKGVIVESEGIELSDSTKLRFLSATETYKYLGFSQSLGIPESDMKQSLRERFFGRLKKVLKSLLSGGNKVRAYNGWVMPVLMYSFGILRWTQTELDALDRRVRTLLTTFRMHHPRSSVMRLYIPRKFGGRGLLNIKTLHNREIYNLREYFLHTDVEMHRNVVAVDTGLTPLALVKENWRKPVVLSTNDRREVSKGKELHGRFYRALNGPDIYFKASTSWLRYGDLFGETEGFVCVIMDEVIMTNNYRKYILKDGTVDICRACHRPGESIRHIISGCSRLANGEYLHRHNQVARIVHQQLALKYHLVNSEVPYYRYVPDPVLENGRATLYWDRSIITDRTIVANKPDIVVIDRLERRAMIVDIAVPHDENLVKVEKEKQIKYLDLSHEIVDMWNVDSAIIVPIIVSAHGLIARSLDQHLKRLTLDGWIKGLMQKAVLLDTARIVRRFLSLEP

SEQ ID NO: 11439 - protein, 1194 aa, Autographa pulchrina
MLTRSRSRRPAPPPSPDSSPSSASPLPDHVPAPAPAVASSSSDEYYSPPTSPTPVRRQGRRRPPSSLAPAGQPASNRAPAPGGDVRRMKWTQGINENVMRAYYGATEGGTNLTAYRARMLSLFQGLEPDVNVSAQRLSDQVRVIQRNHRLDDATLDRLRSEVQRSPAASTPSPAVVPVIGSPPTNPADGEEEDGAITVSTQCSEHIRTTLEDMIREFRSTPPGLRPRLPRLPMHSRNKAIMGVLDSLLLVYFGSSEDLSDTHSILYCAALAACRVANVKINNINLDTRPKPAVPAWQCRIEHRVAEARALIGKLIAFKDGNSRPRVMRFVRRAFTGTNISPSEYTARVTERIDFFKQKVCAWASRIRRYKCRVDRFHQNRMFQRDQRWVFRTWERPVLGMDDRRLPDEDATNSFWRNIWSVPVSHSEGVWMRDVEESCEPIQEMRAITIGPQDVANAVRPMSNWKAPGPDGLQNFWLQWFRCSHGCLASQFQYAIESDALPQFFTTGSTHLLHKTGSTTDPKNYRPITCLPTIYKLLTSILRVKINEHIDSHSIMSASQNGCRNGSRGTKELLLIDMTICQQVRRSKKNLSTCWIDYKKAYDSVPHSWLMRVLELYKINTTLRAFLSSCMRRWTTVLRYPGCRDIQQSGEPIRIERGIFQGDSLSPLWFCLALNPLSTLLENSRLGYSLRRGSQVISHLLYMDDLKLFASNELQLMGLLKITESFSNSIRMEFGVDKCAVMHVKQGGIVESQGIQLSDSINLRSLSAADTYKYLGMSEALGIDVADMKQSLRTRFFGRLNKVLKSLLSGGNRVRAFNGWVMPVLMYSFGILKWTQTELDALDRRVRTLLTANRMHHPRSSVMRLYIPRKCGGRGFLNAKTLHNREVCNLREYFLQVDVGMHRDVVVVDKGFTPLSLGKENWHKPVVLSVKDRRDVWQSKELHGRFYRSLHGPDVDFLASVAWLRFGDLFGETEGFVCAIMDEVIMTNNYRKYIIKDGTVDICRACHCPGESIRHIISGCSRLANGEYLHRHNQVARIIHQQLALRYKLVEAEVPYYRYVPDPVLDNGHVTLYWDRSIITDRTIVANKPDIVVIDRSERRAMIVDVTIPHDENLVKAEKEKQMKYLDLAHEVVDMWEVDSAIIVPIVIIANGIIAKSLDQHLKRLSLGIWVKGLIQKAVLLDTARIVRRFLSLEP

SEQ ID NO: 11440 - protein, 868 aa, Ochropleura plecta
MRFVRRAFAGTDISPPDYISRIAERIDFLKQKVYAWANRIRRYKRRVERYTQNRTFQSDERWVYRTWERPDQGVSDTHLPDDNAMCLFWRSIWSVPVSHTEGEWTREVERACDPIPEMGALTISPQDVACAVRPLPNWKSPGPDGLHNFWIKWIQRSHVRLAALFQTALESGSLPKFLTTGITHLLHKSGSTAEPKNYRPITCLPTLYKVLTSILRAKITKHIDDNSIMSASQNGCRNGSRGTKELLLIDMAISQQVRRSRRHLSTCWIDYKKAYDSVPHTWLMRVLELYKIDATLRTFLISCMRQWSTVLRYPGCRQIQRNSEPIRIERGIFQGDSLSPLWFCLALNPLSTLLENSGLGYRLRRGGQVISHLLYMDDLKLFAPNDLQLMELLKVTETFSSSIRMEFGVDKCAVMHVKRGEIVESVGTQLSDSINLRSLSATETYKYLGMSEALGINVADMKQSLKERFFGRLRKVFNSLLSGGNKVRAFNGWVMPVLMYSFGILKWTQTELDALDRKVRTLLTTFRMHHPRSSVMRLYIPRSCGGRGFLNAKTLHNREICSLREYFLETDVGMHRDVVAVDKGFTPLSLAKENWRKPVVLDTNDRREVWQSKELHGRFFRALHGPDVDQPASVAWLRSGDLFGETEGFVCAIMDEVMMTNNYRRFIVKDGTVDICRACHRPGESIRHIISGCSRLANGEYLHRHNLVARIIHQQLALKYSLVESEVPYYRYEPDPVLEHGNITLYWDRSIITDRTIVANKPDIVVVDRSERRAMIVDITVPHDENLVKAEKDKQIKYIDLAREVVDMWDVDSAIIVPIVVSANGLIAKSLDQHLRRLSLGSWIKGLIQKAVLLDTARIVRRFLSLEP

SEQ ID NO: 11441 - protein, 1106 aa, Ochropleura plecta
MRWTSSINENVMRSYYGATEGGNNLTAYRVRMLSLFQVLEPAVNVSAQRLSDQVRVIQRNRMLDDTVLDRLRTEMQSSQVITSSSQAVVPPQSHQLVSRADEVSNDMATNVSTQCSEEMRSALEGAIREYRYMSPELRPRLPRLPMHNKNRALVAVLDSQLSNYFDNCENLTDAHSILYCAAVAACRVAHVKFPDDGATRPKPAVPFWQCRIERRIGVARALIGKLICFKEGNTRPRVMRFVRRAFAGTDISPPDYMSRITERIDFLKQKVYAWANRIRRYKRRVERYTLNRTFQSDERWVYRAWERPDQGVSDTHLPDDDAMCLFWRSIWSVPVSHTEGEWTREVERACDPIPEMGALTISPQDVACAIRPLPNWKSPGPDGLHNFWIKSIQRSHTCLATLFQTALESGSLPKFLTTGITHLLHKSGSTAEPKNYRPITCLPTLYKVLTSILRAKITKHIDDNSIMSASQNGCRNGSRGTKELLLIDMAISQQVRRSRRHLSTCWIDYKKAYDSVPHTWLMRVLEMYKVDATLRTFLISCMRQWSTVLRYPGCRQIQRNSEPIRIERGIFQGDSLSPLWFCLALNPLSTLLENSGLGYRLRRGGQVISHLLYMDDLKLFAPNDLQLMELLKVTETFSSAIRMEFGVDKCAVMHVKRGEIMESVGTQLSDSTNLRSLSATETYKYLGMSEALGINVADMKQSLKERFFGRLRKVFNSLLSGGNKVRAFNGWVMPVLMYSFGILKWTQTELDALDRKVRTLLTAFRMHHPRSSVMRLYIPRSCGGRGFLNAKTLHNREICSLREYFLETDVGMHRDVVAVDKGLTPLSLAKENWHKPVVLDTNDRKEVWQSKELHGRFFRALHGPDVDQSASVAWLRSGDLFGETEGFVCAIMDEVMMTNNYRRFIVKDGTVDICRACHRPGESIRHIISGCSRLANGEYLHRHNLVARIIHQQLALKYNLVESEVPYYRYEPDPVLEHGNITLYWDRSIITDRTIVANKPDIVVVDRSERRAMIVDITVPHDENLVKAEKDKQIKYIDLAREVVDMWDVDSTIIVPIVVSANGLIAKSLDQHLRRLSLGSWIKGLIQKAVLLDTARIVRRFLSLEL

SEQ ID NO: 11442 - protein, 1198 aa, Ochropleura plecta
MLTRAAQARNARHPPPGSSLSSASPPPEPSLVVSAVTPAVAVASSSSDEYFSPPTTPPPVRRRGRHRPPDGLGPRGPQASDRVPAPGGSVQRMRWTQSINENVMRSYYGATEGGNNLTAYRVRMLSLFQVLEPAVNVSAQRLSDQVRVIQRNRMLDDTVLDRLRTEMQSSQVITSSSQAVVPPQPHQLINRVNEVSNDVATNVSTQCSEEMRSTLEGAIREYRYISPELRPRLPRLPMHNKNRALVAALDSQLSSYFDNCENLTDAHSILYCAAVTVCRVAHVKFPDDRATRPKPAIPFWQCRIERRIGAARALIGKLTCFREGNTRPRVMRFVRRAFAGTDISPPDYISRIAERIDFLKQKVYAWANRIRRYKRRVERYTQNRTFQSDERWVYRAWERPDQGVSDTRLPDDDAMSLFWRSIWSVPVSHTEGEWTREVERACDPIPEMGALTISPQDVACAVRPLPNWKSPGPDGLHNFWIKWIQRSHVRLAALFQSALESGSLPKFLTTGITHLLHKSGSTAEPKNYRPITCLPTLYKVLTSILRAKITKHIDDNSIMSASQNGCRNGSRGTKELLLIDMAISQQVRRSRRHLSTCWIDYKKAYDSVPHTWLMRVLDLYKIDATLRTFLISCMRQWSTVLRYPGCRQIQRNSEPIRIERGIFQGDSLSPLWFCLALNPLSTLLENSGLGYRLKRGGQVISHLLYMDDLKLFAPNDLQLMELLKVTETFSSAIRMEFGVDKCAVMHVKRGEIVESVGTQLSDSINLRSLSATETYKYLGMSEALGINVADMKQLLKERFFGRLRKVFNSLLSGGNKVRAFNGWVMPVLMYSFGILKWTQTELDALDRKVRTLLTAFRMHHPRSSVMRLYIPRSCGGRGFLNAKTLHNREICSLREYFLETDVGMHRDVVAVDKGLTPLSLAKENWRKPVVLDTNDRREVWQSKELHGRFFRALHGPDVDQSASVAWLRSGDLFGETEGFVCAIMDEVMMTNNYRRFIVKDGTVDICRACHRPGESIRHIISGCSRLANGEYLHRHNLVARIIHQQLALKYNLVESEVPYYRYEPDPVLEHGYITLYWDRSIITDRTVVANKPDIVVVDRSERRAMIVDITVPHDENLVKAEKDKQIKYIDLAREVVDMWDVDSAIIVPIVVSANGLIAKSLDQHLRRLSLGSWIKGLIQKAVLLDTARIVRRFLSLEP

SEQ ID NO: 11443 - protein, 1200 aa, Hecatera dysodea
MLTRSRTRCQNTRLTPSDSSLSSASQPPGPTPPVSPEIPVAAVASSSSDEYFSPPTTPPPARRRGRGRPPNSLGPRGPPASDRVPAIGGSVQRMRWTHSINENVMRSYFGATEGGTNLTAYRGRMLSLFQVLEPAVNVSAQRLSDQVRVIQRNRMLDDAVLDRLRLESRSSRVSPASPPAAVQIQPSISPRPDHVSEDVDDGTISVSTQCNERLRSALEDAFREYRSTPPELRPRLPRLPMHNKNRALVCALDSQLSIYFDSSENLTDTHSILYCGAAAACRVAHVKLPNSDRVARPAVPAWQCRIERRIAEARALIGKLICFREGNTRRRVMRFVRRAFSGTDISPRDYLTRVTERIDFLKQKVYAWANRIRRYKRRVERYTQNRIFQNNERWVYRAWERPDQGVTDTRLPDDEAMLSFWRNIWSVPISHTEGDWTREVERACDSIPEMGAINISPQDVARAVRPLPNWKSPGPDGLHNFWIKWLTRSHARLASQFQSALESRSLPQFFTTGITHLLHKSGSTADPKNYRPITCLPTVYKVLTSILRAKINDHIESNSIMSTSQNGCRSGARGTKELLLIDVAISQQVRRSRKDLSTCWIDYKKAYDSVPHTWLMRVLELYKVDAVLRAFLMSCMGQWRTVLHYPGCRQTQANSEPIRIERGIFQGDSLSPLWFCLALNPLSTLLEGSGQGYRLRRGGQVISHLLYMDDLKLFAPNNLQLMKLLKVTETFSSDISMEFGVDKCAVMHVKRGEIMESVGTQLSDSIHLRSLCSTETYKYLGMSEALGINATSVKQSLKERFFGRLNKVLNSLLSGGNKVRAFNGWVMPVLMYSFGILKWTQTELDALDRRVRSLLTANRMHHPRSSVMRLYIPRKCGGRGFLNAKTLHNREVCSLREYFLEAVVGMHRDVVAVDKGFTPLSLANENWRKPVVLDTNDRREVWQSKELHGRFYRVLHGPDVDFLASVAWLRFGDLFGETEGFICAITDEVMMTNNYRKYIVKDGTVDICRACHRPGESIRHIISGCSSLANGDYLHRHNLVARIIHQQLALKYNLVESEVPYYRYAPDPVLENGNCTLYWDRSIITDRTIVANKPDIVVIDRLERRAMIVDIAVPHDENLVKAEKDKQSKYLDLAREVVDMWDVNTAVIVPIVVTANGIIAKSLDQHLKRLSLGSWIKGLIQKAVLLDTARIVRRFLSREP

SEQ ID NO: 11444 - protein, 1200 aa, Mythimna impura
MLTRAAARRARPPPPASSLSSASPPPEPCPTVSAVTPAVAAASSSSDEYYSPPTTPPPTRRRGERRPPACLGSRGPPASDRVPATGGCVSRMRWTQSINENVMRAYYGATEGGNNLTAYRVRMLSLFQVLEPAVNVSAQRLSDQVRVIQRNHMLDDTVLDRLRTEMGSHAIASSSQTAVPPQVLASNHLPNHADEESTDMVTHVSTQCSNELRSALECAIREYRNMPLELRPRLPRLPMCNKNKALVAALDSQLSNYFDDCEDLTDTHSIMYCAAVAACRVAHVKFPNSDVATRPKPAVPAWQCRIERRIGGARALIGKLICFREGNTRPRVMRFVRRAFSGTDISPRDYMSCVTERIDFLKQKVYAWANRIRRYKRRVERYTQNRTFRSNERWVYRAWEQPDQGVTDTRLPDDDAMSSFWRNIWSVPVSHTEGGWTREVERACEPIPEMGAITISPQDVARAVRPLPNWKSPGPDGLHNFWIKWLQRSHARLASQYQTALESGSLPEFLTTGVTHLLHKSGSTAEPKNYRPITCLPTVYKVLTSILRAKINHHVDNNAIMSASQNGCRNGSRGTKELLLIDMAISQQVRRSRKDLSTCWIDYKKAYDSVPHTWLMRVLELYKIDTTLRTFLMSCMRQWRTVLRYPGCRHIQRNSEPVRIERGIFQGDSLSPLWFCLALNPLSTLLENSGLGYRLKRGGQVISHLLYMDDLKLFAPNNLQLMELLKVTETFSSAIRMEFGVDKCAVMHVKRGEIVESVGTQLSDSINLRSLSPTETYKYLGMSEALGINATDMKQTLRERFFGRLKKVFNSLLSGGNKVRAFNGWVMPVLMYSFGVLKWTQTELDALDRRVRTLLTAYRMHHPRSSVMRLYIPRKCGGRGFLNAKTLHHREVCSLREYFLTADVGMHRDVVAVDKGLTPLSLANESWRKPVVLDTNDRREVWQSKELHGRFFRALHGPDVDQLASVAWLRVGDLFGETEGFVCAIMDEVIMTNNYRRFIVKDGTVDICRACHRPGESIRHIISGCSRLANGEYLHRHNLVARIIHQQLALNYSLVESEVPYYRYVPDPVLDNGDITLYWDRSIITDRTIVANKPDIVVVDRRERRTMIVDISVPHDENLVKAEKDKQIKYIDLAREVVDMWDVDSAIIVPIVVSANGLIAKSLDQHLRRLALGGWIKGLIQKAVLLDTARIVRRFLSLEP

SEQ ID NO: 11445 - protein, 1200 aa, Mythimna impura
MLTRSRAREQETHPTSSGSSLSSASQPPGSAPAVSPVIPAAAVASSSSDEYFSPPTTPPPARRRGRGRPPASLRPRGPPASDRVPAAGGSVQRMRWTQSINENVMRSYFGATEGGSNLTAYRGRMLSLFQVLEPTVNVSAQRLSDQVRVIQRNRMLDDAVLDRLRSESQRSRASSATPPAAVQLQPSALPRPDHVGDADDDAAISVSTQCNERLRSALEGAFREYRSTPPGLRPRLPRLPMHKRNRALVCALDSQLSNCFDSSKDLADTHSILYCAAAAACRVAHVKFPNCDRATRPAVPAWQRRIERRIGEARALIGKLICFREGNTRPRVMRFVRRAFLGTDISPQNYLPCVTERIDFLKQKVYAWASRIRRYKRRVERYTQNRTFQSNERWVYRTWERPDQDVTDTRLPDDDAMCSFWRRIWSVPVSHIEGDWIREVERTCDLLPEMGAITISPQDVARAVRPLPNWKSPGPDGLHNFWIKWFQGSHARLASQFQSALESGSLPEFLTTGITHLLHKSGSTADPKNYRPITCLPTVYKVLTSILRAKINTHIETNSIMSASQNGCRNGSLGTKELLLIDMAISQQVRRSRKDLSTCWIDYKKAYDSVPHTWLMRVLELYKVDTTLRTFLMSCMRQWRTVLHYPGCRQIRENSEPIRIERGIFQGDSLSPLWFCLALNPLSTLLEGSGLGYRLKRGGQVISHLLYMDDLKLFAPNNLHLMELLKVTEAFSSAIRMEFGVDKCAVMHVKRGEIMESVGTQLSDSIYLRSLCSTETYKYLGMSEALGINAADMKQSLKERFFGRLNRVLKSLLSGGNKVRAFNGWVMPVLMYSFGILKWTQTELDALDRRVRTLLTANRMHHPRSSVMRLYIPRKCGGRGFLNAKTLHNREVCSLREYFLETDVGMHRDVVAVDKGLTPLSLANGNWRKPIILDTNDRREVWQSKELHGRFYRALHGPDVDLLASVSWLRFGDLFGETEGFVCAIMDEVVMTNNYRKYIVKDGTADICRACHRPGESIRHIISGCSHLANGDYLHRHNLVARIIHQQLALKYNLVESEVPYYKYVPDPVLDNGSITLYWDRSIITDRTIVANKPDIVVIDRLERRTVIVDIAVPHDDNLVKAEKDKQTKYLDLAREVVDMWEVDTAVIVPIVVTANGLISKSLDQHLRRLSLGSWIKGLIQKAVLLDTARIVRRFLSQEP

SEQ ID NO: 11446 - protein, 1168 aa, Mythimna impura
MLTRSRAQKLHTHPTSSGSSLSSASQPPGPAPTVSPEIPVAAVASSSSDEYFSPPTTPPPARRRGRGRPPASLGPRGPPASDRVPAAGGSVQRMRWTSSINENVMRSYFGATEGGINLTAYRGRMLSLFQVLEPAVNVSVQRLSDQVRVIQRNVIQCMLDDAVLDRLRLESQSSRVSPATTPVAVQRLPTASPRPVQVGDADDDAAISVSTQCNDRLRGALEDAFREYRSIPPGLRPRLPRLPMHKRNRALVCALDSQLSNCFDSSKDLTDTHSILYCAAVAACRVAHVKFPNCDRATRPAVIGEARALIGKLICFREGNTRPRVMRFVRRAFSGTDISPRDYLPCVTERIDFLKQKIYAWANRIRRYKRRVERYTRNRTFQSNERWVYRDWERSDQGVTDTRLPDDDAMCSFWRSIWSAPVSHTEGDWIREVERACDLLPEMGAITISPQDVARAVRPLPNWKSPGPDGLHNFWVKWFQRSHARLASQFQSALESGSLPQFLTTGITHLLHKSGSTAEPKNYRPITCLPTVYKVLTSILRAKINSHIETNSIMSASQNGCRNGSRGTKELLLIDIAINQQVRRSRKNLSACWIDYKKAYDSVPHTWLMRVLELYKVDATLRTFLMSCMGQWRTVLHYPGCRQIQENNEPIRIERGIFQGDSLSPLWFCLALNPLSTLLEGSGLGYRLKRGGQVISHLLYMDDLKLFAPNNLQLEELLKVTETFSSAIRMEFGVDKCAVIHVKRGEIIESVGIQLSDSIHLRSLCSAETYKYLGMSESLGINTDDVKQSLKERFFGRLNKVLNSLLSGGNKVRAFNGWVMPVLMYSFGILKWTQTELDALDRRVRTLLTANRMHHPRSSVMRLYIPRKCGGRGFLNVKTLHNREVCSLREYFLKTDVGMHRDVVAVDKGLTPLSLANENWRKPIVLDTNDRREVWQSKELHGRFYRALHGPDVDLLASVSWLRFGDLFGETEGFVFAIMDEVMMTNNYRKYIVKDGTVDICRACHRPGESIRHIISGCSHLANGHYLHRHNLVARIIHQQLALKYNLVESEVPYYRYVPDPVLDNGNITLYWDRSIITDRTIVANKPDIVVIDRLERRTMIVDIAVPHDENLVKAEKDKQTKYLDLAREVVDMWEVDRAIIVPIGLLFFIFLNVFFNVFFFLRKYLKI

SEQ ID NO: 11447 - protein, 1142 aa, Mythimna impura
MLTRSRAQKLHTHPTSSGSSLSSASQPPGPAPTVSPEIPVAAVASSSSDEYFSPPTTPPPARRRGRGRPPASLGPRGPPASDRVPAAGGSVQRMRWTSSINENVMRLYFGATEGGINLTAYRGRMLSLFQVLEPAVNVSVQRLSDQVRVIQRNRMLDDAVLDRLRLESQSSRVSPATTPAAVQRLPTASPRPVQVGDADDDAAISVSTQCNDRLRGALEDAFREYRSTPPGLRPRLPRLPMHKRNRALVCALDSQLSNCFDSSKDLTDTHSILYCAAVAACRVAHVKFPNCDRATRPAVPAWQCRIEHRIGEARALIGKLICFREGNTRPRVMRFVRRAFSGTDISPRDYLPCVTERIDFLKQKIYAWANRIRRYKRRVERYTRNRTFQSNKRWVYRDWERSDQGVTDTRLPDDDAMCSFWRSIWSAPVSHTEGDWIREVERACDLLPEMGAITISPQDVARAVRPLPNWKSPGPDGLHNFWVKWFQRSHARLASQFQSALESVSLPQFLTTGITHLLHKSGSTAEPKNYRPITCLPTVYKVLTPILRAKINSHIETNSIMSASQNGCRNGSRGTKELLLIDIAISQQVRRSRKNLSTCWIDYKKAYDSVPHTWLMRVQELYKVDATLRTFLMSCMGQWRTVLHYPGCRQIQENNEPIRIERGIFQGDSLSPLWFCLALNPLSTLLEGSGLGYRLKRGGQVISHLLYMDDLKLFAPNNLQLVELLKVTETFSSAIRMEFGVDKCAVIHVKRGEIMESVGIQLSDSIHLRSLCSTETYKYLGMSESLGINTDDVKQSLKECFFGRLNKVLNSLLSGGNKVRAFNGWVMPVLMYSFGILKWTQTELDALDRRVRTLLTANRMHHPRSSVMRLYIPRKCGGRGFLNAKTLHNREVCSLREYFLKTDVGMHRDVVAVDKGLTPLSLANENWRKPIVLDTNDRREVWQSKELHGRFYRALHGPDIDLLASVSWLRFGDLFGETEGFVFAIMDEVMMTNNYRKYILKDGTVDICRACHRPGESIRHIISGCSHLANGDYLHRHNLVARIIHQQLALKYNLVESEVPYYRYVPDPVLDNGNITLYWDRSIITDWTIVANKPDIVVIDRLERRTMIVDIAVPHDENLVKAEKDKQTKYLGSRGCRHVGSG

SEQ ID NO: 11448 - protein, 1200 aa, Mythimna impura
MLTRSWAREQETHPTSSGSSLSSASQPPGPAPAVSPVIPAAAVASSSSDEYFSPPTTPPPARRRGRGRPPASLRPRGPPASDRVPAAGGSVQRMRWTQSINENVMRSYFGATEGGSNLTAYRGRMLSLFQVLEPTVNVSAQRLSDQVRVIQRNRMLDDAVLDRLRLESQRSRASSATPPAAVQLQPSALPRPDHVGDADDDAAISVSTQCNERLRSALEDAFREYRSTPPGLRPRLPRLPMHKRNRALVCALDSQLSNCFDSSKDLADTHSILYCAAAAACRLAHVKFPNCDRATRPAVPAWQRRIERRIGEARALIGKLICFREGNTRPRVMRFVRRAFLGTDISPQNYLPCITERIDFLKQKVYAWASRIRRYKRRVERYTQNRTFQSNERWVYRTWERPDQDVTDTRQPDDDAMCSFWRRIWSVPVSHIEGDWIREVERTCDLLPEMGAITISPQDVARAVRPLPNWKSPGPDGLHNFWIKWFQGSHARLASQFQSALESGSLPEFLTTGITHLLHKSGSTADPKNYRPITCLPTVYKVLTSILRAKINTHIETNSIMSASQNGCRNGSRGTKELLLIDMAISQQVRRSRKDLSTCWIDYKKAYDSVPHTWLMRVLELYKVDTTLRTFLMSCMRQWRTVLHYPGCRQIRENSEPIRIERGIFQGDSLSPLWFCLALNPLSTLLEGSGLGYRLKRGGQVISHLLYMDDLKLFAPNNLHLMELLKVTETFSSAIRMEFGVDKCAVMHVKRGEIMESVGTQLSDSIYLRSLCSTETYKYLGMSEALGINAADVKQSLKERFFGRLNRVLKSLLSGGNKVRAFNGWVMPVLMYSFGILKWTQTELDALDRRVRTLLTANRMHHPRSSVMRLYIPRKCGGRGFLNAKTLHNREVCSLREYFLKTDVGMHRDVVAVDKGLTPLSLANGNWRKPIILDTNDRREVWQSKELHGRFYRALHGPDVDLLASVSWLRFGDLFGETEGFVCAIMDEVVMTNNYRKYIVKDGTADICRACHRPGESIRHIISGCSHLANGDYLHRHNLVARIIHQQLALKYNLVESEVPYYKYVPDPVLDNGSITLYWDRSIITDRTIVANKPDIVVIDRLERRTVIVDIAVPHDDNLVKAEKDKQTKYLDLAREVVDMWEVDTAVIVPIVVTANGLISKSLDQHLRRLSLGSWIKGLIQKAVLLDTARIVRRFLSQEP

SEQ ID NO: 11449 - protein, 1200 aa, Mythimna impura
MLTRAAARRARLPPPASSLSSASPPPESSPTVSAVTPAVAVASSSSDEYFSPPTSPPPARRRRGRRPPSGLGPRGPPASDRVPAPGGSVQRMRWTQSINENVMRAYYGATEGGNNLTAYRVRMLSLFQVLEPAVNVSAQRLSDQVRVIQRNHMLDDTVLDRLRTEMSNHAIAPSSQPVVPVMVPPSYHLSDHADEEITDMVTHVSTQCNNELRSALECAIREYRNMPLELRPRLPRLPMHNKNKALVAALDLQLSNYFDDCEDLTDTHSIMYCAAVAACRVAHVKFPSCDVSTRPKPAVPAWQCRIERRIGGARALIGKLICFREGNTRPRVMRFVRRAFSGTDISPRDYMSRVTERIDFLKQKVYAWANRIRRYKRRVERYTQNRTFRSNERWVYRAWERPDQGVTDTRLPDDDAMSSFWRIIWSVPVSHTEGDWTREVERACDPIPQMGAIDISPQDVARAVRPLPNWKSPGPDGLHNFWIKWFTRSHARLAYQFQSALESGSLPQFLTTGITHLLHKSGSTAEPKNYRPITCLPTVYKVLTSILRSKINSHIDKNLIMSPSQNGCRNGSRGTKELLLIDMTISQQVRRFRKDLSTCWIDYKKAYDSVPHTWLMRVLELYKIDTTLRTFLMSCMRQWSTVLRYPGCRNIQTNSEPVRIERGIFQGDSLSPLWFCLALNPLSTLLENSGLGYRLKRGGQVISHLLYMDDLKLFAPNNLQLMELLKVTETFSSAIRMEFGVDKCAVMHVKRGEVVESVGTQLTDSINLRSLSPTVTYKYLGMSKALGINITDMKQSLKERFFGRLKKVFNSLLSGGNKVRAFNGWVMPVLMYSFGVLKWTQTELDALDRRVRTLLTAYRMHHPRSSVMRLYIPRKCGGRGFLNAKTLHNREVCSLREYFLATDVGMHRDVVAVDKGLTPLSLANENWRKPVVLDTNDRREVWQSKELHGRFFRAFHGPDVDQLASVAWLRFGDLFGETEGFVCAIMDEVIMTNNYRRFIVKDGTVDICRACHRPGESIRHIISGCSRLANGEYLHRHNLVARIIHQQLALKYSLVESEVPYYRYEPDPVLDNGHITLYWDRSIITDRTIVANKPDIVVVDRSERRAMIVDISVPHDENLVKAEKDKQIKYIDLAREVVDMWDVDSAIIVPIVVSANGLIAKSLDQHLRRLALGGWIKALIQKAVLLDTARIVRRFLSLEP

SEQ ID NO: 11450 - protein, 1200 aa, Mythimna impura
MLTRSRAREQETHPTSSGSSLSSASQPPGPAPAVSPVIPAAAVASSSSDEYFSPPTTPPPARRRGRGRPPASLRPRGPPASDRVPAAGGSVQRMRWTQSINENVMRSYFGATEGGSNLTAYRGRMLSLFQVLEPTVNVSAQRLSDQVRVIQRNRMLDDAVLDRLRLESQRSRVSSATPPAAVQLQPSALPRPDHVGDADDDAAISVSTQCNERLRSALEDAFREYRSTPPGLRPRLPRLPMHKRNRALVCALDSQLSNCFDSSKDLADTHSILYCAAAAACRVAHVKFPNCDRATRPAVPAWQRRIERRIGEARALIGKLICFREGNTRPRVMRFVRRAFLGTDISPQNYLPCVTERIDFLKQKVYAWASRIRRYKRRVERYTQNRTFQSNERWVYRTWERPDQDVTDTRLPDDDAMCSFWRRIWSVPVSHIEGDWIREVERTCDLLPEMGAITISPQDVARAVRPLPNWKSPGPDGLHNFWIKWFQGSHACLASQFQSALESGSLPEFLTTGITHLLHKSGSTADPKNYRPITCLPTVYKVLTSILRAKINTHIETNSIMSASQNGCRNGSRGTKELLLIDMAISQQVRRSRKDLSTCWIDYKKAYDSVPHTWLMRVLELYKVDTTLRTFLMSCMRQWRTVLHYPGCRQIRENSEPIRIERGIFQGDSLSPLWFCLALNPLSTLLEGSGLGYRLKRGGQVISHLLYMDDLKLFAPNNLHLMELLKVTETFSNAIRMEFGVDKCAVMHVKRGEIIESVGTQLSDSIYLRSLCSTETYKYLGMSEALGINAADVKQSLKERFFGRLNRVLKSLLSGGNKVRAFNGWVMPVLMYSFGILKWTQTELDALDRRVRTLLTANRMHHPRSSVMRLYIPRKCGGRGFLNAKILHNREVCSLREYFLETDVGMHRDVVAVDKGLTPLSLANGNWRKPIILDTNDRREVWQSKELHGRFYRALHGPDVDLLASVSWLRFGDLFGETEGFVCAIMDEVVMTNNYRKYIVKDGTADICRACHRPGESIRHIISGCSHLANGDYLHRHNLVAKIIHQQLALKYNLVESEVPYYKYVPDPVLDNGSITLYWDRSIITDRTIVANKPDIVVIDRLERRTVIVDIAVPHDENLVKAEKDKQTKYLDLAREVVDMWEVDTAVIVPIVVTANGLISKSLDQHLRRLSLGSWIKGLIQKAVLLDTARIVRRFLSQEP

SEQ ID NO: 11451 - protein, 1200 aa, Mythimna impura
MLTRSRAREQETHPTSSGSSLSSASQPPGPAPAVSPVIPAAAVASSSSDEYFSPPTTPPPARRRGRGRPPASLRPRGPPASDRVPAAGGSVQRMRWTQSINENVMRSYFGATERGSNLTAYRGRMLSLFQVLESTVNVSAQRLSDQVRVIQRNRMLDDAVLDRLRLESQRSRASSATPPAAVQLQPSALPRPDHVGDADDDAAISVSTQCNERLRSALEDAFREYRSTPTGLRPRLPRLPMHKRNRALVCALDSQLSNCFDSSKDLADTHSILYCAAAAACRVAHVKFPNCDRATRPAVPAWQRRIERRIGEARALIGKLICFREGNTRPRVMRFVRRAFLGTDISPQNYLPCVTERIDFLKQKVYAWASRIRRYKRRVERYTQNRTFQSNERWVYRTWERPDQDVTDTRLPDDDAMCSFWRRIWSVPVSHIEGDWIREVERTCDLLPEMGAITISPQDVARAVRPLPNWKSPGPDGLHNFWIKWFQGSHARLASQFQSALESGSLPEFLTTGITHLLHKSGSTADPKNYRPITCLPTVYKVLTSILRAKINTHIETNSIMSASQNGCRNGSRGTKELLLIDMAISQQVRRSRKDLSTCWIDYKKAYDSVPHTWLMKVLELYKVDTTLRTFLMSCMRQWRTVLHYPGCRQIRENSEPIRIERGIFQGDSLSPLWFCLALNPLSTLLEGSGLGYRLKRGGQVISHLLYMDDLKLFAPNNLHLMELLKVTETFSSAIRMEFGVDKCAVMHVKRGEIMESVGTQLSDSIYLRSLCSTETYKYLGMSEALGINAADMKQSVKERFFGRLNRVLKSLLSGGNKVRAFNGWVMPVLMYSFGILKWTQTELDALDRRVRTLLTANRMHHPRSSVMRLYIPRKCGGRGFLNAKTLHNREVCSLREYFLETDVGMHRDVVAVDKGLTPLSLANGNWRKPIILDTNDRREVWQSKELHGRFYRALHGPDVDLLASVSWLRFGDLFGETEGFVCVIMDEVVMTNNYRKYIVKDGTADICRACHRPGESIRHIISGCSHLANGDYLHKHNLVARIIHQQLALKYNLVESEVPYYKYVPDPVLDNGSITLYWDRSIITDRTIVANKPDIVVIDRLERRTVIVDIAVPHDDNLVKAEKDKQTKYLDLAREVVDMWEVDTAVIVPIVVTANGLISKSLDQHLRRLSLGSWIKGLIQKAVLLDTARIVRRFLSQEP

SEQ ID NO: 11452 - protein, 1107 aa, Mythimna impura
MRWTQSINENVMRSYFGATEGGSNLTAYRGRMLSLFQVLEPAVNVSAQRLSDQVRVIQRNRMLDDAVLDRLRLESRSSRVSPASPQAAVQLQSNVSLRPDHVGEDDDDGAISVSNQCNVRLRSALEDAFREYRFTPAELRPRLPRLPMHKKNRALVCALDSQLSNCFDSSEDLTDTHSILYCAAVAACRVARVKFPNSDRVTRPAVPAWQCRIERRIGEARALIGKLICFREGNTRPRVMRFVRRAFSGTDISPRDYLPHITERIDFLKQKVYAWANRIRRYKRRVERYTQNRTFQRNERWVYRAWERPDQGVIDTRLPDDDAMCSFWRSIWSVPVSHTEGDWIREIERTCDLIPEMGAITISPQDVARAVRPLPNWKSPGPDGLHNFWLKWFQRSHARLASQFQSALESGSLPQFLTTGITHLLHKSGSTAEPKNYRPITCLPTVYKVLTSILRAKINSHIETNSIMSASQNGCRNGSRGTKELLLIDVAISQQVRRSRRDLSTCWIDYKKAYDSVPHTWLMRVLELYKVDATLRTFLMSCMRQWRTALHYPGCQQIRESSEPIRIERGIFQGDSLSPLWFCLALNPLSTLLEGSGLGYRLRRGGHVISHLLYMDDLKLFASNNLQLMELLKVTETFSSAIRMEFGLDKCAVMHVKRGEIMESVGTQLSDSIYIRSLCSTETYKYLGMSEALGINAADMKQSLRERFFGRLNKVLNSLLSGGNKVRAFNGWVMPVLMYSFGILKWTQTELDALDRRVRSLLTANRMHHPRSSVMRLYIPRKCGGRGFLNAKTLHNREICSLREYFLKTDVGMHRDVVAVDKGLTPLSLVNENWRKPTVMDTNERRAVWQGKELHGRFYRALHGPDVDLLASVSWLRFGDLFGETEGFVFAIMDEVMMTNNYRKYIVKDGTVDICRACHRPGESIRHIISGCSHLANGDYLHRHNLVARIIHQQLALKYNLVESEVPYYRYVPDPVLENGGVTLYWDRSIITDRTIVANKPDIVVIDRLERRTMIVDIAVPHDENLVKAEKDKQTKYLDLAREVVDMWEVDRAIIVPIVVTANGLIAKSLEQHLRRLSLGSWIKGLIQKAVLLDTARIVRRFLSQEP

SEQ ID NO: 11453 - protein, 910 aa, Mythimna impura
MYCAAVAACRVAHVKFPNSDVATRPKPAVPAWQCRIERRIGGARALIGKLICFREGNTRPRVMRFVRRAFSGTDISPRDYMSCVTERIDFLKQKVYAWANRIRRYKRWVERYTQNRTFRSNERWVYKAWEQPDQGGADTRLPDDDAMSSFWRNIWSVPVSHTEGGWTREVERACEPIPEMGAITISPQDVARAVRPLPNWKSPGPDGLHNFWIKWLQRSHARLASQYQTALESGSLPEFLTTGVTHLLHKSGSTAEPKNYRPITCLPTVYKALTSILRAKINHHVDNNAIMSASQNGCRNGSRCTKELLLIDMAISQQVRRSRKDLSTCWIDYKKAYDSVPHTWLMRVLELYKIDATLRTFLMSCMRQWRTVLRYPGCRHIQRNSEPVRIERGLFQGDSLSPLWFCLALNPLSTLLENSGLGYRLNRGGQVISHLLYMDDLKLFAPNNLQLMELLKVTETFSSAIRMEFGVDKCAVMHVKRGEIVESVGTQLSDSINLRSLSPTETYKYLGMSEALGINATDMKQTLRERFFGRLKKVFNSLLSGGNKVRAFNGWVMPVLMYSFGVLKWTQTELDALDRRVRTLLTAYRMHHPRSSVMRLYIPRKCGGRGFLNAKTLHNREVCSLREYFLTADVGMHRDVVAVDKGLTPLSLANESWRKPVVLDTNDRREVWQSKELHGRFFRALHGPDVDQLASVAWLRVGDLFGETEGFVCAIMDEVIMTKNYRRFIVKDGTVDIYRACHRPGESIRHIISGCSRLANGKYLHRHNLVARIIHQQLALNYSLVESEVPYYRYVPDPVLDNGDITLYWDRSIITDRTIVANKPDIVVVDRRERRTMIVDISVPHDENLVKAEKDKQIKYIDLAREVVDMWDVDSAIIVPIDVSANGLIAKSLDQHRRRLALGGWIKGLI

SEQ ID NO: 11454 - protein, 1197 aa, Mythimna impura
MLTRAAARRARPPPPASSLSSASPPPEPCLTVSAVTPAVAAASSSSDEYYSPPTTPPPTRRRGERRPPACLGSRGPPASDRVPATGGCVSRMRWTQSINENVMRAYYGATEGGNNLTAYRVRMLSLLQVLEPAVNVSAQRLSDQVRVIQRNHMLDDTVLDRLRTEMGSHAIASSSQTAVPSQVSASNHLPNHADEESTDMVTHVSTQCSNELRSALECAIREYRNMPLELRPRLPRLPMCNKNKALVAALDSQLSNYFDDCEDLTDTHSIMYCAAVAACRVAHVKFPNSDVATRPKPAVPAWQCRIERRIGGARALIGKLICFREGNTRPRVMRFVRRAFSGTDISPRDYMSCVTERIDFLRQKVYAWANRIRRYKRRVERYTQNRTFRSNERWVYRAWEQPDQGVTDTRLPDDDAMSSFWRNIWSVPVSHTEGGWTREVERACEPIPEMGAITISPQDVARAVRPLPNWKSPGPDGLHNFWLQRSHARLASQYQTALESGSLPEFLTTGVTHLLHKSGSTAEPKNYRPITCLPTVYKVLTSILRAKINHHVDNNAIMSASQNGCRNGSRGTKELLLIDMAISQQVWRSRKDLSTCWIDYKKAYDSVPHTWLMRVLELYKIDTTLRTLLMSCMRQWRTVLRYPGCRHIQRNSEPVRIERGIFQGDSLSPLWFCLALNPLSTLLENSGLGYRLKRGGQVISHLLYMDDLKLFAPNNLQLMELLKVTETFSSAIRMEFGVDKCAVMHVKRGEIVESVGTQLSDSINLRSLSPTETYKYLGTSEALGINATDMKQTLRERFFGRLKKVFNSLLSGGNKVRAFNGWVMPVLMYSFGVLKWTQTELDALDRRVRTLLTAYRMHHPRSSVMRLYIPRKCGGRGFLNAKTLHNREVCSLREYFLTADVGMHRDVVAVDKGLTPLSLANESWRKPVVLDTNDRREVWQSKELHGRFFRALHGPDVDQLASVAWLRVGDLFGETEGFVCAIMDEVIMTNNYRRFIVKDGTVDICWACHRPGESIRHIISGCSRLANGEYLHRHNLVARIIHQQLALNYSLVESEVPYYRYVPDPVLDNGNITLYWDRSIITDRTIVANKPDIVVVDRRERRTMIVDISVPHDENLVKAEKDKQIKYIDLAREVVDMWDVDSAIIVPIVVSANGLIAKSLDQHLRRLALGGWIKGLIQKAVLLDTARIVRRFLSLEP

SEQ ID NO: 11455 - protein, 1202 aa, Phlogophora meticulosa
MLTRSRARVLNAPKTSSGSSLSSASQLPGPAPDVNPVTPAAAVVSSSSDEYYSPPTSPPPVRRCGRGRPPASLGLRGTPASARVPASGGSVQRMRWTQSINENVMRSYYGATEGGTNLTAYRGRMLSLFQVLEPAVNVSAQRLSDQVRVIQRNHMLDDTVLDRLRLNSRSIRVMPASPLVAVQLPTLPIVSPRPDYVGEEDDDAAISVSSQCNVRLRSALEDAFREYRSTPPGLRQRLPRLPMHKKNKALMCTVDSLLSNSFDNSKDLADTHSILYCAAAAACRVANVKFPNSKKATRPAVPAWQCRIERRIGEARVLIGKLICFREGNTRPRVMRFVRRAFSGTDISSRDYLTRVTERIDFLKQKICAWANRIRRYKRRVERYTQNRTFRSDERWVYRAWERPDQGVIDTCLPDDEAMYSFWRSIWSVPVSHTEGDWTREVERACEPLPVMGTINISPQDVACAVRPLPNWKSPGPDGLHNFWIKWLKSSHARLATQFQSALESGSLPQFLTTGITHLLHKSGSTAEPKNYRPITCLPTVYKVLTSILRSKINNHIETSLIMSVSQNGCKNGSRGTKELLLIDMAISQQVRRSRKDLSTCWIDYKKAYDSVPHTWLMRVLELYKIDTTLRTFLTSCMRQWRTVLHYPGCRQFRENSEPIRIERGIFQGDSLSPLWFCLALNPLSTLLEGSGLGYRLRRGAQVISHLLYMDDLKLFAPNNLQLMELLKVTETFSSAIRMDFGVDKCAVMHVKRGGIVESAGTQLSDSIYLRSLSSTETYKYLGMSEALGINAADMKQSLKERFFGRLNKVLNSLLSGGNKVRAFNGWVMPVLMYSFGILKWPQTELDALDRRVRTLLTANRMHHPRSSVMRLYISRKCGGRGFLNAKTLHNREVCSLREYFIEADVGMHRDVVAVDKGLTPLSLANENWRKPIVLDTTDRMEIWKNKELHGRFYRVLHGPDVDLLASISWLRFGDLFGETEGFVCAIMDEVIMTNNYRKYIVKDGPVDICRACHRPGESIRHIISGCSRLANGEYLHRHNLVARIIHQQLALKYNLVELEVPYYKYVPDPVLENGNITLYWDRSIITDRTIVANKPDIVVIDRSERRTMIVDITVPHDENLVKAEQEKQMKYLDLAREVVDMWDVNTAVIVPIVVTANGIIAKSLDQHLRRLSLGSWIKGLIQKAVLLETARIVRRFLSQEP

SEQ ID NO: 11456 - protein, 960 aa, Phlogophora meticulosa
MHKKNKALMCTLDSLLSNSFDSSRDLADTHSILYCAAVAACRVANVKFPNSVRSTRPAIPAWQCRIERRIGEARVVIGKLICFREGNTRPRVMRFVRRAFSGTDISSRDYLTRVTERIDFLKQKICAWANRIRRYKRRVERYTQNRTFRSDERWVYRTWERPDQGVTDTFLPDDEAMCLFWRSIWSVPVSHTEGDWTREVERTCEPLPEMGAINISPQDVACAVRPLPNWKSPGPDGLHNFWIKWLKSSHARLASQFQSALESGSLPQFLTTGITHLLHKSGSTAEPKNYRPITCLPTVYKVLTSILRSKINNHIDSTSIMSVSQNGCKNGSRGTKELLLIDMAISQQVRRSRKDLSTCWIDYKKAYDSVPHTWLMRVLELYKIDATLRTFLKSCMGQWRTVLHYPGCRQFQENSEPIRIERGIFQGDSLSPLWFCLALNPLSTLLEGSGLGYRLRRGGQVISHLLYMDDLKLFAHNNLQLMKLLKVTETFSSAIRMDFGVDKCAVMHVKRGGIVESAGTQLSDSIYLRSLSSTETYKYLGMSEALGINTADMKQSLKERFFGRLNKVLNSLLSGGNKVRAFNSWVMPVLMYSFGILKWTQTELDALDRRVRTLLTANRMHHPRSSVMRLYISRKCGGRGFLNAKTLHNREVCSLREYFLETDVGMHRDVVAMDKALTPLSLANENWRKPIVLDTTDRMEIWKSKELHGRFYRVLHGPDVDLSASVSWLRFGDLFGETEGFVCAIMDEVIMTNNYRKYIVKDGTVDICRACHRSGESIRHIISGCSRLANGDYLHRHNLVAKIIHQQLALKYNLVESEVPYYKYVPDPVLENGNITLYWDRSIITDRTIVANKPDIVVIDRLERRTMIVDITVPHDENLVKAEKEKQIKYLDLAREVVDMWDVNTAVIVPIVVTANGIIAKSLDQHLRRLSLGSWIKGLIQKAVLLDTARIVRRFLSQEP

SEQ ID NO: 11457 - protein, 1200 aa, Phlogophora meticulosa
MLTRSAARRARPPPLASSLSSASPPPESSPIVSTVTPAVAIASSSSDEYFSPPTSPPPARRRRGRRPPDSIGPRGPPASDRVPASGGSVQRMRWTQSINENVMRSYYGATEGGTNLTAYRGRMLSLFQMLEPAVNVSAQRLSDQVRVIQRNHMLDDVVLDRLRLNSRIYHVTPALPPVAVQLQSLPSVSPRPDYVGEEDDDAAISVSSQCNVRLRSALEDAFREYRSTPPELRSRLPRLPMHKKNKALMSALDSLLTKSFDNSKDLTDTHSILYCAAAAACRVANVKFPNTERATRPTVPAWQCRIQRRIDEARALIGKLICFREGNTRPRVMRFVRRAFSGTDISSRDYLTRVTERIDFLKQKICAWANRIRRYKRRVERYTQNRTFRSDERWVYRAWERSDQGVTDTCLPDDEAMCSFWRSIWSVPVSHTEGNWTREIERACEPLPEMGAINISPQDVASAVRPLPNWKSPGPDGLHNFWIKWLQSSHARLACQFQSTLESGSLPQFLTTGITHLLHKSGSTAEPRNYRPITCLPTVYKVLTSILRSKINNHIDSNLIMSFSQNGCRNGSRGTKELLLIDTAISQQVRRSRKDLSTCWVDYKKAYDSVPHTWLMRVLELYKVDATLRTFLMSCMGQWRTVLRYPGCQQTRENSEPIRIERGIFQGDSLSPLWFCLALNPLSTLLEGSGLGYRLRTGGQVISHLLYMDDLKLFAPNNLQLMELLKVTETFSSAIRMDFGVDKCAVMHVKGGEIVESVGTQLSDSIYLRSLSSTETYKYLGMSEALGINATDMKQSLKERFFGRLNKVLNSLLSGGNKVRAFNGWVMPVLMYSFGILKWTQTELDTLDRRVRTLLTANRMHHPRSSVMRLYIPRKCGGRGFLNAKTLHNREICSLREYFLKADVGMHRDVVAVDKTFTPLSLANKNWRKPIVLDTADRMEIWKSKELHGRFYRVLHGPDVDLVASISWLRFGDLFGETEGFVCAIMDEVIMTNNYRKYIVKDGTVDICRACHRPGESIRHIISGCSRLANGDYLHRHNLVARIIHQQLALKYNLVDLEVPYYKYVPDPVLENGSITLYWDRSIITDRTIVANKPDIVVIDRSERRTMIIDITVPHDENLVKAEKEKQMKYLDLAREVVDMWDVNTAVIVPIVVTANGIIAKSLDQHLKRLSLGSWIKGLIQKAVLLDTARIVRRFLSQEP

SEQ ID NO: 11458 - protein, 1199 aa, Laspeyria flexula
MLTRARKREALIPPPDSSLSVASQPPDPVPTTPLTAEAGSSSSSDEYFSPPSSPTPVPRRGRGRPPASLGPRGPPAVNRAPAAGGNVQRMRWSSSVNENVMRAYFAATEGGINLTAYRSRMLALFQDLEPTTKVTAQRLSDQVRAIQRCRMLDDTVLDRLRLECLQNNPTVPLQVNNLNNIISNAITIQADHNLEEVDGISSVDTQCNEEVRVALERALREYRFTSLQFRPRLPRLPMHKKNLALVITLDSLLSDYFDNSENLGDTHSILYCAAVAACRLAGVKFLGIEPPSHERPSTPAWQCRIERRIAGARILIGKLISFRAGNTRPRVMRFVNQAFSGTDVSPNEYLSRVTERIDFLKQKVYAWANRIRRFKKRVDRYTVNRLFQRDQRRVYRNWERPTQEVSDERLPNATATNEFWSSIWSEPVLHSEGEWIWDVERACERIPLMESVVISAEDIASAVRPMANWKSPGPDGLHNFWLRWLRSSHGRLASQFQSALESGSLPEFLTTGCTHLLHKSGSVTEPGNYRPITCLPSVYKLLTSVLRAKITKHIDDTRTMSISQNGCRRGSRGTKELLLVDMTISQQVRRSRKDLATCWIDYKKAFDSVPHSWLLRVLELYKVDITLRTFLESCMRQWRTVLTYPGCRLICGNGEPVRIKRGIFQGDSLSPLWFCLALNPLSTLLESSGLGYRLRRGGHVISHLLYMDDLKLIAPTDLQLKGLLKATEDFSKSIKMDFGVDKCAIMHVKRGEIVESDGIQLSDSINFRSLLVTDTYKYLGMSQALGIKETDMKQSLQERFFGRLKKVLNSLLSGGNKVRACNGWVMPLLMYSFGILKWTQTELDTLDRRVRTMLTAYRMHHPRSSVMRLYIPRKCGGRGFLNAKTLHNREVYNLREYFMGKVEGMHRDVVAVDSGLTPLSLAKDNWRRPIVLSTDDRRQVWQSKELHGRFYKALHGPDVDRVASVAWLRFGDLFGETEGFACAIADEVIKTNNYRKYILRDGTVDICRACHRPGESLRHIVSGCSRLANGEYLHRHNQVARIIHQQLALRYKLVDVEVPYYRYAPEPVLENSHTTLYWDRSIITDRTVIANKPDIVVLDRSKRLAVIVDITVPHDENLVKAEKDKQTKYLDLAHEIVDMWDVDSAIIVPIVVTVNGLVAKSLDQHLKRLGLGSWLKGLIQKAVLLGTARIVRRFLSLEP

SEQ ID NO: 11459 - protein, 919 aa, Xestia xanthographa
MFTQSCIVRLATRPKPAVPAWQYRIERRIGGARALIGKLVCFREGNTHPRVMRFVRQAFSGTDISPRDYMSRVTERIDFLKQKVYAWANRIRRYKRRVDRYTQNRTFQKDERWVYRAWERPDQSVADTHLPDDDAMCSFWRSIWSVPVSHAEGEWTRVIERACDPISEMGAITISPQDVARAVRPLPNWKSPGPDGLHNFWIKWFTRSHARMATLFQSALESGSLPEFLTTGITHLLHKSGSTAEPKNYRPITCLPTVYKVLTSILRTKISKHIDGNSVMSASQNGCRNGSRGTKELLLIDMAISHQVRRSRKDLSTCWIDYKKAYDSVPHTWLMRVLELYKVDATLRTFLMSCMGQWRTVLRYPGCQQIQRNSEPIRIERGIFQGDSLSPLWFCLALNPLSTLLEDSGLGYRLRKDGQVISHLLYMDDLKLFAPNDLRLMELLKVTETFSNAIRMEFGVDKCAVMHVKRGEIVESVGTQLSDSITLRSLSATETYKYLGMSEALGVNVADMKQLLKERFFGRLKKVLNSLLSGGNKVRAFNGWVMPVLMYSFGILKWTQTELDALDTKVRKLLTAYRMHHPRSSVMRLYIPRKCGGRGFLNAKTLHNREICSLREYFLGTDVGMHRDVVTMDKGLTPLSLAKENWRKPPVLDTNDRREVWQSKELHGRFFRALHGPDVDLSASVAWLRSGDLFGETEGFVCAIMDEVMMTNNYRRFIVKDGTVDICRACHRPGESIRHIISGCSRLANGEYLHRHNLVARIIHQQLALKYNLVESEVPYYRYVPDPVLDNGCITLYWDQSIITDRTIVANKPDIVVVDRSERRAMIVDITVPHDENLVKAEKDKQIKYLDLAREVVDMWEVDSAIIVPIVVSAHGLIAKSLDQYLRRLSLDSWIKGLIQKAVLLDTARIVRRFLSLEP

SEQ ID NO: 11460 - protein, 974 aa, Xestia xanthographa
MQPDLRPRIPRLPMHNKNRALVAVLDSQLSNYFDNCEDLTDVHSILYCAAVATCRVAHVKFPSDRATRPKPAVPAWQYRIERRIGGARALIGKLVCFREGNTRPRVMRFVRQAFSGTDISPRDYMSRVTERIDFLKQKVYAWANRIRRYKRRVDRYTQNRTFQKDERWVYRAWERPDQGVADTHLPDDDAMCSFWRSIWSVPVGHAEGEWTRVIERACDPISEMGAITISPQDVARAVRPLPNWKSPGPDGLHNFWIKWFTRSHARLATLFQSALESGSLPEFLTTGITHLLHKSGSTAEPKNYRPITCLPTVYKVLTSILRTKISKHIDDNSVMSASQNGCRNGSRGTKELLLIDMAISHQVRRSRKDLSTCWIDYKKAYDSVPHTWLMRVLQLYKVDATLRTFLMSCMGQWRTVLHYPGCRQIQRNSEPIRIERGIFQGDSLSPLWFCLALNPLSTLLEDSGLGYRLRKDGQVISHLLYMDDLKLFAPNDLRLMELLKVTETFSNAIRMEFGVDKCAVMHVKRGEIVESVGTQLSDSITLRSLSATETYKYLGMSEALGVNVADMKQSLKERFFGRLKKVLNSLLSGGNKVRAFNGWVMPVLMYSFGILKWTQTELDALDTKVRKLLTAYRMHHPRSSVMRLYIPRKCGGRGFLNAKTLHNREICSLREYFLGTDVGMHQDVVTMDKGLTPLSLAKENWRKPPVLDTNDRREVWQSKELHGRFFRALHGPDVDLSASVAWLRSGDLFGETEGFVCAIMDEVMMTNNYRRFIVKDGTVDICRACHRPGESIRHIISGCSRLANGEYLHRHNLVARIIHQQLALKYNLVESEVPYYRYVPDPVLDNGCITLYWDQSIITDRTIVANKPDIVVVDRSERRAVIVDITVPHDENLVKAEKDKQIKYLDLAREVVDMWEVDSAIIVPIVVSAHGLIAKSLDQYLRRLSLGSWIKGLIQKAVLLDTARIVRRFLSLEP

SEQ ID NO: 11461 - protein, 888 aa, Cosmia trapezina
MRFVRRAFSGMDISPRDYLTCVTERIDFLKQKICAWANRIRRYRRRVERYTQNRTFQSDERWVYRAWERPDQGVADTRLPDDDAMCSFWRSIWSVPVSHTEGDWTREVERACDHIPQMGALTISPQDVARAVRPLPNWKSPGPDGLHNFWIKWFQRSHARLASQFQSALQSGSLPQFLTTGITHLLHKSGSTAEPRNYRPITCLPTVYKVLTSIWRAKINKHIDTNSIMSASQNGCGNGSRGTKELLLIDMTISQQVRRSRKDLSTCWIDYKKAYDSVPHTWLMRVLELYKIDATLRTFLMSCMGQWRTVLRYPGCRNIQRNSEPIRIERGIFQGDSLSPLWFCLALNPLSTLLEDSGLGYRLRRGGQVISHLLYMDDLKLFAPNNLQLMELLKVTETFSSAIRMEFGVDKCAVMHVKRGEIVESVRTQLSDSIHLRSLSSLETYKYLGMSEALGINAADMKQSLRERFFGRLNKVLNSLLSGGNKVRAFNGWVMPVLMYSFGILKWTQTELDALDRRVRTLLTANRMHHPRSSVMRLYIPRKCGGRGFLNAKTLHNREVCSLREYFLEADVGMHREVVSVDKGLTPLSLANENWRKPIVLDTNDRREVWQSKELHGRFYRVLHGPDVDFLASVSWLRFGDLFGETEGFVFAIMDEVMMTNNYRKYIVKDGTVDICRACHRPGESIRHIISGCSRLANGDYLHRHNLVARIIHQQLALKYSLVESEVPYYRYVPDPVLENGNITLYWDRSIITDRTIVANKPDIVVIDRLERRTVIVDIAVPHDENLVKAEKDKQIKYLDLAREVVDMWDVDTAIIVPIVVTANGIIAKSLDQHLRRLSLGGWIKGLIQKAVLLDTARIVRRFLSQQPSPPVAWTLFPIPVGYYFLYF

SEQ ID NO: 11462 - protein, 962 aa, Cosmia trapezina
MHKKNKALVCALDSQLSNCFDDSKDLADTHSILYCAAVAACRVAHVKFPNSDRVPRPKPAVPAWQCRIERRIGEARALIGKLICFREGNTRPRVMRFVRRAFSGTDISPRDYFTCVTERIDFLKQKICAWANRIRRYRRRVERYTQNRTFQSDERWVYRAWERPDQGVADTQLPDDDAMCSFWRSIWSVPVSHTEGDWTREVERACDHIPQMGALTISPQDVARVVRPLPNWKSPGPDGLHNFWIKWFQRSHARLASQFQSALQSGSLPQFLTTGITHLLHKSGSTAEPRNYRPITCLPTVYKVLTSILRAKINKHIDNNSIMSASQNGCGNGSRGTKELLLIDMTINQQVRRSRKDLSTCWIDYKKAYDSVPHTWLMRVLELYKIDATLRTFLMSCMGQWRTVLRYPGCRNIQRNSEPIRIERGIFQGDSLSPLWFCLALNPLSTLLEDSGLGYRLRRGGQVISHLLYMDDLKLFAPNNLQLMELLKVTETFSSAIRMEFGVDKCAVMHVKLGEIVESVRTQLSDSIHLRSLSSLETYKYLGMSEALGINAADMKQSLRERFFGRLNKVLNSLLSGGNKVRAFNGWVMPVLMYSFGILKWTQTELDALDRRVRTLLTANRMHHPRSSVMRLYIPRKCGGRGFLNAKTLHNREVCSLREYFLEADVGMHRDVVSVDKGLTPLSLANENWRKPIVLDTNDRREVWQSKELHGRFYRVLHGPDVDFLASVSWLRFGDLFGETEGFVFAIMDEVMMTNNYRKYIVKDGTVDICRACHRPGESIRHIISGCSRLANGDYLHRHNLVARIIHQQLALKYSLVESEVPYYRYVPDPVLENGNITLYWDRSIITDRTIVANKPDIVVIDRLERRTVIVDIAVPHDENLVKAEKDKQIKYLDLAREVVDMWDVDTAIIVPIVVTANGIIAKSLDQHLRRLSLGGWIKGLIQKAVLLDTARIVRRFLSQQP

SEQ ID NO: 11463 - protein, 1205 aa, Cosmia trapezina
MLTRSRAQHLRNTHPTSSGSSLSSASQLPEPAPDVSQVIPAAAVASSSSDEYFSPPTTPPPVRRRGRGRPPASLGPRGPPASDRVPAPGGSVQRMRWTQTVNENVMRAYFGATEGGSNLTAYRGRMLSLFQVLEPAVNVSAQRLSDQVRVIQRNHMLDDVVLDRLRLESRNSRVTSDSPMVAVQLQNLPSASPRPDRVGEEDDSGAISVSSQCNVQLRSALEDAFREYRSTPPGLRPRLPRLPMHKKNKALVCALDSQLSNCFDGSKDLADTHSILYCAAVAACRVAHVKFHNNDRVTRPKPAVPTWQCRIERRIGEARALIGKLICFREGNTRPRVMRFVRRAFSGMDISPRDYLTCVTERIDFLKQKICAWANRIRRYRRRVERYTQNRTFQSDERWVYRAWERPDQGVADTQLPDDDAMCSFWRSIWSVPVSHTEGDWTREVERACDHIPQMGALTISPQDVARAVRPLPNWKSPGPDGLHNFWIKWFQRSHARLASQFQSALQSGSLPQFLTTGITHLLHKSGSTAEPRNYRPITCLPTVYKVLTSILRAKINKHIDTNSIMSASQNGCGNGSRGTKELLLIDMTISQQVRRSRKDLSTCWIDYKKAYDSVPHTWLMRVLELYKIDATLRTFLMSCMGQWRTVLRYPGCRNIQRNSEPIRIERGIFQGDSLSPLWFCLALNPLSTLLEDSGLGYRLRRGGQVISHLLYMDDLKLFAPNNLQLMELLKVTETFSSAIRMEFGVDKCAVMHVKRGEIVESVRTQLSDSIHLRSLSSLETYKYLGMSEALGINAADMKQSLRERFFGRLNKVLNSLLSGGNKVRAFNGWVMPVLMYSFGILKWTQTELDALDRRVRTLLTANRMHHPRSSVMRLYIPRKCGGRGFLNAKTLHNREVCSLREYFLEADVGMHREVVSVDKGLTPLSLANENWRKPIVLDTNDRREVWQSKELHGRFYRVLHGPDVDFLASVSWLRFGDLFGETEGFVFAIMDEVMMTNNYRKYIVKDGTVDICRACHHPGESIRHIISGCSRLANGDYLHRHNLVARIIHQQLALKYNLVESEVPYYRYVPDPVLENGNITLYWDRSIITDRTIVANKPDIVVIDRLERRTVIVDIAVPHDENLVKAEEDKQIKYLDLAREVVDMWDVDTAIIVPIVVTANGIIAKSLDQHLRRLSLGGWIKGLIQKAVLLDTARIVRRFLSQQP

SEQ ID NO: 11464 - protein, 1108 aa, Cosmia trapezina
MRWTRAINENVMRSYYGATEGGNNLTAYRVRMHSLFQVLEPALNVSAQRLSDQVRVIQRNHMLDDTVLDRLRSEMQSSRVIAPLSQTIVAPPPPQCNTSQADGRSDDTAANVSTQCNEELRSALEGAIQEYRFVSPELRPRLPRLPMHNKNRALVAALDSQLSNYFDNCEDLTDTHSILYCAAVAACRVAHVKFANDSRATRPKPAVPAWQCRIERRIGGARALIGKLICFREGNTRPRVMRFVRRAFSGTDVSPQDYMSRVTERIDFLRQKVYAWANRIRRYKRRVDRYTQNRTFQSDERWVYRGWERPDQGVTDTRLPDDDAMCSFWRSIWSVPVGHTEGDWAREVERACDPIPEMGAITICPQDVARAVRPLPNWKSPGPDGLHNFWIKWFPGSHARLAAQYQSALQSGSLPQFLTTGITHLLHKSGSTAEPKNYRPITCLPTVYKVLTSILRAKINEHIDTNSIMSVSQNGSRNGSRGTKELLLIDMAISQQVRRSRKDLSTCWIDYKKAYDSVPHTWLMRVLELYKVDATLRTFLMSCMGQWRTVLRYPGCRNIQRNSEPIRIERGIFQGDCLSPLWFCLALNPLSTLLEDSGLGYRLRRGGQVISHLLYMDDLKLFAPNNLQLMELLKVTETFSSAIRMEFGVDKCAVMHVKRGEIVESVGTQLSDSINLRTLSAAETYKYLGMSEALGINVADMKQSLKERFFGRLKKVFNSLLSGGNKVRAFNGWVMPVLMYSFGILKWTQTELDALDRRVRTLLTAYRMHHPRSSVMRLYIPRKCGGRGFLNAKTLHNREICSLREYFLEADVGMHRDVVAVDKGFTPLSLAKENWRKPVVLDTNDRMEVWQSKELHGRFFRALHGPDVDLLASVAWLRSGDLFGETEGFVCAIMDEVIMTNNYRRFIVKDGTVDICRACHRPGESIRHIISGCSRLANEEYLHRHNLVARIIHQQLALKYSLVESEVPYYRYVPDPVLENGNITLYWDRSIITDRTIVANKPDIVVVDRTERRAMVVDITVPHDGNLVKAEKDKQIKYLDLAREVVDMWDVDSAIIVPIVVSANGLIAKSLDQHLRRLSLGSWIKGLIQKAVLLDTARIVRRFLSLEP

SEQ ID NO: 11465 - protein, 1205 aa, Cosmia trapezina
MLTRSRAQQLRNTQPTSSGSSLSSASQLPEPAPDVSQVIPAAAVASSSSDEYFSPPTTPPPVRRRGRGRPPASLGPRGPSASDRVPAPGGSVQRMRWTQTVNENVMRAYFGATEGGSNLTAYRGRMLSLFRVLEPAVNVSAQRLSDQVRVIQRNHMLDDVVLDRLRLESRNSRVTSVSPMVAVQLQNLPSASPRPDCVGEEDDSGAISVSSQCNVQLRSALEDAFREYRSAPPVLRPRLPRLPMHKKNKALVGALDSQLSNCFDGSKDLADTHSILYCAAVAACRVAHVKFPNSDRVPRPKPAVPAWQCRIERRIGEARALIGKLICFREGNTRPRVMRFVRRAFSGTDISPRDYFTCVTERIDFLKQKICAWANRIRRYRRRVERYTQNRTFQSDERWVYRAWERPDQGVADTQLPDDDAMCSFWRSIWSVPVSHTEGDWTREVERACDHIPQMGALTISPQDVARAVRPLPNWKSPGPDGLHNFWIKWFQRSHARLASQFQSALQSGSLPQFLTTGITHLLHKSGSTAEPRNYRPITCLPTVYKVLTSILRAKINKHIETNSIMSASQNGCGNGSRGTKELLLIDMTINQQVRRSRKDLSTCWIDYKKAYDSVPHTWLMRVLELYKIDATLRTFLMSCMGQWRTVLRYPGCRNIQRNSEPIRIERGIFQGDSLSPLWFCLALNPLSTLLEDSGLGYRLRRGGQVISHLLYMDDLKLFAPNNLQLMELLKVTETFSSAIRMGFGVDKCAVMHVKRGEIVESVRTQLSDSIHLRSLSSLETYKYLGMSEALGINAADMKQSLRERFFGRLNKVLNSLLSGGNKVRAFNGWVMPVLMYSFGILKWTQTELDALDRRVRTLLTANRMHHPRSSVMRLYIPRKCGGRGFLNAKTLHNREVCSLREYFLEADVGMHRDVVSVDKGLTPLSLANENWRKPVVLDTNDRREVWQSKELHGRFYRALHGPDVDFLASVSWLRFGDLFGETEGFVFAIMDEVMMTNNYRKYIVKDGTVDICRACHRPGESIRHIISGCSRLANGDYLHRHNLVARIIHQQLALKYSLVESEVPYYRYVPDPVLENGNITLYWDRSIITDRTIVANKPDIVVIDRLERRTMIVDIAVPHDENLVKAEKDKQIKYLDLAREVVDMWDVDTAIIVPIVVTANGLIAKSLDQHLRRLSLGGWIKGLMQKAVLLDTARIVRRFLSQQP

SEQ ID NO: 11466 - protein, 961 aa, Mamestra brassicae
MHNKNRALVAALDSQLSNYFDDCEDLTDTHSIMYCAAVAACRVAHVKMTNDRVTRPKPAVPAWQCRIERRIGGARALIGKLICFREGNTRPRVKRFVRRAFSGTDISPRDYMSRVTERIDFLKQKVYAWANRIRRYRRRVERYTQNRTFRSNERWVYRVWEQPDQGVTDTRLPDDDAMCSFWRNIWSVPVSHTEGGWIREVERACDPLPEMGAITISPQDVARAVRPLPNWKSPGPDGLHNFWIKWLQRSHARLASQYQTALESGSLPEFLTTGVTHLLHKSGSTAEPKNYRPITCLPTVYKVLTSILRAKINNHINSNNIMSVSQNGCRNGSRGTKELLLIDMAISQQVRRSRKDLSTCWIDYKKAYDSVPHTWLMRVLELHKIDTMLRTFLMSCMGQWRTVLRYPGCRNIQRNSEPVRIERGIFQGDSLSPLWFCLALNPLSTLLENSGLGYRLKRGGQVISHLLYMDDLKLFAPSNLQLMELLKVTETFSSAIRMEFGVDKCAVMHVKRGEIMESVGTQLSDSINLRSLSSTETYKYLGMSEALGINVTDMKQSLRERFFGRLKKVFNSLLSGGNKVRAFNGWVMPVLMHSFGVLKWTQTELDALDRRVRTLLTAYRMHHPRSSVMRLYIPRKCGGRGFLNAKTLHNREICSLREYFLAVDVGMHRDVVTVDKGLTPLSLANENWRKPAVLDTNDRRAVWQSKELHGRFFRALHGPDVDQLASVAWLRFGDLFGETEGFVCAIMDEVIMTNNYRRFIVKDGTVDICRACHRPGESIRHIVSGCSRLANGEYLHRHNLVARIIHQQLALKYSLVESEVPYYRYAPDPVLDNGNITLYWDRSIITDRTIVANKPDIVVVDRIERRAMIVDITVPHDENLVKAEKDKQIKYIDLAREVVDMWDVDSAIIVPIVVSANGLIATSLDQHLRRLSLGSWIKGLIQKAVLLDTARIVRRFLSLEP

SEQ ID NO: 11467 - protein, 1140 aa, Mamestra brassicae
MLTRSRARAQTAQPTSSGSSLSSASQPPGPAPAVSPEIPVAAVASSSSDEYFSPPTTPPPARRRGRGRPPTSLGPRGPPASDRVPAIGGSVQRMRWTQTINENVMRSYYGATEGGTNLTAYRGRMLSLFQVLEPAVNVSAQRLSDQVRVILRNRMLDDAVLDRLRLESRSGRVSPASPPAAVEIQSSISPRPNNVGEDDDDVAISVSTQCNERLRSALEDAFREYRSTPPELRPRLPRLPMHNKNRALVCALDSQLTNCFDSSEDLADTHSILYCAAAAACRVAHVKFLNSDRATRPAVPAWQCRIERRIGEARALIGKLICFREGNTRRRVMRFVRRAFSGTDTSPRDYLTRVTERIDFLKQKIYAWANRIRRYKRRVERYTQNRTFQSNERWVYRAWERPDQGVTDTRLPDDDVMCSFWRNIWSVPVSHTEGDWIREVERACDPILEMGAITISPQDVARAVRPLPNWKSPGPDGLHNFWIKWFTGSHVRLASQFQSALESGSLPQFLTTGITHLLHKSGSTAEPKNYRPITCLPTVYKVLTSILRAKINHHIESNSIMSASQNGCRNGSRGTKELLLMDIAISQQVRRSRKDLSTCWIDYKKAYYSVPHTWLMRVLELYKVDAVLRTFLMSCMGQWRTVLRYPGCRQIQVNSDPIRIERGIFQGDSLSPLWFCLALNPLSTLLEGSGQGYRLRRGGQVISHLLYMDDLKLFAPNNLQLMELLKVTETFSSAISMEFGVDKCAVMHVKRGEIMESVGTQLSDSIHLRSLSSTETYKYLGMSEALGINANDMKQSLKERFFGRLNKVLNSLLSGGNKVRAFNGWVMPVLMYSFGILKWTQTELDALDRRVRSLLTANRMHHPRSSVMRLYIPRKCGGRGFLNAKTLHNREICSLREFFLEADVGMHRDVVAVDKGLTALSLANENWRKPVILDTNDRREVWQSKELHGRFYRVLHGPDVDFLASVAWLRFGDLFGETEGFVCAIMDEVMMTNNYRKYIVKDGTVDICRACHRPGESIRHIISGCPSLANGDYLHRHNLVARIIHQQLALKYNLVESEVPYYRYVPDPVLENGNCTLYWDRSIITDRTIVANKPDIVVIDRLERRAMIVDIAVPHDENLVKTEKDKQTKYLDLARESLCR

SEQ ID NO: 11468 - protein, 1104 aa, Mamestra brassicae
MRWTQSINENVMRSYFGATEGGTNLTAYRGRMLSLFQVLEPAVNVSAQRLSDQVRVIQRNRMLDDSVLDRLRMEMCGHVITPPSQTVAPPQSQISSHADEESNDRVTNVSTQRNEELRSALECAIREYRYVPPELRPRLPRLPMHNKNRALVAALDSQLSNYFDDCEDLTDTHSIMYCAAVAACRVAHVKMTNDRVTRPKPAVPAWQCRIERRIGGARALIGKLICFREGNTRPRVMRFVRRAFSGTDISPRDYMSRVTERIDFLKQKVYAWANRIRRYRRRVERYTQNRTFRSNERWVYRVWEQPDQGVTDTRLPDDDAMCSFWRNIWSVPVSHTEGGWIREVERACDPLPEMGAITISPQDVARAVRPLPNWKSPGPDGLHNFWIKWLQRSHARLASQYQTALESGSLPEFLTTGVTHLLHKSGSTAEPKNYRPITCLPTVYKVLTSILRAKINNHINSNNIMFVSQNGCRNGSRGTKELLLIDMAISQQVRRSRKDLSTCWIDYKKAYDSVPHTWLMRVLELYKIDTMLRTFLMSCMGQWRTVLRYPGCRNIQRNSEPVRIERGIFQGDSLSPLWFCLALNPLSTLLENSGLGYRLKRGGQVISHLLYMDDLKLFAPSNLQLMELLKVTETFSSAIRMEFGVDKCAVMHVKRGEIMESVGTQLSDSINLRSLSSTETYKYLGMSEALGINVTDMKQSLKERFFGRLKKVFNSLLSGGNKVRAFNGWVMPVLMHSFGVLKWTQTELDALDRRVRTLLTAYRMHHPRSSVMRLYIPRKCGGRGFLNAKTLHNREICSLREYFLAVDVGMHRDVVAVDKGLTPLSLANENWRKPAVLDTNDRRAVWQSKELHGRYFRALHGPDVDQLASVAWLRFGDLFGETEGFVCAIMDEVIMTNNYRRFIVKDGTVDICRACHRPGESIRHIVSGCSRLANGEYLHRHNLVARIIHQQLALKYSLVESKVPYYRYAPDPVLDNGNITLYWDRSIITDRTIVANKPDIVVVDRIERRAMIVDITVPHDENLVKAEKDKQIKYIDLAREVVDMWDVDSAIIVPIVVSANGLIATSLDQHLRRLSLGSWIKGLIQKAVLLDTARIVRRFLSLEP

SEQ ID NO: 11469 - protein, 1073 aa, Mamestra brassicae
MLSLFQVLEPAVNVSAQRLSDHVRVIQRNRMLDDSVLDRLRMEMCGHVITPPSQTVAPPQSQISSHADEESNDRVTNVSTQCNEELRSALECAFREYRYIPPELRPRLPRLPMHNKNRALVAALDSQLSNYFDDCEDLTDTHSIMYCAAVAACRVAHVKMTNDRVTRPKPAVPAWQCRIERRIGGARALIGKLICFREGNTRPRVMRFVRRAFSGTDISPRDYMSRVTERIDFLKQKVYAWANRIRRYRRRVERYTQNRTFRSNERWVYRVWEQPDQFVTDTRLPDDDAMYSFWRNIWSVPVSHTEGGWIREVERACDPLPEMGAITISPQDVARAVRPLPNWKSPGPDGLHNFWIKWLQRSHARLASQYQTALESGSLPEFLTTGVTHLLHKSGSTAEPKNYRPITCLPTVYKVLTSILRAKINNHINSNNIMSVSQNGCRNGSRGTKELLLIDMAISQQVRRSRKDLSTCWIDYKKAYDSVPHTWLMRVLELYKIDTMLRTFLMSCMGQWRTVLRYPGCRNIQRNSEPVRIERGIFQGDSLSPLWFCLALNPLSTLLENSGLGYRLKRGGQVISHLLYMDDLKLFAPSNLQLMELLKVTETFSSAIRMEFGVDKCAVMHVKRGEIMESVGTQLSDSINLRSLSSTETYKYLGMSEALGINVTDMKQSLWERFFGRLKKVFNSLLSGGNKVRAFNGWVMPVLMHSFGVLKWTQTELDALDRRVRTLLTAYRMHHPRSSVMRLYIPRKCGGRGFLNAKTLHNREICSLREYFLAVDVGMHRDVVTVDKGLTPLSLANENWRKPAVLDTNDRRAVWQSKELHGRFFRALHGPDVDQLASVAWLRFGDLFGETEGFVCAIMDEVIMTNNYRRFIVKDGTVDICRACHRPGESIRHIVSGCSRLANGEYLHRHNLVARIIHQQLALKYSLVESEVPYYRYAPDPVLDNGNITLYWDRSIITDRTIVANKPDIVVVDRIERRAMIVDITVPHDENLVKAEKDKQIKYIDLAREVVDMWDVDSAIIVPIVVSANGLIATSLDQHLRRLSLGSWIKGLIQKAVLLDTARIVRRFLSLEP

SEQ ID NO: 11470 - protein, 1198 aa, Noctua fimbriata
MLTRSAARRARLSPPDPSLSSASPPPESSPVVSAVTPAVAVASSSSDEYFSPPTTPPPVRRRGGRRPPDGLGPRGPPASDRVPAPGGSVQRMRWTQSINANVMRAYYGATEGGNNLTAYRVRMLSLFQVLEPAVNVSAQRLSDQVRVIQRNRMLDDTVLDRLRTEMQSSHVIATPPPQAVVPPQSTIIPNRDNDVSNDIVTNVSTQCNEEMRSALEGAIREYRFMQPDLRPRVPRLPMHNKNRALVAVLDSQLSNYFDNCEDLTDAHSILYCAAVAACRVAHVKFYVDRATRPKPVVPPWQYRIERRIGGARALIGKLICFREGNTRPRVMRFVRRAFSGTDISPRDYMSRITERIDFLKQKVYAWASRIRRYKRRVDRYTQNRTFQRDERWVYRAWERPDQGVADTRIPDDDAMCSFWRSIWSVPVSHTEGEWTREVERACDLVPEMGAITISPQDVVRAVRPLPNWKSPGPDGLHNFWIKWFTRSHARLAILFQSALESGSLPEFLTTGITHLLHKSGSTAEPKNYRPITCLPTVYKVLTSILRAKINKHIDDNSIMSASQNGCRNGSRGTKELLLIDMAISQQVRRSRSDLSTCWIDYKKAYDSVPHTWLMRVLELYKVDATLRTFLMSCMGQWRTVLRYPGCRQIQRNSEPIRIERGIFQGDSLSPLWFCLALNPLSTLLEDSGLGYRLRRGGQVISHLLYMDDLKLFAPNDLQLMELLKVTETFSSAIRMEFGVDKCAVMHVKRGEIVESVGTQLSDSINLRSLSATETYKYLGMSEALGINVADMKQSLKERFFGRLKKVFNSLLSGGNKVRAFNGWVMPVLMYSFGILKWTQTELDALDRRVRTLLTAYRMHHPRSSVMRLYIPRKCGGRGFLNAKTLHNREICSLREYFLETDVGMHRDVVAVDKGLTPLSLAKENWRKPLVLDTNDRMEVWQSKELHGRFFRALHGPDVDLSASVAWLRCGDLFGETEGFVCAIMDEVMMTNNYRRFIVKDGTVDICRACHRPGESIRHIISGCSRLANGEYLHRHNLVARIIHQQLALKYNLVESEVPYYKYVPDPVLENGSITLYWDQSIITDRTIVANKPDIVVVDRSERRTMIVDITVPHDENLVKAEKDKKIKYLDLAREVVDMWDVDSAIIVPIVVSAHGLIAKSLDQYLRRLSLGSWIKGLIQKAVLLDTARIVRRFLSLEP

SEQ ID NO: 11471 - protein, 1198 aa, Noctua fimbriata
MLTRSAAARRARLLPPDPSLSSASPPPESSPIVSAVTPAVAVASSSSDEYFSPPTTPPPVRRRGGRRPPDGLGPRGPPASDRVPAPGGSVQRMRWTQSINENVMRSYNGATEGGNNLTAYRVRMLSLFQVLEPAVNVSAQRLSDQVRVIQRNRMLDDTVLDRLRTEMQSSHVITPSAQAVVLPQSSTITNRDNDVSNDMVTNVSTQCNEEMRSALEGAIREYRFMQPDLRPRIPRLPMHNKNSALVAVLDSQLSNYFDNCEDLTDAHSILYCAAVAACRVAHVKFFNDRATRPKPVVPPWQYRIERRIGGARALIGKLICFREGNTRPRVMRFVRRAFSGTDISPRDYMSRITERIDFLKQKVYAWASRIRRYKRRVDRYTQNRTFQRDERWVYRTWERPDQGVADTRIPDDDAMCSFWRSIWSVPVSHTEGEWTREVEQACDLVPEMGAITISLQDVVRAVRPLPNWKSPGPDGLHNFWIKWFTRSHARLAILFQSALESGSLPEFLTTGITHLLHKSGSTAEPKNYRPITCLPTVYKVLTSILRAKINKHIDDNSIMSASQNGCRNGSRGTKELLLIDMAISQQVRRSRRDLSTCWIDYKKAYDSVPHTWLMRVLELYKVDATLRTFLMSCMGQWRTVLRYPGCRQIQRNSEPIRTERGIFQGDSLSPLWFCLALNPLSTLLEDSGLGYRLRRGGQVISHLLYMDDLKLFAPNDLQLMELLKVTETFSSAIRMEFGVDKCAVMHVKRGEIVESVGTQLSDSINLRSLSATETYKYLGMSEALGINVADMKQSLKERFFGRLKKVFNSLLSGGNKVRAFNGWVMPVLMYSFGILKWTQTELDALDRRVRTLLTACRMHHPRSSVMRLYIPRKCGGRGFLNAKTLHNREICSLREHFLETDVGMHRDVVAVDKGLTPLSLAKENWRKPVVFDTNYRMEVWQSKELHGRFFRALHGPDVDLSASVAWLRSGDLFGETEGFVCAIMDEVMMTNNYRRFIVKDGTVDICRACHRPGESIRHIISGCSRLANGEYLHRHNLVARIIHQQLALKYNLVELEVPYYKYVPDPVLENGSITLYWDQSSITDRTIVANKPDIVVVDRSERRTMIVDITVPHDENLVKAEKDKKIKYLDLAREVVDMWDVDSAIIVPIVVSAHGLIAKSLDQYLRRLSLGSWIKGLIQKAVLLDTARIVRRFLSLEP

SEQ ID NO: 11472 - protein, 1198 aa, Noctua fimbriata
MLTRSAAARRARLLPPDPSLSSASPPPESSPIVSAVTPAVAVASSSSDEYFSPPTTPPPVRRRGGRRPPDGLGPRGPPASDRVPAPGGSVQRMRWTQSINENVMRSYYGATEGGNNLTAYRVRMLSLFQVLEPAVNVSAQRLSDQVRVIQRNRMLDDTVLDRLRTEMQSSHVITPSAQAVVLPQSSTITNRDNDVSNDMVTNVSTQCNEEMRSALEGAIREYRFMQPDLRPRIPRLPMHNKNRALVAVLDSQLSNYFDNCEDLTDAHSVLYCAAVAACRVAHVKFFDDRATRPKPVVPPWQYRIERRIDGARALIGKLICFREGNTRPRVMRFVRRAFSGTDISPRDYMSRITERIDFLKQKVYAWASRIRRYKRRVDRYTQNRTFQRDERWVYRAWERPDQGVADTRIPDDDAMCSFWRSIWSVPVSHTEGEWTREVERACDLVPEMGAITISPQDVVRAVRPLPNWKSPGPDGLHNFWIKWFTRSHARLAILFQSALESGSLPEFLTTGITHLLYKSGSTAEPKNYRPITCLPTVYKVLTSILRAKINKHIDDNSIMSASQNGCRNGSRGTKELLLIDMAISQQVRRSRRDLSTCWIDYKKAYDSVPHTWLMRVLELYKVDATLRTFLMSCMGQWRTVLRYPGCRQIQRNSEPIRIERGIFQGDSLSPLWFCLALNPLSTLLEDSGLGYQLRRGGQVISHLLYMDDLKLFAPNDLQLMELLKVTETFSSAIRMEFGVDKCAVMHVKRGEIVESVGTQLSDSVNLRSLSATETYKYLGMSEALGINVADMKQSLKERFFGRLKKVFISLLSGGNKVRAFNGWVMPVLMYSFGILKWTQTELDALDRRVRTLLTAYRMHHPRSSVMRLYIPRKCGGRGFLNAKTLHNHEICSLREYFLETDVGMHRDVVAVDKGLTPLSLAKENWRKPLVLDTNDRMEVWQSKELHGRFFRALHGPDVDLSASVAWLRSGDLFGETEGFVCAIMDEVMMTNNYRRFIVKDGTVDICRACHRPGESIRHIISGCSRLANGEYLHRHNLVARIIHQQLALKYNLVESEVPYYKYVPDPVLENGSITLYWDQSIITDRTIVANKPDIVVVDRSERRTMIVDITVPHDENLVKAEKDKKIKYLDLAREVVDMWDVDSAIIVPIVVSAHGLIAKSLDQYLRRLSLGSWIKGLIQKAVLLDTARIVRRFLSLEP

SEQ ID NO: 11473 - protein, 1198 aa, Noctua fimbriata
MLTRSAARRARLSPPDPSLSSASPPPESSPVVSAVTPAVAVASSSSDEYFSPPTTPPPVRRRGGRRPPDGLGPRGPPASDRVPAPGGSVQRMRWTQSINANVMRAYYGATEGGNNLTAYRVRMLSLFQVLEPAVNVSAQRLSDQVRVIQRNRMLDDTVLDRLRTEMQSSHVIATPPPQAVVPPQSTIIPNRDNDVSNDIVTNVSTQCNEEMRSALEGAIREYRFMQPDLRPRIPRLPMHNKNRALVAVLDSQLSNYFDNCEDLTDAHSILYCAAVAACRVAHVKFSDDRATRPKPAVPPWQYRIERRIGGARALIGKLICFREGNTRPRVMRFVRRAFSGTDISPRDYMSRITERIDFLKQKMYAWANRIRRYKRRVDRYTQNRTFQRDERWVYRAWERPDQGVADTRLPDDDAMCSFWRSIWSVPVSHTEGEWTQGVERACDLVPEMGAITISPQDVVRAVRPLPNWKSPGPDGLHNFWIKWFTRSHARLAILFQSALESGSLPEFLTTGITHLLHKSGSTAEPKNYRPITCLPTVYKVLTSILRAKINKHIDDNSIMSASQNGCRNGSRGTKELLLIDMAISQQVRRSRSDLSTCWIDYKKAYDSVPHTWLMRVLELYKVDATLRTFLMSCMGQWRTVLRYPGCRQIQRNSEPIRIERGIFQGDSLSPLWFCLALNPLSTLLEDSGLGYRLRRGGQVISHLLYMDDLKLFAPNDLQLMELLKVTETFSSAIRMEFGVDKCAVMHVKRGEIVESVGTQLSDSINLRSLSATETYKYLGMSEALGINVADMKQSLKERFFGRLKKVFNSLLSGGNKVRAFNGWVMPVLMYSFGILKWTQTELDALDRRVRTLLTAYRMHHPRSSVMRLYIPRKCGGRGFLNAKTLHNREICSLREYFLETDVGMHRDVVAVDKGLTPLSLAKENWRKPVVFDTNYRMEVWQSKELHGRFFRALHGPDVDLSASVAWLRSGDLFGETEGFVCAIMDEVMMTNNYRRFIVKDGTVDICRACHRPGESIRHIISGCSRLANGEYLHRHNLVARIIHQQLALKYNLVELEVPYYKYVPDPVLENGSITLYWDQSIITDRTIVANKPDIVVVDRSERRTMIIDITVPHDENLVKAEKDKKIKYLDLAREVVDMWDVDSAIIVPIVVSAHGLIAKSLDQYLRRLSLGSWIKGLIQKAVLLDTARIVRRFLSLEP

SEQ ID NO: 11474 - protein, 988 aa, Noctua fimbriata
MRSALEGAIREYRFMQPDLRPRIPRLPMHNKNRALVAVLDSQLSNYFDNCEDLTDAHSILYCAAVAACRVAHVKFSDDRATRPKPAVPPWQYRIERRIGGARALIGKLICFREGNTRPRVMRFVRRAFSGTDISPRDYMSRITERIDFLKQKVYAWANRIRRYKRRVDRYTQNRTFQRDERWVYRAWERPDQGVADTRLPDDDAMCSFWRSIWSVPVSHTEGEWTRGVERACDLVPEMGAITISPQDVVRAVRPLPNWKSPGPDGLHNFWIKWFTRSHARLAILFQSALESGSLPEFLTTGITHLLHKSGSTAEPKNYRPITCLPTVYKVLTSILRAKINKHIDDNSIMSASQNGCRNGSRGTKELLLIDMAISQQVRRSRSDLSTCWIDYKKAYDSVPHTWLMRVLELYKVDATLRTFLMPCMGQWRTVLRYPGCRQIQRNSEPIRIERGISQGDSLSPLWFCLALNPLSTLLEDSGLGYRLRRGGQVISHLLYMDDLKLFAPNDLQLMELLKVTETFSSAIRMEFGVDKCAVMHVKRGEIVESVGTQLSDSINLRSLSATETYKYLGMSEALGINVADMKQSLKERFFGRLKKVFNSLLSGGNKVRAFNGWVMPVLMYSFGILKWTQTELDALDRRVRTLLTAYRMHHPRSSVMRLYIPRKCGGRGFLNAKTLHNREICSLREYFLETDVGMHRDVVAVDKGLTPLSLAKENWRKPLVPDTNDRMEVWQSKELHGRFFRALHGPDVDLSASVAWLRCGDLFGETEGFVCAIMDEVMMTNNYRRFIVKDGTVDICRACHRPGESIRHIISGCSRLANGEYLHRHNLVARIIHQQLALKYNLVESEVPYYKYVPDPVLENGSITLYWDQSIITDRTIVANKPDIVVVDRSERRTMIVDITVPHDENLVKAEKDKKIKYLDLAREVVDMWDVDSAIIVPIVVSAHGLIAKSLDQYLRRLSLGSWIKGLIQKAVLLDTARIVRRFLSLEP

SEQ ID NO: 11475 - protein, 1037 aa, Atethmia centrago
MSTSNRSHTFVPLAPSQTVVVSTQLRTNQADEGSDDRATNVSTQYNVELRSALEDAIREYRFMSPELRPRLPRLPMHKKNRALVATLDSQLSNYFDDCEDLTDTHSILYCAAVAVCRVAHVKFAKDSRATRPKPTVPAWQRRIERRIGGARALIGKLICFREGNTRPRVMRFVRRAFSGTDIGPQDYMSRVTERIDFLKQKVYAWANRIRRYKRRVERYTQNRTFQSDERWVYRGWERPDQGVTGTHLPDDDVMCSFWRSIWSVPVSHTEGDWVREVERACDPIPEMGAITISPQDVARAVRPLPNWKSPGPDGLHNFWLKWFLRSHARLAAQYQTALESGSLPQFLTRGVTHLLHKSGSTAEPKNYRPITCLPTIYKVLTSILRAKINEHIDTNSIMSASQNGCRNGSRGTKELLLIDITITQQVRHSRKDLSTCWIDYKKAYDSVPHTWLMRVLELYKVDATLRTFLMSCMGQWRTVLRYPGCRNIQRNSEPIRIERGIFQGDSLSPLWFCLALNPLITLLEDSGLGYRLRRGSQVISHLLYMDDLKLFASNNLQLMELLKITETFSSAIRMEFGVDKCAVMHVKRGKIMESVGTQLSDSINLRALSASETYKYLGMSEALGINVTDMKQSLKERFFGRLKKVFNSLLSGGNKVRAFNGWVMPVLMYSFGILKWTQTELDALDRRVRTLLTAYRMHHPRSSVMRLYIPRKCGGRGFLNAKTLHNREVCSLREYFLKADVGMHRDVVAVDKGLTPLSLAKENWRKPVVLDTNNRREVWQSKELHGRFFRALHEPDVDFQASVAWLRFGDLFGETEGFVCAIMDEVIMTKNYRRFIVKDGTVDVCRACQRPGESIRHIISGCSRLPNEEYLHRHNLVARIIHQQLALKYNLVESEVPYYRYVPDPVLENGNITLYWDRSIITDRTIIANKPDIVVVDRTERRAMIVDITVPHDGNLVKAEKDKQIKYLDLAREVVDMWDVNSAIIVPIVISANGLIAKSLDQHLRRLSLDGWIKGLIQRAVLLDTARIVRRFLSLEP

SEQ ID NO: 11476 - protein, 1207 aa, Atethmia centrago
MLTRSRARRLRQDTHPTSSVSSLSSTSQLPEPAPDVSPVIPAAAVASSSSDEYFSPPTTPPPVRPRGRGRPPASLGLRGPPASDRVPAPGGSLQRMRWTEALNENVMRAYFGATEGGSNLTAYRGRMLSLFQVLEPAVNVSAQRLSDQVRVIQRKHMLDDVVLDRLRIESRNSHVSPASPLVAVQMQNLPGGSPRPDHADEEDDDEAISVSSQCNVRLRSALDDAFREYRSTPPGLRPRLPRLPMHKKNKALVCALDSQLSNYFDSSKDLTDTHSILYCAAVAACRVAQVKFPNSDRAPRPKPAVPAWQSRIERRIGETRALIGKLICFREGNTRPRVMRFVKRAFAGTDILSSRDYLTRVTERIDFLKQKICAWANRIRRYRRRMERYTQNRTFQNDERWVYRTWERPDQGVADTRLPDDDAICSFWQNIWSVPVNHTEGDWTKRIERACDLIPKMGALTILPQDVAHAVRPLPNWKSPGPDGLHNFWIKWFQRSHARLASQFQSALESGSLPLFLTTGITHLLHKSGSTAEPKNYRPITCLLTVYKVLTSILRAKINKNIETNLIMSASQNGCKNGSRGTKELLLIDIAISQQVRRSRKDLSTCWIDYKKAYDSVPHTWLMRVLELYKVDATLRTFLMSCMGQWRTVLCYPGCRYIQRNSEPIRIKRGIFQGDSLSPLWFCLALNPLSTLLENSGLGYRLRRGGQVISHLLYMDDLKLFAPNNLQLMELLKVTKTFSSAIRMEFGVDKCAVMHVKRGGIVESVGTQLSDYIHLRSLSSTETYKYLGMSEALGINAADMKQSLRERFFGRLNKVLNSLLSGGNKVRAFNGWVMPVLMYSFGILKWTQTELDALDSRVRTLLTANRMHHPRSSVMRLYIPRKCGGRGFLNAKTLHNREICSLRQYFLETDVVMHRDVVSVDKGLTPLSLADENWRKPIILDTNDRREVWQSKELHGRFYRVLHGLDVDLLASVSWLRFGDLFGETEGFVFAIMDEVIMTNNYRKYIVKDGTVDICRACHRPGESIRHIISGCSRLANGDYLHRHNLVAKIIHQQLALKYSLVESEVPYYRYAPDPVLENGNITLYWDRSIITDRTIVANKPDIVVIDRLTRRTMIIDIAVPHDENLVKAEKDKQIKYLDLAHEVVDMWDVDTAIIVPIVVTANGIIPKSLDQHLKRLSLGSWIKGLIQRAVLLDTARIVRRFLSQEP

SEQ ID NO: 11477 - protein, 868 aa, Atethmia centrago
MRFVRRAFSGTDIGPQDYMTRVTERIDFLKQKVYAWANRIRRYKRRVERYTQNRTFQSDERWVYRGWERPDQDVTDTRLPDDDVMCSFWRSIWSVPVSHTEGDWARKVERACDPIPEMGAITICPQDVARAVRPLPNWKSPGPDGLHNFWLKWFLRSHARLAAQYQTALESGSLPQFLTTGVTHLLHKSGSTAEPKNYRPITCLPTVYKLLTSILRAKINKHIDTNSIMSASQNGCRNGSRGTKELLLIDMTISQQVRRSRKDLSTCWIDYKKAYDSVPHTWLMRVLELYKVDATLRTFLISCMGQWRTVLRYPGCRNIQRNSEPIRIERGIFQGDSLSPLWFCLALNPLSTLLEDSGLGYRMRRGSQVISHLLYMDDLKLFASNNLQLMELLKITESFSSAIRMEFGVDKCAVMHVKRGKIVESVGTQLSDSINLRTLSASETYKYLGMSEALGINVTDMKQSLKERFFGRLKKVFNSLLSGGNKVRAFNGWVMPVLMYSFGILKWTQTELDALDRRVRTLLTAYRMHHPRSSVMRLYIPRKCGGRGFLNAKILHNREVCSLREYFLEADVGMHRDVVAVDKGLTPLSLAKENWRKLVVLDTNDRREVWQSKELHGRFFRALHEPDVDFQASVAWLRFGDLFGETEGFVCAIMDEVIMTKNYRRFIVKDGTVDVCRACHRPGESIRHIISGCSRLANEEYLHRHNLVARIIHQQLALKYSLVESEVPYYRYVPDPVLDNGNITLYWDRSIITDRTIVANKPDIVVVDRTERRAMIVDITVPHDGNLVKAEKDKQIKYLDLAREVVDMWDVDSAIIVPIVVSANGLIAKSLDQHLKRLTLDGWIKGLIQKAVLLDTARIVRRFLSQEP

SEQ ID NO: 11478 - protein, 962 aa, Atethmia centrago
MHKKNRALVAALDSQLSNYFDDCEDLTDTHSILYCAAVAVCRVAHVKFAKDSRTTRPKPTVPAWQCRIESRIGGARALIGKLICFREGNTRPRVMRFVRRAFSGTDIGPHDYMTRVTERIDFLKQKVYAWANRIRRYKRRVERYTQNRTFQSDERWVYRGWERPDQDVTDTRLPDDDVMCSFWRSIWSVPVSHTEGDWARKVERACDPIPEMGAITICPQDVARAVRPLPNWKSPGPDGLHNFWLKWFLRSHARLAAQYQTALESGSLPQFLTTGVTHLLHKSGSTAEPKNYRPITCLPTVYKLLTSILRAKINKHIDTNSIMSASQNGCRNGSRGTKELLLIDMTISQQVRRSRKDLSTCWIDYKKAYDSVPHTWLMRVLELYKVDATLRTFLISCMGQWRTVLRYPGCRNIQRNSEPIRIERGIFQGDSLSPLWFCLALNPLSTLLEDSGLGYRMRRGGQVISHLLYMDDLKLFASNNLQLMELLKITESFSSAIRMEFGVDKCAVMHVKRGKIVESVGTQLSDSINLRTLSASETYKYLGMSEALGINVTDMKQSLKERFFGRLKKVFNSLLSGGNKVRAFNGWVMPVLMYSFGILKWTQTELDALDRRVRTLLTAYRMHHPRSSVMRLYIPRKCGGRGFLNAKILHNREVCSLREYFLEADVGMHRDVVAVDKGLTPLSLAKENWRKLVVLDTNDRREVWQSKELHGRFFRALHEPDVDFQASVAWLRFGDLFGETEGFVCAIMDEVIMTKNYRRFIVKDGTVDVCRACHRPGESIRHIISGCSRLANEEYLHRHNLVARIIHQQLALKYSLVESEVPYYRYVPDPVLDNGNITLYWDRSIITDRTIVANKPDIVVVDRTERRAMIVDITVPHDGNLVKAEKDKQIKYLDLAREVVDMWDVDSAIIVPIVVSANGLIAKSLDQHLKRLTLDGWIKGLIQKAVLLDTARIVRRFLSLEP

SEQ ID NO: 11479 - protein, 1198 aa, Mesoligia furuncula
MLTRLAARRARLLPPDSSLSSASPPPVPSPTVSAVMTPAAAVASSSSDEYFSPPTTPPPARRRRGRRPPDGLGLRGPPVSDRVPAPGGSVQRMRWTQSINENVMRSYYGATEGGNILTAYRVRMLSLFQVLEPAVNVSAQRLSDQVRVIQRNHMLDDTVLDRLRSEMQSSHVIAPQSQTAVILPQPNISHADEGGNDTAINVSTQCNEELRSALEDAIQEYRFMSPELRPRLPRLPMHNKNRALVAALDSQLSKYFDTCDDLIDTHSILYCAAVAACRVAHVKFANDSRATRPKQAVPAWQCRIERRIGGARTLIGKLICFREGNTRPRVMRFVRRAFSGTDISPQDYMSCVTERIDFLKQKVYAWANRIRRYRRRVERYTQNRTFQSDERWVYRGWERPDQGVAETCLPDDDAMCSFWRNIWSVPVSHTEGDWAREVERACDPIPEMGAITICPQDVARAVRPLPNWKSPGPDGLHNFWIKWFPRSHALLASQFQTALKSGSLPQFLTTGITHLLHKSGSTAEPKNYRPITCLPTVYKVLTSILRTKINKHIDTNSIMSASQNGCRNGSRGTKELLLIDMAISQQVRRFRKDLSTCWIDYKKAYDSVPHTWLMRVLELYKIDTTLRTFLMSCMGQWRTVLRYPGCRNIQRNSEPIRIERGIFQGDSLSPLWFCLALNPLSTLLEDSGLGYRLRRGGQVISHLLYMDDLKLFAPNNLQLMELLKITETFSSAIRMEFGVDKCAVMHVKRGEIVESVGTQLSDSTNLRALSASETYKYLGMSEALGINVTDMKQSVKERFFGRLKKVLNSLLSGGNKVRAFNGWVMPVLMYSFGILKWTQTELDALDRRVRTLLTANRMHHPRSSVMRLYIPRKCGGRGFLNAKTLHNREICSLREYFLETDVGMHRDVVIVDKGLTPLSLAKENWRKPVVLDTNDRMEVWQSKELHGRFLRALRGPDVDLQASVAWLRFGNLFGETEGFVCAIMDEVMMTNNYRRFIVKDGTVDICRACHRPGESIRHIISGCSRLANGEYLHRHNLVARIIHQQLALKYNLVESEVPYYRYVPDPVLENGNITLYWDRSIITDRTIVANKPDIVVVDRSERRAMIVDITVPHDENLVKAEKDKQIKYLDLAREVVDMWDVDTAIIVPIVVTANGLIAKSLDQHLRRLSLGSWIKGLIQRAVLLDTARIVRRFLSLEP

SEQ ID NO: 11480 - protein, 1198 aa, Mesoligia furuncula
MLTRSAARRARLPPPDSSLSSASLPPVPSLTVSTVTTPAAAVASSSSDEYFSPPTTPPPARRRGGRRPPDGLGPRGPPASDRVPAPGGSVQRMRWTQSINENVMRSYYGASEGGNNLTAYRVRMLSLFQVLEPAVNVSAQRLSDQVRVIQRNHMLDDTVLDRLRNETQSSHVIAPQSQTAVVLPQSNTSHADEGSNDRATNVSTQCNEELRSTLEDAIQEYRFMSPELRPRLPRLPMHNKNRALVAVLDSQLSNYFDGCKDLTDTHSILYCAAVAACRVAHVKLANDSRATRPKPAVPAWQCRIERRIGEARALIGKLTCFREGNTRPRVMRFVRRAFLGTDISPQDYMSCVTERIDFLKQKVYAWANRIRRYKRRVERYTQNRTFQSDERWVYRDWERPDQSVTDTCLPDDDAMCSFWRSIWSVPVSHTESDWTREVERACDPIPEMGAITICPQDVARAVRPLPNWKSPGPDGLHNFWIKWFTRSHACLASQFQTALESGSLPQFLTTGITHLLHKSGSTAEPKNYRPITCLPTVYKVLTSILRVKIDKHINTNSIMSASQNGCRNGSRGTKELLLIDMTISQQVRRFRKDLSTCWIDYKKAYDSVPHTWLMRVLELYKIDTTLRTFLMSCMGQWRTVLRYPGCRNIQRNSEPIRIERGIFQGDSLSPLWFCLALNPLSTLLEDSGLGYRLRRGGQVISHLLYMDDLKLFAPNNLQLMELLKITETFSSAIRMEFGVNKCAVMHVKRGEIVESVGTQLSDSTNLRALSASETYKYLGMSEALGINVTDMKQSLKERFFGRLKKVFNSLLSGGNKVRAFNGWVMPVLMYSFGILKWTQTELDALDRKVRTLLTANRMHHPRSSVMRLYIPRKCGGRGFLNAKTLHNREICSLREYFLEIDVGMHRDVVAVDKGLTPLSLGKENWRKPVVLDTNDRMEVWQSKELNGRFFRALHGPDVDLLASVAWLRFGDLFGETEGFVCAIMDEVMMTNNYRRFIVKDGTVDICRACHRPGESIRHIISRCSRLANGEYLHRHNLVARIIHQQLALKYSLVESEVPYYRYVPDPVLENGNITLYWDRSIITDRTIVANKPDIVVVDRSERRAMIVDITVPHDENLVKAEKDKQIKYLDLAHEVVDMWDVESAIIVPIVVTANGLIAKSLDQHLKRLSLGSWIKGLIQKAVLLDTARIVRRFLSLEP

SEQ ID NO: 11481 - protein, 1206 aa, Mesoligia furuncula
MLTRSRARHLLKNTHPTSSGSSLSSASQLPDPAPDVSSVRPAAAVASSSSDEYFSPPTTPPPVCRRGRGRPPASLGLRGPPASDRVPAPGGSVQRMRWTQTVNENVMRAYFGATEGGSNLTAYRGRMLSLFQVLEPAVNVSAQRLSDQVRVIQRNHMLDNVVLDRLRLESRNSHVTPASSLIAVQLQNVPSVSPRPDHVYVEDDDEAITVSSQCNARLRSALEDAFREYRSIPPGLRPRLPRLPMHKKNKALVCALDLQLSNCFNNSKDLTDTHSILYCAAVAACRVAHVKFPNSDRAPRPKPAVPAWQCRIECRIGEARALIGKLICFREGNTRPRVMRFVRRAFSGTDISSRDYLSRVTERIDFLKQKIYAWANRIRRYRRRVERYTQNRTFQNDERWVYRAWERPDQGVTDTPLPDDDAMCSFWRNIWSVPVIHTEGDWTAKIERACDLIPEMGVLTISPQDVARAVRPLPNWKSPGPDGLHNFWIKWFQGSHARLASQFQSALESGSLPQFLTTGITHLLHKSGSTADPKNYRPITCLPTVYKVLTSILRAKINKHIDTNSIMSVSQNGCRNGSRGTKELLLIDMTISQQVRRFRKDLSTCWIDYKKAYDSVPHTWLMRVLELYKVDTTLRTFLMSCMGQWRTVLRYPGCRNIQRNSEPIRIERGIFQGDSLSPLWFCLALNPLSTLLEDSGLGYRLRRGGQVISHLLYMDDLKLFAPNNLRLMELLRITETFSSAIRMEFGVDKCAVMHVKRGEIVESVGTQLSDSTNLRALSASETYKYLGMSEALGINVTDMKQSLKERFFGRLKKVFNSLLSGGNKVRAFNSWVMPVLMYSFGILKWTQTELDALDRKVRTLLTANRMHHPRSSVMRLYIPRKCGGRGFLNAKTLHNREICSLREYFLETDVGMHRDVVAVDKGLTPLSLGKENWRKPVVLDTNDRMEVWQSKELHGRFFRALHGPDVDLLASVAWLRFGDLFGETEGFVYAIMDEVMMTNNYRRFIVKDGTVDICRACHRPGESIRHIISGCSRLANGEYLHRHNLVARIIHQQLALKYSLVESEVPYYRYVPDPVLENGNITLYWDRSIITDRTIVANKPDIVVVDRSERRAMIVDITVPHDENLVKAEKDKQVKYLDLAREVVDMWDVDSAIIVPIVVTANGLIAKSLDKHLKRLSLGSWIKGLIQKAVLLDTARIVRRFLSLEP

SEQ ID NO: 11482 - protein, 1198 aa, Mesoligia furuncula
MLTRLAARRARLLPPDSSLSSASPPPVPSPTVSAVMTPAAAVASSSSDEYFSPPTTPPPARRRRGRRPPDGLGLRGPPASDRVPAPGGSVQRMRWTQSINENVMRSYYGATEGGNILTAYRVRMLSLFQVLEPAVNVSAQRLSDQVRVIQRNHMLDDTVLDRLRSEMQSSHVIAPQSQTAVILPQPNISHADEGSNDTAINVSTQCNEELRSALEDAIQEYRFMSPELRPRLPRLPMHNKNRALVAALDSQLSKYFDTLEDLIDTHSILYCAAVAACRVAHVKFANDSRATRPKQAVPAWQCRIERRIGGARTLIGKLICFREGNTRPRVMRFVRRAFSGTDISPQDYMSCVTERIDFLKQKVYAWANRIRRYRRRVERYTQNRTFQSDERWVYRGWERPDQGVAETCLPDDDAMCSFWRNIWSVPVSHTEGDWAREVERACDPIPEMGAITICPQDVARVVRPLPNWKSPGPDGLHNFWIKWFPRSHALLASQFQTALKSGSLPQFLTTGITHLLHKSGSTAEPKNYRPITCLPTVYKVLTSILRTKINKHIDTNSIMSASQNGCRNGSRGTKELLLIDMAISQQVRRFRKDLSTCWIDYKKAYDSVPHTWLMRVLELYKVDTTLRTFLMSCMGQWRTVLRYPGCRNIQRNSEPIRIERGIFQGDSLSPLWFCLALNPLSTLLEDSGLGYRLRRGGQVISHLLYMDDLKLFAPNNLQLMELLKITESFSSAIRMEFGVDKCAVMHVKRGEIVESVGTQLSDSTNLRALSASETYKYLGMSEALGINVTDMKQSVKERFFGRLKKVLNSLLSGGNKVRAFNGWVMPVLMYSFGILKWTQTELDALDRRVRTLLTTNRMHHPRSSVMRLYIPRKCGGRGFLNAKTLHNREICSLREYFLETDVGMHRDVVIVDKGLTPLSLAKENWRKPVVLDTNDRMEVWQSKELHGRFLRALRGPDVDLQASVAWLRSGNLFGETEGFVCAIMDEVMMTNNYRRFIVKDGTVDICRACHRPGESIRHIISGCSRLANGEYLHRHNLVARIIHQQLALKYNLVESEVPYYRYVPDPVLENGNITLYWDRSIITDRTIVANKPDIVVVDRSERRAMIVDITVPHDENLVKAEKDKQIKYLDLAREVVDMWDVDTAIIVPIVVTANGLIAKSLDQHLRRLSLGSWIKGLIQRAVLLDTARIVRRFLSLEP

SEQ ID NO: 11483 - protein, 1198 aa, Mesoligia furuncula
MLTRLAAKRARLLPPDSSLSSASPPPVPSPTVSAVMTPAAAVASSSSDEYFSPPTTPPPARRRRGRRPPDCLGLRGPPASDRVPAPGGSVQRMRWTQSINENVMRSYYGATEGGNILTAYRVRMLSLFQVLEPAVNVSAQRLSDQVRVIQRNHMLDDTVLDRLRSEMQSSHVIAPQSQTAVILPQPNISHADEGSNDRAIHVSTQCNEELRSALEDAIQEYRFMSPELRPRLPRLPMHNKNRALVAALDSQLSKYFDTCEDLIDTHSILYCAAVAACRVAHVKFANDSRATRPKQAVPAWQCRIERRIGGARTLIGKLICFREGNTRPRVMRFVRRAFSGTDISPQDYMSCVTERIDFLKQKVYAWANRIRRYRRRVERYTQNRTFQSDERWVYRGWERPDQGVAETCLPDDDAMCSFWRNIWSVPVSHTEGDWAREVERACDLIPEMGAITICPQDVARAVRPLPNWKSPGPDGLHNFWIKWFPGSHARLASQFQTALKSGSLPQFLTTGITHLLHKSGSTAEPKNYRPITCLPTVYKVLTSILRTKINKHIDTNSIMSASQNGCRNGSRGTKELLLIDMAISQQVRRFRKDLSTCWIDYKKAYDSVPHTWLMRVLELYKVDTTLRTFLMSCMGQWRTVLRYPGCRNIQRNSEPIRIERGIFQGDSLSPLWFCLALNPLSTLLEDSGLGYRLRRGGQVISHLLYMDDLKLFAPNNFQLMELLKITETFSSAIRMEFGVDKCAVMHVKRGEIVESVGTQLSDSTNLRALSASETYKYLGMSEALGINVTDMKQSVKERFFGRLKKVLNSLLSGGNKVRAFNGWVMPVLMYSFGILKWTQTELDALDRRVRTLLTANRMHHPRSSVMRLYIPRKCGGRGFLNAKTLHNREICSLREYFLETDVGMHRDVVIVDKGLTPLSLAKENWRKPVVLDTKDRMEVWQSKELHGRFLRALRGPDVDLQASVAWLRFGNLFGETEGFVCAIMDEVMMTNNYRRFIVKDGTVDICRACHRPGESIRHIISGCSRLANGEYLHRHNLVARIIHQQLALKYNLVESEVPYYRYVPDPVLENGNITLYWDRSIITDRTIVANKPDIVVVDRSERRAMIVDITVPHDENLVKAEKDKQIKYLDLAREVVDMWDVDTAIIVPIVVTANGLIAKSLDQHLRRLSLGSWIKGLIQRAVLLDTARIVRRFLSLEP

SEQ ID NO: 11484 - protein, 1173 aa, Spilarctia lutea
MLTRARRRAQLSPPDSSLRSALPSPEEAIEVPAGAEASSSSSSDEFFSPPTSPIPVRRQGRGRPPTSLGSRGPLTSNRAPAAGGDVRRMKWTHSINENVMRAYFRATELGTNLTAYRVRLVSLFQELEPAVNVSAQRLSDQVRAIQRCHLLDDAALERIRSDIRNSLTVPSSSHVLNVVTNSTPQVPQNDDISELVDSEIISVSTQYNDRIRSTLEDAIREYRYVNLNNRPRLSRLPIHKRNLALVSALDSLLPKYFSNSEDLSDTHSILYCAAIAVCRVAGVKFAEYTTTTRQENTLPAWQYRIERRIAEARTLIGKLMSFRSGNTRPRVMRFVKRAFLGTTISPQEYMSCVTERIDFLKQKVYAWANRIRRYRKRVDRYNQNRMFQRNEKWVYRKWENLSPCMSDGQVPDENATNSFWRNMWSVPVTHTEGDWYRDVERSCESLLPMEPISIDEEDVSCAVRSLPNWKAPGPDGLHNFWLKWFRSSHACLASQFQTALDSGSLPQFLTTGITHLLYKSGDAMDPKNFRPITCLPTLYKLLTSILRLKITTHINHNSILSISQNGCRSGTRGTKELLIIDMTISQQVRRNRKSLATCWIDYKKAFDSVPHTWLLKVLELYKIDTTLCTFLKVCMGQWRTALRYPGCRQSAMNDVLIKIERGIFQGDSLSPLWFCLALNPLSTLLEGSGLGYRLQKDDRVISHLFYMDDLKLLAPTKLQLTALLKVTENFSNSIKMEFGVDKCAVMYVKKGEIVESEGIELSDSTKLRSLSATETYKYLGFSQSLGMPESDMKQTLRERFFSRLKKVLKSLLSGGNKVRACNGWVMPVLMYSFGVLRWTQTELDAIDRRVRTLLTAFRMHHPRSSVMRLYIPQRLGGRGLLNIKTLHNREVYNLREYFLQTDVGVHRSVVTVDTGLTPLALAKENWRKPVVLSTNDRREVWKGKELHGRFYRALHGPDIDFKTSTSWLRYGDLFGETEGFVCAIMDEVIMTNNYRKYILKDGTVDICRACHRPGESIRHIISGCSRLANGEYLHRHNQVARIVHQQLALKYHLVNSEVPYYRYVPDPVLENGRATLYWDRSIITDRTIVANKPDIVVIDRLERRAIIIDIAVPHDENLVKVEKEKQIKYLDLSHEIVDMWNLDSVIIVPIVVSAHGLIAKSLDQHLKRLTLEG

SEQ ID NO: 11485 - protein, 868 aa, Xestia c-nigrum
MRFVRRAFSGTDINPRDYMSRVTERIDFLKQKVYAWASRIRRYKRRVDRYTQNRTFQRDERWVYRAWERPDQGVADTRLPDDDAMCSFWRSIWSVPVSHAEGEWTRVVERACDPVPEMGAITISPQDVACAVRPLPNWKSPGPDGLHNFWIKWFTRSHARLATLFQSALESGSVPEFLTTGITHLLHKSGSTAEPKNYRPITCLPTVYKVLTSILRAKITKHIDENSVMSASQNGCRNGSRGTKELLLIDMAISQQVRRSRKDLSTCWIDYKKAYDSVPHTWLMRVLELYKVDATLRTFLMSCMGQWRTVLRYPGCRQIQRNSEPIRIERGIFQGDSLSPLWFCLALNPLSTLLEDSGLGYQLRKDGRVISHLLYMDDLKLFATNDFQLMELLKVTETFSSAIRMEFGVDKCAVMHVKRGEIVESVGTQLSDSINLRSLSATETYKYLGMSEALGINVADMKQSLKERFFGRLKKVFNSLLSGGNKVRAFNGWVMPVLMYSFGILKWTQTELDALDTKVRKLLTAFRMHHPRSSVMRLYIPRKCGGRGFLNAKTLHNREICSLRDYFLEADVGMHRDVVAMDKGLTPLSLAKENWRKPIILTTDDRRKEWQGKELHGRFYRALHGPDVDFLASVSWLRSGDLFGETEGFVCAIMDEVMMTNNYRRFIVKDGTVDICRACHRPGESIRHIISGCSRLANGEYLRRHNLVARIIHQQLALKYNLVESEVPYYRYVPDPVLDNGSITLYWDQSIITDRTVIANRPDIVVMDRSERRAMIVDITVPHDENLVKAEKDKQIKYLDLAREVVDMWEVDSAIIVPIVVSAHGLIAKSLDQYLRRLSLGSWIKGLIQKAVLLDTARIVRRFLSLEP

SEQ ID NO: 11486 - protein, 1046 aa, Xestia c-nigrum
MLDDTVLDRLRTEMHSSHVIATPPSQAVVLPQSTTITYRDDDVSSDMITNVGTQYSEDMRSALEGAIREYRFMTPELRPRLPRLPMHNKNRMLVAVLDSQLSNYFDNCEDLTDVHSILYCAAVAACRVARVKFSDDRATRSKPAVPAWQYRIEQRIGGARALIGKLICFREGNTRPRVMRFVRRAFLGTDINPRDYMSRVTERIDFLKQKVYAWASRIRRYKRRVDRYTQNRTFQRDERWVYRAWERPDQGVADTRLPDDDAMCSFWRSIWSVPVSHAEGEWTRVIERACDPVPEMGAITISPQDVACAVRPLPNWKSPGPDGLHNFWIKWFTRSHARLATLFQSALESGSLPEFLTTGITHLLHKSGSTAEPKNYRPITCLPTVYKVLTSILRTKICKHVDDNSVMSASQNGCRNGSRGTKELLLIDMAISQQVRRSRKDLSTCWIDYKKAYDSVPHTWLMRVLELYKVDATLRTFLMSCMGQWRTVLRYPGCRQIQRNSEPIRIERGIFQGDSLSPLWFCLALNPLSTLLEDSGLGYQLRKDGRVISHLLYMDDLKLFAPNDLQLMELLKVTETFSSAIRMEFGVDKCAVMHVKRGEIVESVGTQLSDSINLRSLSATETYKYLGMSEALGINVADMKQSLKERFFGRLKKVFNSLLSGGNKVRAFNGWVMPVLMYSFGILKWTQTELDALDTKVRKLLTAFRMHHPRSSVMRLYIPRKCGGRGFLNAKTLHNREICSLRDYFLEADVGMHRDVVAMDKGLTPLSLAKENWRKPIILTTDDRRKEWQGKELHGRFYRALHGPDVDFLASVSWLRSGDLFGETEGFVCAIMDEVMMTNNYRRFIVKDGTVDICRACHRPGESIRHIISGCSRLANGEYLHRHNLVARIIHQQLALKYNLVESEVPYYKYVPDPVLVNGSITLYWDQSIITDRTVIANRPDIVVMDRSERRAMIVDITVPHDENLVKAEKDKQIKYLDLAREVVDMWEVDSAIIVPIVVSAHGLIAKSLDQHLRRLSLGSWIKGLIQKAVLLDTARIVRRFLSLEP

SEQ ID NO: 11487 - protein, 1198 aa, Xestia c-nigrum
MLTRAAARRARLSPPDPSLSSASPPPEPSPIVSAVTPAAVASSSSDEYFSPPTTPPPARRRGGRRPPDGLGPRGPPASDRVPAPGGSVQRMRWTQSNNENVMRAYYGATEGGINLTAYRVRMLSLFQVLEPAVNVSAQRLSDQVRVIQRNRMLDDTVLDRLRTEVQSSRVTATPPSQAVVPPQSTVTTPYCDGDVSSDMVTNVSTQCSEDMRSALEGAIREYRFMTPELRPRLPRLPMHNKNKMLMAVLDSQLSNYFHSCEDLTDIHSILYCAAVAACRVAHVKFSDDRATRPKPAVPAWQYRIEQRIGGARALIGKLICFREGNTRPRVMRFVRRAFSGTDISPRDYMFRVTERIDFLKQKVYAWASRIRRYKRRVDRYTQNRTFQRDERWVYRAWERPDQGVADTRLPDDDAMCSFWRSIWSVPVSHAEGEWTRVVERACDPVPEMGAITISPQDVACAVRPLPNWKSPGPDGLHNFWIKWFTRSHARLATLFQSALESGSLPEFLTTGITHLLHKSGSTAEPKNYRPITCLPTVYKVLTSILRAKITKHIDENSVMSTSQNGCRNGSRGTKELLLIDMAISQQVRRSRKDLSTCWIDYKKAYDSVPHTWLRRVLELYKVDATLRTFLMSCMGQWRTVLRYPGCRQIQRNSEPIRIERGIFQGDSLSPLWFCLALNPLSTLLEDSGLGYQLRKDGRVISHLLYMDDLKLFAPNDLQLMELLKVTETFSSAIRMEFGVDKCAVMHVKRGGIVESVGTQLSDSINLRSLSATETYKYLGMSEALGISVADMKQSLKERFFGRLKKVFNSLLSGGNKVRAFNGWVMPVLMYSFGILKWTQTELDALDTKVRKLLTAYRMHHPRSSVMRLYIPRKCGGRGFLNAKTLHNREICSLREYFLAADVGMHRDVVAMDKGLTPLSLAKENWRIPVVFTTDDRRKEWQSKELHGRFYRALHGPDVDFQASVSWLRSGDLFGETEGFVCAIMDEVMMTNNYRRFIVKDGTVDICRACHRPGESIRHIISGCSRLANGEYLHRHNLVARIIHQQLALKYNLVESEVPYYRYVPDPVLNSGSITLYWDQSIITDRTVIANRPDIVVMDRSERRAMIVDITVPHDENLVKAEKDKQIKYLDLAREVVDMWEVDSAIIVPIVVSAHGLIAKSLDQYLRRLSLGSWIKGLIQKAVLLDTARIVRSFLSLEP

SEQ ID NO: 11488 - protein, 1096 aa, Xestia c-nigrum
MDEKRLHVAEMRMLRWMCGVTRMDKVRNEYNVRGSLKVAPVIEKLKGSRLAWYGHVIIIIITEMHTSHVIATPPSQAVVLPQSTTITYRDDDVSSDMITNVGTQYSEDMRSALEGAIREYRFMTPELRPRLPRLPMHNKNRMLVAVLDSQLSNYFDNCEDLTDVHSILYCAAVAACRVARVKFSDDRATRPKPAVPAWQYRIEQRIGGARALIGKLICFREGNTRPRVMRFVRRAFSGTDINPRDYMSRVTERIDFLKQKVYAWASRIRRYKRRVDRYTQNRTFQRDERWVYRAWERPDQGVADTRLPDDDAMCSFWRSIWSVPVSHAEGEWTRVIERACDPVPEMGAITISPQDVACAVRPLPNWKSPGPDGLHNFWIKWFTRSHARLATLFQSALESGSLPEFLTTGITHLLHKSGSTAEPKNYRPITCLPTVYKVLTSILRTKICKHVDDNSVMSASQNGCRNGSRGTKELLLIDMAISQQVRRSRKDLSTCWIDYKKAYDSVPHTWLMRVLELYKVDATLRTFLMSCMGQWRTVLRYPGCRQIQRNSEPIRIERGIFQGDSLSPLWFCLALNPLSTLLEDSGLGYQLRKDGRVISHLLYMDDLKLFAPNDLQLMELLKVTETFSSAIRMEFGVDKCAVMHVKRGEIVESVGTQLSDSINLRSLSATETYKYLGMSEALGINVADMKQSLKERFFGRLKKVFNSLLSGGNKVRAFNGWVMPVLMYSFGILKWTQTELDALDTKVRKLLTAFRMHHPRSSVMRLYIPRKCGGRGFLNAKTLHNREICSLRDYFLEADVGMHRDVVAMDKGLTPLSLAKENWRKPIILTTDDRRKEWQGKELHGRFYRALHGPDVDFLASVSWLRSGDLFGETEGFVCAIMDEVMMTNNYRRFIVKDGTVDICRACHRPGESIRHIISGCSRLANGEYLHRHNLVARIIHQQLALKYNLVESEVPYYRYVPDPVLVNGSITLYWDQSIITDRTVIANRPDIVVMDRSERRAMIVDITVPHDENLVKAEKDKQIKYLDLAREVVDMWEVDSAIIVPIVVSAHGLIAKSLDQHLRRLSLGSWIKGLIQKAVLLDTARIVRRFLSLEP

SEQ ID NO: 11489 - protein, 1198 aa, Griposia aprilina
MLTRSAKRRARPPPPDSSLSSASPPPVSSPIVNAVTTPAAVVASSSSDEYFSPPTTPPPARRRGGHRPPDGLGPRGPPASDRVPAPGGSVQRMRWTRSINENVMRSYYGATEGGNNLTAYRVRMLSLFQVLEPAVNVSAQRLSDQVRVIQRNHMLDDTVLDRLRNEMQSSHVIAPPSQTVIVLPQCNTTQADEESDDRATNVSTQCNEELRSALEDAIREYRFISPELRPRLPRLPMHNKNRALVAALDTQLSNYFDDCVDLTDTHSILYCAAVAACRVAHVKFANDSRATRPKPVVPAWQCRIERRIGGTRALIGKLICFREGNTRPRVMRFVRRAFAGTDISPQDYMSCVTDRIDFLKQKVYAWANRIRRYKRRVERYTQNRTFRRDERWVYRSWERPDQGVADTYLPDDDAMCSFWRNIWSVPVSHSEGDWTREVERACEPLPEMGAITICPQDVTRAVRPLPNWKSPGPDGLHNFWIKWFLRSHARLAAQFQVALESGLLPQFLTTGVTHLLHKSGSTAEPKNYRPITCLPTVYKVLTSILRAKINNHIDTNSIMSPSQNGCRNGSRGTKELLLIDMTISQQVRRSRKDLSTCWIDYKKAYDSVPHTWLMRVLELYKVDSTLRTFLKSCMGQWRTVLHYPGCRNVQRNSEPIRIERGIFQGDSLSPLWFCLALNPLSTLLENSGLGYRLRRGGQVISHLLYMDDLKLFAPNNLQLMELLKVTETFSSAIRMEFGVDKCAVMHVKRGEIVESVGTQLSDSINLRALSASETYKYLGISEALGINGTDMKQSLKERFFGRLKKVFNSLLSGGNKVRAFNGWVMPVLMYSFGILKWTQTELDALDKKIRSLLTANRMHHPRSSVMRLYIPRKCGGRGFLNAKTLHNREICSLREYFLEADVGMHRDVVTVDKGLTPLSLAKENWRKPVVLDTNDRMEVWQSKELHGRFFRALHGPDVDQLASVAWLRFGDLFGETEGFVCAIMDEVMMTKNYRRFIVKDGTVDICRACHRPGESIRHIISGCSRLANEEYLHRHNLVARIIHQQLALKYSLVESEVPYYRYVPDPVLENGHITLYWDRSIITDRTIVANKPDIVVVDRIERRAVIVDITIPHDGNLVKAEKDKQIKYLDLARKVVDMWDVDSAIIVPIVVTANGLIAKSLDQHLRRLSLGSWIKGLIQKAVLLDTARIVRRFLSLEP

SEQ ID NO: 11490 - protein, 868 aa, Griposia aprilina
MRFVRRAFAGTNISPQDYMSCVTERIDFLKQKVYAWANRIRRYKRRVERYTQNRTFQRDERWVYRVWERPDQGVADTCLPDDDAMCSFWRNIWSVPVSHTEGDWTREVERACDPIPEMGAITICPQDVTRAVRPLPNWKSPGPDGLHNFWIKWFGRSHARLAAQYQVALESGSLPQFLTTGVTHLLHKSGSTAEPKNYRPIACLPTVYKVLTSILRDKINKHIDTNYIMSPSQNGCRNGSRGTKELLLIDMAISQQVRRSRKDLSTCWIDYKKAYDSVPHTWLMRVLELYKVEATLRTFLMSCMRQWRTVPHYPACRNTQRNSEPIRIERGIFQGDSLSPLWFCLALNPLSTLLEDSGLGYRLRRGGQVISHLLYVDDLKLFAPNNSQLMDLLKVTETFSSAIRMEFGVDKCAVMHVKRGEIVESVGTQLSDSINLRALSASETYKYLGMSEALGINGTDMKQSLKDRFFGRLKKVFNSLLSGGNKVRAFNGWVMPVLMYSFGILKWTQTELDALDRKVRTLLTANRMHHPRSSVMRLYIPRKCGGRGFLNAKTLHNREICSLREYFLEADVGMHRDVVTVDKGLTPLSLAKENWRKPVVLDTNDRMEVWQSKELHGRFFRALHGPDVDQLASVAWLRFGDLFGETEGFVCAIMDEVMMTNNYRRFIVKDGTVDICRACHRPGESIRHIISGCSRLANEEYLHRHNLVARIIHQQLALKYSLVESEVPYYRYVPDPVLENGHITLYWDRSIITDRTIVANKPDIVMVDRLERRAMIVDITVPHDGNLVKAEKDKQIKYLDLAREVVDMWDVDSAIIVPIVVTANGLIAKSLDQHLRRLSLGSWIKGLIQKAVLLDTARIVRRFLSLEP

SEQ ID NO: 11491 - protein, 1204 aa, Griposia aprilina
MQTRARARQETHPPSPDLSLSSASQPPVRASTMSAVSPVAAVASSSSDEFFSPPSSPTPPRQRGRGRPPAGLGSRGQQASNGVPAAGGNVSRMRWTQSINENVMRAYYGATEGGINLTAYRSRMLSLFQVLEPAVNVSAQRLSDQVRVIRHNHRLDDATLDRLRLEMQSSSASNPSPPQNFVHAPTVVPLRTNQQDEEEDTRAISADNLCNVELRSILEDAIREYRFTSSDLRPRLPRLPMNKKNRALVCALDALLPNLIENSADLCDTHSILYCTAVAACRIARVKFPNTDRTAQLKPAAPAWQCRIERRINEARVLIGKLTCFREGNTRPRVMRFVRQAFSGTNISPREYISCVTERIDFLKQKVYAWANRIRRYRRRVDRYTQNRMFQKDERWVYRAWERPIPTQGVTDVLPPDNDTVSAFWRSIWSVPVSHTEGDWMRVVEQACDSIPEMEAISISPLDVARAVRPLPNWKSPGPDGLHNFWIKWLQRSHACLASQFQSSLETGSLPLIFTTGVTHLLHKSGSTAEPKNYRPITCLPTVYKVLTSILRAKIAEHIKNNSIMSVSQNGCKNGSRGTKELLLIDMAISQQVRRSRKDLSTCWIDYKKAYDSVPHTWLIRVLELYKIDATLRTFLISCMGQWRTILLYPGCRQIQRTDEPIRIERGIFQGDSLSPLWFCLALNPLSTLLEDSGLGYRLRRGGQVISHLLYMDDLKLFAPNNLRLMELLKVTETFSSAIRMEFGVDKCAVMHVKRGGIMESVGTQLSDSIHLRSLSSTETYKYLGMSEALGINAADMKQSLRERFFGRLNKVLNSLLSGGNKVRAFNGWVMPVLMYTFGILKWTQTELDALDRKVRTLLTAYRMHHPRSSVMRLYIPRKCGGRGFLNAKTLHNREICSLREYFLQTDVGMHRDVVAVDKGLTPLSLAKENWRKPAVLDTNDRKEVWQGKELHGRFFRALHGPDVDFLASVSWLRFGDLFGETEGFVCAIMDEVIMTNNYRKYIVKDGTVDICRACHRPGESIRHIVSGCSRLANGEYLHRHNLVARIIHQQLALQYNLVESEVPYYRYVPDPVLENGHTTLYWDRSIITDRTIVANKPDIVVIDRRERRAMIVDIAVPHDENLVKAEKDKKIKYLDLAHEVVDMWGVDSAIIVPIIVSVNGLIAESLDQHLRRLSLRSWVKSLIQRAVLLDTARMVRRFLSLDP

SEQ ID NO: 11492 - protein, 1199 aa, Griposia aprilina
MMLTRSAKRRAHPPPPDSSLSSASPPPVSSPTVSAVTTPAAVVASSSSDEYFSPPTTPPPVRRRGGHRPPDGLGPRGPPASDRVPAPGGSVPRMRWTRSINENVMRSYYGATEGGNNLTAYRVRMLSLFQVLEPAVNVSAQRLSDQVRVIQRNHMLDDTVLDRLRNEMQSSHVIAPPSQTVVVLPQSNTSQADEESDDRATNVSTQCNDELRSALEDAIREYRFISPELRPRLPRLPMHNKNRVLVAALDAQLSNYFDDCVDLTDTHSILYCAAVAACRVTHIKFANDSRPTRPKPAVPAWQCRIERRIGGARALIGKLICFREGNTRPRVMRFVRRAFAGTNISPQDYMSCVTERIDFLKQKVYAWANRIRRYKRRVERYTQNRTFQRDERWVYRGWERPDQGVADTCLPDDDAMCSFWRNIWSVPVSHTEGDWGREVERACDPIPEMGAISICPQDVTRAVRPLPNWKSPGPDGLQNFWIKWFGRSHARLAAQYQVAIESGSLPQFLTTGVTHLLHKSGSTAEPKNYRPITCLPTVYKVLTSILRAKINKHIDTNSIMSPSQNGCRNGSRGTKELLLIDMAISQQVRRSRKDLSTCWIDYKKAYDSVPHTWLMRVLELYKVDATLRTFLKSCMGQWRTILHYPGCRNIQRDNEPIRIERGIFQGDSLSPLWFCLALNPLSTLLEDSGLGYRLRRGGQVISHLLYMDDLKLFAPNNLQLMELLKVTETFSSAIRMEFGVDKCAVMHVKRGEIVESVGTQLSYSINLRALSASDTYKYLGMSEALGINGTDMKHSLKERFFGRLKKVFNSLLSGGNKVRAFNGWVMPVLMYSFGILKWTQTELDALDRKVRTLLTANRMHHPRSSVMRLYIPRKCGGRGFLNAKTLHNREICSLREYFLEADVGMHTDVVKVDKGLTPLSLAKENWRKPVVLDTNDRMEVWQSKELHGRFFRALHGPDVDQLASVAWLRFGDLFGETEGFVCAIMDEVILTNNYRRHIMKDGTVDVCRACHRPGESIRHIISGCSRLANEEYLHRHNLVARIIHQQLALKYSLVESEVPYYRYVPDPVLENGHITLYWDRSIITDRTIVANKPDIVVVDRLERRAMIVDITVPHDGNLVKAEKDKQIKYLDLAREVVDMWDVDSAIIVPIVVTANGLIAKSLDQHLRRLSLGSWIKGLIQKAVLLDTARIVRRFLSLEP

SEQ ID NO: 11493 - protein, 1199 aa, Griposia aprilina
MMLTRSAKRRAHPPPPDSSLSSASPPPVFSPTVSAVTTPAAVVASSSSDEYFSPPTTPPPVRRRGGHRPPDGLGPRGPPASDRVPAPGGSVQRMRWTRSINENVMRSYYGATEGGNNLTAYRVRMLSLFQVLEPAVNVSAQRLSDQVRVIQRNHMLDDTVLDRLRNEMQSSHVIAPPSQTVVVLPQSNTSQADEESDDRATNVSTQCNDELRSALEDAIREYRFISPELRPRLPRLPMHNKNRVLVAALDAQLSNYFDDCVDLTDTHSILYCAAVAACRVAHIKFADDSRPTRPKPAVPAWQCRIERRIGGARALIDKLICFREGNTRPRVMRFVRRAFAGTNISPQDYMSCVTERIDFLKQKVYAWANRIRRYKRRVERYTQNRTFQRDERWVYRGWERPDQGVADTCLPDDDAMCSFWRNIWSVPVSHTEGDWSREVERACDPIPEMGAISICPQDVTRAVRPLPNWKSPGPDGLQNFWIKWFGRSHARLAAQYQVAIESGSLPQFLTTGVTHLLHKSGSTAEPKNYRPITCLPTVYKVLTSILRAKINKHIDTNSIMSPSQNGCRNGSRGTKELLLIDMAISQQVRRSRKDLSTCWIDYKKAYDSVPHTWLVRVLELYKVDATLRTFLKSCMGQWRTILHYPGCRNIQRDNEPIRIERGIFQGDSLSPLWFCLALNPLSTLLEDSGLGYRLRRGGQVISHLLYMDDLKLFAPNNLQLMELLKVTETFSSAIRMEFGVDKCAVMHVKRGEIVESVGTQLSYSINLRALSASDTYKYLGMSEALGINGTDMKQSLKERFFGRLKKVFNSLLSGGNKVRAFNGWVMPVLMYSFGILKWTQTELDALDRKVRTLLTANRMHHPRSSVMRLYIPRKCGGRGFLNAKTLHNREICSLREYFLEADVGMHTDVVKVDKGLTPLSLAKENWRKPVVLDTNDRMEVWQSKELHGRFFRALHGPDVDQLASVAWLRFGDLFGETEGFVCAIMDEVILTNNYRRHIMKDGTVDVCRACHRPGESIRHIISGCSRLANEEYLHRHNLVARIIHQQLALKYSLVESEVPYYRYVPDPVLENGHITLYWDRSIITDRTIVANKPDIVVVDRLERRAMIVDITVPHDGNLVKAEKDKQIKYLDLAREVVDMWDVDSAIIVPIVVTANGLIAKSLDQHLRRLSLGSWIKGLIQKAVLLDTARIVRRFLSLEP

SEQ ID NO: 11494 - protein, 1198 aa, Griposia aprilina
MLTRSAARRARPPPPDSSLSSASLPPVSSPTVSAMTTPAAVVASSSSDEYFSPPTTPPPVRRRGGHRPPDGLGPRGPPASDRVPAPGGSVQRMRWTRSINENVMRSYYGATEGGNNLTAYRVRMLSLFQVLEPAVNVSAQRLSDQVRVIQRNHMLDDIVLDRLRNEMQSSHVIAPPSQTVVVLPQSNTSQADEESDDRATNVSTQCNDELRSALEDAIREYRFISPELRPRLPRLPMHNKNRVLVAALDAQLSNYFDDCVDLTDTHSILYCAAVAACRVAHVKFANDSRATRPKPAVPAWQCRIERRIGEARALIGKLICFREGNTRPRVMRFVRRAFAGTNISPQDYMSCVTERIDFLKQKVYAWANRIRRYKRRVERYTQNRTFQRDERWVYRGWERPDQGVADTCLPDDDAMCSFWRNIWSVPVSHTEGDWTREVERACDPIPEMGAITICPQDVTRAVRPLPNWKSPGPDGLHNFWIKWFGRSHARLAAQYQVALESGSLPLFLTTGVTHLLHKSGSTAEPKNYRPIACLPTVYKVLTSILRDKINKHIDTNYIMSPSQNGCRNGSRGTKELLLIDMAISQQVRRSRKDLSTCWIDYKKAYDSVPHTWLMRVLELYKVEATLRTFLMSCMGQWRTVLHYPACRNTQRNSEPIRIERGIFQGDSLSPLWFCLALNPLSTLLEDSGLGYRLRRGGQIISHLLYMDDLKLFAPNNSQLMDLLKVTETFSSAIRMEFGVDKCAVMHVKRGEIVESVGTQLSDSINLRALSASETYKYLGMSEALGINGTDMKQSLKDRFFGRLKKVFNSLLSGGNKVRAFNGWVMPVLMYSFGILKWTQTELDALDRKVRTLLTANRMHHPRSSVMRLYIPRKCGGRGFLNAKTLHNREICSLREYFLEADVGMHRDVVTVDKGLTPLSLAKENWRKPVVLDTNDRMEVWQSKELHGRFFRALHGPDVDQLASVAWLRFGDLFGETEGFVCAIMDEVMMTNNYRRFIVKDGTVDICRACHRPGESIRHIISGCSRLANEEYLHRHNLVARIIHQQLALKYSLVESEVPYYRYVPDPVLENGHITLYWDRSIITDRTIVANKPDIVMVDRLERRAMIVDITVPHDGNLVKAEKDKQIKYLDLAREVVDMWDVDSAIIVPIVVTANGLIAKSLDQHLRRLSLGSWIKGLIQKAVLLDTARIVRRFLSLEP

SEQ ID NO: 11495 - protein, 868 aa, Omphaloscelis lunosa
MRFVRRAFLGTDISPQDYMTRVTERIDFLKQKVYAWANRIRRYKRRVERYTQNRTFQSDERWVYRAWERPNQGVTDTHLPDEDAMCSFWRSIWSVPVSHTEGDWTREVERACDSIPEMGAITICPQDVARAVRPLPNWKSPGPDGLHNFWIKWFVRSHARLAAQYQTALESGSLPQFLTTGVTHLLHKSGSTAEPKNYRPITCLPTVYKVLTSVLRAKINKHIDTNSIMSASQNGCRNGSRGTKELLLIDMAISQQVRRSRKDLSTCWIDYKKAYDSVPHTWLMRVLELYKVDITLRTFLMSCMGQWRTVIRYPGCRNIQRNSEPIRIERGIFQGDSLSPLWFCLALNPLSTLLEDSGLGYRLRRGGQVISHLLYMDDLKLFAPNNLQLMELLKVTETFSSAIRMEFGVDKCAVMHVKRGKIMESVGTQLSDSINLRALSASETYKYLGMSEALGINVTDMKQSLKERFFGRLKKVLNSLLSGGNKVRAFNGWVMPVLMYSFGILKWSQTELDALDRRVRTLLTAYRMHHPRSSVMRLYIPRKCGGRGFLNAKTLHNREICSLREYFLEADVGMHRDVVVVDKGLTPLSLAKENWGKPVVLDTKNRMEIWQSKELHGRYFRALHGPDVDLPASVAWLRCGDLFGETEGFVCAIMDEVMMTNNYRRFIVKDGTVDICRACHRPGESIRHIISGCSRLANEEYLHRHNLVARIIHQQLALKYSLVESEVPYYRYVPDPVLENGNITLYWDRSIITDRTIVANKPDIVVVDRGERSAMIIDITVPHDENLVKAEKDKQIKYLDLAREVVDMWDVDSAIIVPIVVTANGLIAKSLDQHLRRLSLGSWIKGLVQKAVLLDTARIVRRFLSLEP

SEQ ID NO: 11496 - protein, 1204 aa, Omphaloscelis lunosa
MLTRSRARKLIDTHPTSSGSSLSSASQLPDPAPNVSPVIPVAAVASSSSDEYFSPPTTPPPTRQRGRGRPPASLGLRGPPASDRVPAPGGSVQRMRWTQTINENVMRAYFGATEGGSNLTAYRGRMLSLFQVFEPAVNVSAQRLSDQVRVIQRNHMLDDVVLDRLRLESRNNNVKPASPLVTVQLQNLTSSSPRPNRVGEEDDDGVISVSSQCNARLRSALEDAFRENRSIPPGLRPHLPRLPMDKKNKALMCTLDSLLSNYFDGSKDLADTHSILYCAAVAACRVAHVKFPNSDRAPRPKPAVPAWQCRIERRIGEARVLIGKLICFREGNTRPRVMRFVKRAFSETDISSQDYLTRVTERIDFLKQKIYAWANRIRRYRRRVERYTQNRTFQSDERWVYRAWERPDQGVIDTRLPDDDAMCTFWRSIWSAPVSHTEGDWTREIERACEQIPEMEALTISPQDIARAVRPLPNWKSPGPDGLHNFWVKWFQRSHARLASQFQSALDSGSLPQFLTGITHLLHKSGSTAEPKNYRPITCLPTVYKVLTSILRTKINKHIDTNSIMSVSQNGCKNGSRGTKELLLIDMAINQQVRRSRRDLSTCWIDYKKAYDSVPHTWLMRVLELYKVDATLRTFLMSCMRQWTTVLRYPGCRQILRNSEPIRIERGIFQGDSLSPLWFCLALNPLSTLLEDSGLGYRLRRGGQVISHLLYMDDLKLFAPNNLQLLELLKVTETFSSAIRMEFGVDKFAVMHVKRGEIVESVGTHLSDSIQLRSLSSIETYKYLGMSEALGVNAADMKQSLKERFFNRLNKVLNSLLSGGNKVRAFNGWVMPVLMYSFGILKWTQTELDALDRRVRTLLTANRMHHPRSSVMRLYIPRKCGGRGFLNAKTLHNREVCSLREYFLEADVGMHRDVVTVDKGLTPLSLANENWRKPIVLDTNDRREVWQSKELHGRFYRALHGPDVDLLASVSWLRFGDLFGETEGFVFAIMDEVIMTNNYRKYIVKDGTVDICRACHRPGESIRHIISGCSRLANGDYLHRHNLVARIIHQQLALKYSLVESEVPYYRYVPDPVLENGNITLYWDRSIITDRTTVANKPDIVVIDRLERRTMIIDIAVPHDENLVKAEKDKQIKYFDLAREVLDMWDVDTAIIVPIVVTANGIIAKSLDQHLKRLSLGSWIKGLIQKAVLLDTARIVRRFLSQEP

SEQ ID NO: 11497 - protein, 1205 aa, Omphaloscelis lunosa
MLTRSRARKLIDTHPTSSGSSLSSASQVPDPAPDVSPVIPVAAVASSSSDEYFSPPTTPPPTRQRGRGRPPASLGLRGPPASDRVPAPGGSVQRMRWTQTVNENVMRAYFGATEGGSNLTAYRGRMLSLFQVLEPAVNVSAQRLSDQVRVIQRNHMLDDVVLDRLRLESRNNHVTPASPLVTVQLQNLPSSSPRSDRVGEEDDDGVISVSSQCNVRLRSALEDAFREYRSIPPGLRPQLPRLPMHKKNKALMCTLDSLLSNCFDGSKDLADTHSILYCAAVAACRVAHVKFPNSDRAPRPKPAVPAWQCRIERRIGEARVLIGKLICFREGNTRPRVMRFVKRAFSGTDISFQDYLTRVTERIDFLKQKIYAWANRIRRYRRRVERYTQNRTFQSDERWVYRAWERPDQGVADTHLPDDDAMCSFWRSIWSVPVSHTEGDWTREVERACDPIPEMGAITICPQDVARAVRPLPNWKSPGPDGLHNFWIKWFQRSHARLASQFQSALESGSLPQFLTTGITHLLHKSGSTAEPKNYRPITCLPTVYKVFTSILRTKINKHIDTNSIMSASQNGCRNGSRGTKELLLIDMAINQQVRRSRRDLSTCWIDYKKAYDSVPHTWLMRVLELYKVNATLRTFLMSCMGQWRTVLRYPGCRQILRNSEPIRIERGIFQGDSLSPLWFCLALNPLSTLLEDSGLGYRLRRGGQVISHLLYMDDLKLFAPNNLQLLELLKVTETFSSAIRMEFGVDKCAVMHVKRGEIVESVGTQLSDSIQLRSLSSIETYKYLGMSEALGVNAADMKQSLKERFFNRLNKVLNSLLSGGNKVRAFNGWVMPVLMYSFGILKWTQTELDALDRRVRTLLTANRMHHPRSSVMRLYIPRKCGGRGFLNAKTLHNREVCSLREYFLEADVGMHRDVVTVDKGLTPLSLANENWRKPIVLDTNDRREVWQSKELHGRFYRALHGPDVDLLASVSWLRFGDLFGETEGFVFAIMDEVMMTNNYRKYIVKDGTVDICRACHRPGESIRHIISGCSRLANGDYLHRHNLVARIIHQQLALKYSLVESEVPYYRYVPDPVLENGNITLYWDRSIITDRTIVANKPDIVAIDRLERRTMIIDIAVPHDENLVKAEKDKQIKYLDLAREVVDMWDVDTAIIVPIVVTANGIIAKSLDQHLKRLSLGSWIKGLIQKAVLLDTARIVRRFLSQEP

SEQ ID NO: 11498 - protein, 1205 aa, Omphaloscelis lunosa
MLTRSRARKLTDTHPTSSGSSLSSASQLPDPAPDVSPVIPVAAVASSSSDEYFSPPTTPPPTRQRGRGRPPASLGLRGPPASDRVPAPGGSVQRMRWTQTVNENVMRAYFGATEGGSNLTAYRGRMLSLFQVLEPAVNVSAQRLSDQVRVIQRNHMLDDVVLDRLRLESRNNHVTPASPLVTVQLQNLPSSSPRSDRVGEEDDDGVISVSSQCNVRLRSALEDAFREYRSIPPGLRPKLPRLPMHKKNKALMCTLDSLLSNCFDGSKDLADTHSILYCAAVAACRVAHVKFPNSDRAPRPKPAVPAWQCRIERRIGEARVLIGKLICFREGNTRPRVMRFVKRAFSGTDISFQDYLTRVTERIDFLKQKIYAWANRIRRYRRRVERYTQNRTFQSDERWVYRVWERPDQGVIDTRLPDDDAMCSFWRSIWSAPVSHTEGDWTREIERACEQIPEMEALTISPQDIARAVRPLPNWKSPGPDGLHNFWIKWFQRSHARLASQFQSALESGSLPQFLTTGITHLLHKSGSTAEPKNYRPITCLPTVYKVFTSILRTKINKHIDTNSIMSASQNGCRNGSRGTKELLLIDMAINQQVRRSRRDLSTCWIDYKKAYDSVPHTWLMRVLELYKVNATLRTFLMSCMGQWRTVLRYPGCRQILRNSEPIRIERGIFQGDSLSPLWFCLALNPLSTLLEDSGLGYRLRRGGQVISHLLYMDDLKLFAPNNLQLLELLKVTETFSSAIRMEFGVDKCAVMHVKRGEIVESVGTQLSDSIQLRSLSSIETYKYLGMSEALGVNAADMKQSLKERFFNRLNKVLNSLLSGGNKVRAFNGWVMPVLMYSFGILKWTQTELDALDRRVRTLLTANRMHHPRSSVMRLYIPRKCGGRGFLNAKTLHNREVCSLREYFLEADVGMHRDVVTVDKGLTPLSLANENWRKPIVLDTNDRREVWQSKELHGRFYRALHGPDVDLLASVSWLRFGDLFGETEGFVFAIMDEVMMTNNYRKYIVKDGTVDICRACHRPGESIRHIISGCSRLANGDYLHRHNLVARIIHQQLALKYILVESEVPYYRYVPDPVLENGNITLYWDRSIITDRTIVANKPDIVVIDRLERRTMIIDIAVPHDENLVKAEKDKQIKYLDLAREVVDMWDVDTAIIVPIVVTANGIIAKSLDQHLKRLSLGSWIKGLIQKAVLLDTARIVRRFLSQEP

SEQ ID NO: 11499 - protein, 1201 aa, Omphaloscelis lunosa
MLTRLAARRARLPPPDSPLSSASSPPVRSPTVNAVMTPAAAVASSSSDEYFSPPTTPPPARRRGRRRPPDGLGPRGPPASDRVPAPGGSVQRMRWTRSINENVMRSYYGATEGGNNLTAYRVRMLSLFQVLEPAVNVSAQRLSDQVRVIQRNHMLDDTVLDRLRSEMQSSHVIAPPLRSVIIPSQMSSVITSQADERIDDRATNVSTQCNEDLRSALEGAIQEYRFMSPELRPRLPRLPMHNKNKALVAVLDSQLSNYFDDCEDLTDTHSILYCAAVAVCRVAHLKFSNDSRATRPKPAAPAWQCRIERRIGGARTLIGKLICFREGNTRPRVMRFVRRAFLGTDISPQDYMTRVTERIDFLKQKVYAWANRIRRYKRRVERYTQNRTFQSDERWVYRAWERPDQGVADTHLPDDDAMCSFWRSIWSVPVSHTEGDWTREVERACDPIPEMGAITICPQDVARAVRPLPNWKSPGPDGLHNFWIKWFVRSHARLAAQYQTALESGSLPQFLTTGVTHLLHKSGSTAEPKNYRPITCLPTVYKVLTSILRAKINKHIDTNSIMSASQNGCRNGSRGTKELLLIDMAISQQVRRSRKDLSTCWIDYKKAYDSVPHTWLMRVLELYKVHKTLRTFLMSCMGQWRTVLRYPGCRNIQRNSEPIRIERGIFQGDSLSPLWFCLALNPLSTLLEDSGLGYRLRRGGQVISHLLYMDDLKLFAPNNLQLMELLKVTETFSSAIRMEFGVDKCAVMHVKRGEIMESVGTQLSDSINLRALSASETYKYLGMSEALGINVTDMKQSLKERFFGRLKKVLNSLLSGGNKVRAFNGWVMPVLMYSFGILKWTQTELDALDRRVRTLLTAYRMHHPRSSVMRLYIPRKCGGRGFLNAKTLHNREICSLREYFLGVDVGMHRDVVVVDKGLTPLSLAKENWRKPVVLDTKDRMEIWQSKELHGRYFRALHGPDVDLPASVTWLRFGDLFGETEGFVCAIMDEVMMTNNYRRFIVKDGTVDICRACHRPGESIRHIISGCSRLANEEYLHRHNLVARIIHQQLALKYSLVESEVPYYRYVPDPVLENGNITLYWDRSIITDRTIAANKPDIVVVDRGERSTMIIDITVPHDENLVKAEKDKQIKYLDLAREVVDMWDVDSAIIVPIVVTANGLIAKSLDQHLRRLSLGSWIKGLIQRAVLLDTARIVRRFLSLEP

SEQ ID NO: 11500 - protein, 1105 aa, Sesamia nonagrioides
MSKWTVVREIHKNARKNFPRRRFIQKGLDDTWQIDLIDMQKYSRYNNGFKYILTCIDTFSKYAWLQPIKSKSAHDVSQGMLKLSTNSSRRPKNIQSDGGREFFNEKFQVLMSKFNINHYSTYSVMKASIVERFIRTIKNWLRQRFTYNGSYKWVGKELANIINKYNNKVHRTHSILYCGAVAICRVAHVKFPDSDRATRPKSAVPAWQCRIERRIGETRALIGKLISFREGNTRPRVMRFVRRAFSGTDTSTRDYLFRVTERIDFFKQKIYAWANRIRRYRRRVERYSQNRNFQSDERRVYRAWERSDQGVTDTCLPDDDATCSFWRNIWSVPVSHTEGSWTRVVERACDPVPEMGAITICPQDVARAVRPLPNWKSPGPDGLHNFWIKWFSGSHARLASQFQTALESGSLPQFLTTGVTHLLHKSGSTAEPKNYRPITCLPTVYKVLTSILKSKINTHIDSNSIMSASQNGCRSGSRGTKELLLIDMAISQQVRRSRKDLSTCWIDYKKAYDSVPHTWLMRVLELYKVDATLRTFLMTCMRTWRTVLRYPGCRNIQRNSEPIRIERGIFQGDSLSPLWFCLALNPLSTLLEDSGLGYRLRRGGQVISHLLYMDDLKLFAHTDSQLKELLKITETFSSSIRMEFGVDKCAVMHVKRGEIMESVGTQLTSSINLRALSASETYKYLGMSEALGINVTDMKQSLKERFFGRLKKVLNSLLSGGNKVRAFNGWVMPVLMYSFGILKWTQTELDALDRRVRTLLTANRLHHPRSSVMRLYIPRKCGGRGFLNAKTLHNREICSLRQYFLTTDVGMHRDVVAVDKGLTPLSLAKENWRKPVVLDTNDRMEVWKSKELHGRFFKALHGPDVDLQASVAWLRFGDLFGETEGFVCAITDEVMMTNNYRRFIVKDGTVDICRACHRPGESIRHIISGCSRLANGEYLHRHNLVARIIHQQLALKYNLVESEVPYYRYTPDPVLENDHITLYWDRSIITDRTIVANKPDIVLVDRSERRAMIVDITIPHDENLVKAEKDKQIKYLDLAHEVVDMWEVDSAIIVPIVVTANGLIAKSLDQHLRRLSLGSWIKGLIQKAVLLDTARIVRKFLSLEP

SEQ ID NO: 11501 - protein, 1200 aa, Sesamia nonagrioides
MLTRSAARRARPPSPDSLLGSASPPPVSSATASAVTTPAAAVASSSSDEYFSPPTTPPPARRRGGRRPPDRLGARGPSASDRVPAPGGSVQRMRWTQSINENVMRSYYGATEGGNNLTAYRVRMLSLFQVLEPAVNVSAQRLSDQVRVIQRNHMLDDVVLDRLRLESRNSHVTPASSLVAVQLNSVSPRPNHVDEEDDDRAISVSPQCIEKLRSALEDAFCEYRSTPPELRPRLPRLPMHKKNKALVCALDSQLSYYLKDSKDLTDTHSILYCGAVAICRVAHVKFPDSDRATRPKSAIPAWQCRIERRIGETRALIGKLTSFREGNTRPRVMRFVRRAFSGTDTSTRDYLFRVTERIDFFKQKIYAWANRIRRYKRRVERYSQNRNFQSDERRVYRAWERSDQGVTDTCLPDDDATCSFWRNIWSVPVSHTEGSWTRVVERACDPVPEMGAITICPQDVARAVRPLPNWKSPGPDGLHNFWIKWFSRSHARLACQFQTALESGSLPQFLTTGVTHLLHKSGSTAEPKNYRPITCLPTVYKVLTSILKSKINTHIDSNSIMSASQNGCRSGSRGTKELLLIDMAISQQVRRSRKDLSTCWIDHKKAYDSVPHTWLMRVLELYKVDATLRTFLMTCMRTWRTVLRYPGCRNIQRNSEPIRIERGIFQGDSLSPLWFCLALNPLSTLLEDSGLGYRLRRGGQVISHLLYMDDLKLFAHTDSQLKELLKITETFSSSIRMEFGVDKCAVMHVKRGEIMESVGTQLTSSINLRALSASETYKYLGMSEALGINVTDMKQSLKERFFGRLKKVFNSLLSGGNKVRAFNGWVMPVLMYSFGILKWTQTELDALDQRVRTLLTANRLHHPRSSVMRLYIPRKCGGRGFLNAKTLHNREVCSLREYFLETDVGMHRDVVAADKGLTPLSLAKENWRKPAVLDTNDRLEVWKSKELHGRFFRALHGPDIDFQASVAWLRFGDLFGETEGFVFAIMDEVMMTNNYRRFIVKDGTVDICRACHRPGESIRHIISGCSRLANGEYLHRHNLVARIIHQQLALKYNLVESEVPYYRYMPDPVLEHGHITLYWDRSIITDRTIVANKPDIVLVDRSERRAMIVDITIPHDENLVKAEKDKQIKYLDLAHEVVDMWEVDSAIIVPIVVTANGLIAKSLDQHLRRLSLGSWIKGLIQKAVLLDTARIVRKFLSLEP

SEQ ID NO: 11502 - protein, 1201 aa, Sesamia nonagrioides
MLTRSAARKRARPPSPDSLLSSASPPPVSSPTVSAVTTPAAAVASSSSDEYFSPPTTPPPVRRRGGRRPPDRLGPRGPSASDRVPAPGGSVQRMRWTQSINENVMRSYYGATEGGNNLTAYRVRMLSLFQVLEPAVNVSAQRLSDQVRVIQRNHMLDDVVLDRLRLESRNSHVTPASSLVAAQLNSVSPRPNRVDEEDDDRAISVSPQCIEKLRSALEDAFCEYRSTPPELRPRLPRLPMHKKNKALVCALDSQLSYYLKDSKDLTDTHSILYCGAVAICRVAHVKFPDSDRATRPKSAVPAWQCRIERRIGETRALIGKLTSFREGNTRPRVMRFVRRAFSGTDTSTRDYLFRVTERIDFFKQKIYAWANRIRRYKRRVERYSQNRNFQSDERRVYRAWERSDQGVTDTCLPDDDAMCSFWRNIWSVPVSHTEGSWTRVVERACDPVSEMGAITICPQDVARAVRPLPNWKSPGPDGLHNFWIKWFTGSHARLASQFQTALESGSLPQFLTTGVTHLLHKSGSTAEPKNYRPITCLPTVYKVLTSILKSKINTHIDSNSIMSASQNGCRSGSRGTKELLLIDMAISQQVRRSRKDLSTCWIDYKKAYDSVPHTWLMRVLELYKVDATLRTFLMTCMRTWRTVLRYPGCRNIQRNSEPIRIERGIFQGDSLSPLWFCLALNPLSTLLEDSGLGYRLRRGGQVISHLLYMDDLKLFAHTDSQLKELLKITETFSSSIRMEFGVDKCAVMHVKRGEIMESVGTQLTSSINLRALSASETYKYLGMSEALGINVTDMKQSLKERFFGRLKKVLNSLLSGGNKVRAFNGWVMPVLMYSFGILKWTQTELDALDQRVRTLLTANRLHHPRSSVMRLYIPRKCGGRGFLNAKTLHNREVCSLREYFLETDVGMHRDVVAADKGLTPLSLAKENWRKPVVLDTNDRLEVWKSKELHGRFFRALHGPDVDFRASVAWLRFGDLFGETEGFVFAIMDEVMMTNNYRRFIVKDGTVDICRACHRPGESIRHIISGCSRLANGEYLHRHNLVARIIHQQLALKYNLVESEVPYYRYMPDPVLENGHITLYWDRSIITDRTIVANKPDIVLVDRSERRAMIVDITIPHDENLVKAEKDKQIKYLDLAHEVVDMWEVDSAIIVPIVVTANGLIAKSLDQHLRRLSLGSWIKSLIQKAVLLDTARIVRKFLSLEP

SEQ ID NO: 11503 - protein, 1201 aa, Sesamia nonagrioides
MLTRSAARKRARPPSPDSLLSSASPPPVSSPTVSAVTTPAAAVASSSSDEYFSPPTTPPPVRRRGGRRPPDRLGPRGPSASDRVPAPGGSVQRMRWTQSINENVMRSYYGATEGGNNLTAYRVRMLSLFQVLEPAVNVSAQRLSDQVRVIQRNHMLDDVVLDRLRLESRNSHVTPASSLVAVQLNSVSPRPNRVDEEDDDRAISVSPQCIEKLRSALEDAFCEYRSTPPELRPRLPRLPMHKKNKALVCALDSQLSYYLKDSKDLTDTHSILYCGAVAICRVAHVKFPDSDRATRPKSAVPAWQCRIERRIGETRALIGKLTSFREGNTRPRVMRFVRRAFSGTDTSTRDYLFRVTERIDFFKQKIYAWANRIRRYKRRVERYSQNRNFQSDERRVYRAWERSDQGVTDTCLPDDDAMCSFWRNIWSVPVSHTEGSWTRVVERACDPVPEMGAITICPQDVARAVRPLPNWKSPGPDGLHNFWIKWFSGSHARLASQFQTALESGSLPQFLTTGVTHLLHKSGSTAEPKNYRPITCLPTVYKVLTSILKSKINTHIDSNSIMSASQNGCRSGSRGTKELLLIDMAISQQVRRSRKDLSTCWIDYKKAYDSVPHTWLMRVLELYKVDATLRTFLMTCMRTWRTVLRYPGCRNIQRNSEPIRIERGIFQGDSLSPLWFCLALNPLSTLLEDSGLGYRLRRGGQVISHLLYMDDLKLFAHTDSQLKELLKITETFSSSIRMEFGVDKCAVMHVKRGEIMESVGTQLTSSINLRALSASETYKYLGMSEALGINVTDMKQSLKERFFGRLKKVLNSLLSGGNKVRAFNGWVMPVLMYSFGILKWTQTELDALDQRVRTLLTANRLHHPRSSVMRLYIPRKCGGRGFLNAKTLHNREVCSLREYFLETDVGMHRDVVAADKGLTPLSLAKENWRKPVVLDTNDRLEVWKSKELHGRFFRALHGPDVDFRASVAWLRFGDLFGETEGFVFAIMDEVMMTNNYRRFIVKDGTVDICRACHRPGESIRHIISGCSRLANGEYLHRHNLVARIIHQQLALKYNLVESEVPYYRYMPDPVLENGHITLYWDRSIITDRTIVANKPDIVLVDRSERRAMIVDITIPHDENLVKAEKDKQIKYLDLAHEVVDMWEVDSAIIVPIVVTANGLIAKSLDQHLRRLSLGSWIKGLIQKAVLLDTARIVRKFLSLEP

SEQ ID NO: 11504 - protein, 1197 aa, Sesamia nonagrioides
MLTRSAARRARPPSPDSLPSSASPPPVSSTTVSAVTTPAATVASSSSDEYFSPPTTPPPIRRRGGRRPPDCLGPRGPSASDRVPAPDGSVQRMRWTQSINENVMRSYYGATEGGNNLTAYRVRMLSLFQVLEPAVNVSAQRLSDQVRVIQRNHMLDDTVLDRLRNEMQSSRVITHQSHSAEIPPQPTNYADEESNDRVTNVSTQCNEELRNALEAAIREYRFMSAELRPRLPRLPMHNRNRALMAALDAQLSNYFDTCENLTDTHSILYCAAVAACRVAHVKFFSDSRATRPKPVVPAWQHRIERRIGGARALIGKLICFREGNTRPRVMRFVRRAFSGTNTSPQNYMARITERIDFLKQKVYAWANRIRRYKRRVERYTQNRTFQSNQRWVYRDWERPEQGVADTCLPDDDAMCSFWRSIWSVPVSHTEGDWARDVERACDPIPEMGAITICPQDVARAVRLLPNWKSPGPDGLHNFWIKWFPRSHASLASQFQTALVSGSLPQFLTTGITHLLHKSGSTAEPKNYRPITCLPTVYKVLTSILKAKINNHIDSNSIMSVSQNGCRSGSRGTKELLLIDMAISQQVRRSRKDLSTCWIDYKKAYDSVPHTWLMRVLELYKVDTTLRTFLMTCMGQWRTVLRYPGCRNIQRNSEPIRIERGIFQGDSLSPLWFCLALNPLSTLLEDSGLGYRLRRGGQVISHLLYMDDLKLFAPNNLQLKELLKITETFSSAIRMEFGVDKCAVMHIKRGEIVESVGTQLTSSINLRALSASETYKYLGMSEALGINVTDMKQSLKERFFGRLKKVLNSLLSGGNKVRAFNGWVMPVLMYSFGILKWTQTELDALDQRVRTLLTANRLHHPRSSVMRLYIPRKCGGRGFLNAKTLHNREICSLREYFLETDVGMHRDVVVVDKGLTPLSLAKENWRKPVVLDTNDRMEVWKSKELHGRFFRAPHGPDVDLQASVAWLRFGDLFGETEGFVCAIMDEVMMTNNYRRFIVKDGTVDICRACHRPGESIRHIISGCSRLANGEYLHRHNLVARIIHQQLALKYNLVESEVPYYRYMPDPVLENGHITLYWDRSIITDRTIVANKPDIVMVDRSERRAMIVDITIPHDENLVKAEKDKQIKYLDLAHEVVDMWEVDSAIIVPIVVTANGLIAKSLDQHLRRLSLGSWIKGLIQKAVLLDTARIVRKFLSLEP

SEQ ID NO: 11505 - protein, 1197 aa, Sesamia nonagrioides
MLTRSAARRARPPSPDSLLSSASPPPASSATVSAVTTPAAAVASSSSDEYFSPPTTPPPARRRGGRRPPDRLGPRGPSASDRVPAPGGSVQRMRWTQSINENVMRSYYGATEGGNNLTAYRVRMLSLFQVLEPAVNVSAQRLSDQVRVIQRNHMLDDTVLDRLRNEMQSSRIIAHQSQTAEIPPQPTNYADEGSNDRATNVSTQCNEELINALEAAIREYRFTPAELRPRLPRLPMHNRNRALMAALDAQLSDYFDNCEDLTDTHSILYCAAVAACRVAHVKFLSDSRATRPKPVVPAWQHRIERRIGGARALIGKLICFREGNTRPRVMRFVRRAFAGTNISPQNYMARVTERIDFLKQKVYAWANRIRRYKRRVERYTQNRTFQSNERWVYRDWERPEQGVTDTCLPDDDAMCSFWRSIWSVPVSHTEGDWARDVERACDPIPEMGAITICPQDVACAVRPLPNWKSPGPDGLHNFWIKWFPRSHAHLASQFQTALVSGSLPQFLTTGITHLLHKSGSTAEPKNYRPITCLPTVYKVLTSILKTKINKHIDSNSIMSASQNVCKSGSRGTKELLLIDMAISQQVRRSRKDLSTCWIDYRKAYDSVPHTWLMRVLELYKVDATLRTFLMSCMKTWRTVLRYPGCRNIQRNSEPIRIERGIFQGDSLSPLWFCLALNPLSTLLEDSGLGYRLRRGGQVISHLLYMDDLKLFAPNNSQLRELLKITETFSSSIRMEFGVDKCAVMHVKRGEIMESVGTQLTDSINLRALSASETYKYLGMSEALGINVTDMKQSLKERFFGRLKKVLNSLLSGGNKVRAFNGWVMPVLMYSFGILKWTQTELDALDQRVRTLLTANRLHHPRSSVMRLYIPRKCGGRGFLNAKTLHNREVCSLRDYFLVNDVGMHRDVVAADKGLTPLSLAKENWRKPVVLDTNDRMEVWKSKELHGRFFRALHGPDVDLQASVAWLRFGDLFGETEGFVFAIMDEVMMTNNYRRFIVKDGTVDICRACHRPGESIRHIISGCSRLANGEYLHRHNLVARIIHQQLALKYNLVESEVPYYRYTPDPVLENGYITLYWDRSIITDRTIVANKPDIVMVDRSERRAMIVDITIPHDENLVKAEKDKQIKYLDLAHEVVDMWEVDSAIIVPIVVTANGLIAKSLDQHLRRLSLGSWIKGLIQKAVLLDTARIVRKFLSLEP

SEQ ID NO: 11506 - protein, 868 aa, Sesamia nonagrioides
MRFVRRAFSGTDTSTRDYLFRVTERIDFFKQKIYAWANRIRRYKRRVERYSQNRNFQSDERRVYRAWERSDQSVTDTCLPDDDATCSFWRNIWSVPVSHTEGSWTRVVERACDPVPEMGAITICPQDVAHAVRPLPNWKSPGPDGLHNFWIKWFTRSHACLASQFQTALESGSLPQFLTTGVTHLLHKSGSTAEPKNYRPITCLPTVYKVLTSILKSKINTHIDSNSIMSASQNGCRSGSRGTKELLLIDMAISQQVRRSRKDLSTCWIDYKKAYDSVPHTWLMRVLELYKVDATLRTFLMTCMRTWRTVLRYPGCRNIQRNSEPIRIERGIFQGDSLSPLWFCLALNPLSTLLEDSGLGYRLRRGGQVISHLLYMDDLKLFAHTDSQLKELLKITETFSSSIRMEFGVDKCAVMHVKRGEIMESVGTQLTSSINLRALSASETYKYLGMSEALGINVTDMKQSLKERFFGRLKKVLNSLLSGGNKVRAFNGWVMPVLMYSFGILKWTQTELDALDRRVRTLLTANRLHHPRSSVMRLYIPRKCGGRGFLNAKTLHNREICSLREYFLTTDVGMHRDVVAVDKGLTPLSLAKENWRKPVVLDTNDRMEVWKSKELHGRFFTALHGPDVDLQASVAWLRFGDLFGETEGFVCAIMDEVMMTNNYRRFIVKDGTVDICRACHRPGESIRHIISGCSRLANGEYLHRHNLVARIIHQQLALKYNLVESEVPYYRYTPDPVLENDLITLYWDRSIITDRTIVANKPDIVLVDRSERRAMIVDITIPHDENLVKAEKDKQIKYLDLAHEVIDMWEVDSAIIVPIVVTANGLIAKSLDQHLRRLSLGSWIKGLIQKAVLLDTARIVRKFLSLEP

SEQ ID NO: 11507 - protein, 1200 aa, Sesamia nonagrioides
MLTRSAARRARPPSPDSSPSSASPPPVSSPTVNAVMTPAAAVALSSSDEYFSPPTTPPPVRRRGGRRPPDCLGPRGPPASDRAPATGGNVQRMKWTQSINENVMRAYFGATEGGSNLTAYRGRMLSLFQVLEPAVNVSAQRLSDQVRVIQRNHMLDDVVLDRLRLESRNSYVTPASSLVAVQLNSVPSRPNLVDEEDDDEAISVTPQCNEKVRSALEDAFREYRSTPPELRPRLPRLPMHKKNKALVCALDSQLSNYLKDSKDLADTHSILYCGAVAICRVAHVKFPDSDRATRPKPAVPAWQCRIERRIGETRALIGKLMSFREGNTRPRVMRFVRRAFSGTDVSTRDYLLRVTERIDFLKQKIYAWANRIRRYRRRVERYSQNRNFQSDERWVYRAWERSDQGVTDTCLPDDDATRSFWRNIWSVPVSHTEGGWTRDVERACDPVPEMGAITICPQDVARAVRPLPNWKSPGPDGLHNFWIKWFSGSHACLASQFQTALESGSLPQFLTTGITHLLHKSGSTAEPKNYRPITCLPTVYKVLTSILKAKINTHIDSNSIMSASQNGCRNGSRGTKELLLIDMAISQQVRRSRKDLSTCWIDYKKAYDSVPHTWLMRVLELYKVDATLRTFLMTCMSQWRTVLRYPGCRNIQRNSEPIRIERGIFQGDSLSPLWFCLALNPLSTLLEDSGLGYRLRRGGQVISHLLYMDDLKLFAHTNSQLKELLKITETFSSAIRMEFGVDKCAVMHVQRGEIVESVGTQLTGSINLRSLSASETYKYLGMSEALGINVTDMKQSLKERFFGRLKKVLNSLLSGGNKVRAFNGWVMPVLMYSFGILKWTQTELDALDQRVRTLLTANRLHHPRSSVMRLYIPRKCGGRGFLNAKTLHNREVCSLREYFLETDVGMHRDVVAADKGLTPLSLAKENWRKPVVLDTNDRMEVWKSKELHGRFFRALHGPDVDFQASVAWLRFGDLFGETEGFVFAIMDEVMMTNNYRRFIVKDGTVDICRACHRPGESIRHIISGCSRLANGEYLHRHNLVARIIHQQLALKYNLVESEVPYYRYMPDPVLENGHITLYWDRSIITDRTIVANKPDIVLVDRSERRAMIVDITIPHDENLVKAEKDKQIKYLDLAHEVVDMWEVDSSIIVPIVVTANGLIAKSLDQHLRRLSLGSWIKGLIQKAVLLDTARIVRKFLSLEP

SEQ ID NO: 11508 - protein, 1074 aa, Sesamia nonagrioides
MLSLFQVLEPAVNVSAQRLSDQVRVIQRNHMLDDTVLDRLRNEMQSSRIIAHQSQTAEIPPQPTNYADEGSNDRATNVSTQCNEELINALEAAIREYRFTPAEQRPRLPRLPMHNRNRALMAALDAQLSDYFDTCEDLTDTHSILYCAAVAACRVAHVKFPSDSRATRPKPVVPAWQRRIERRIGGARALIGKLICFREGNTRPRVMRFVRRAFADTNISPQNYMARVTERIDFLKQKVYAWANRIRRYKRRVERYTQNRTFQSNERWVYRDWERPEQGVTDTCLSDDDAMCSFWRSIWSVPVSHTEGDWARDVGRACDPIPEMGAITICPQDVACAVRPLPNWKSPGPDGLHNFWIKWFPRSHARLASQFQTALVSGSLPQFLTTGITHLLHKSGSTAEPKNYRPITCLPTVYKVLTSILKTKINKHIDSNSIMSASQNGCKSGSRGTKELLLIDMAISQQVCRSRKDLSTCWIDYRKAYDSVPHTWLMRVLELYKVDATLRTFLMSCMKTWRTVLRYPGCRNIQRNSEPIRIERGIFQGDSLSPLWFCLALNPLSTLLEDSGLGYRLRRGGQVISHLLYMDDLKLFAPNNSQLRELLKITETFSSSIRMEFGVDKCAVMHVKRGEIMESVGTQLTDSINLRALSASETYKYLGMSEALGINVTDMKQSLKERFFGRLKKVLNSLLSGGNKVRAFNGWVMPVLMYSFGILKWTQTELDALDQRVRTLLTANRLHHPRSSVMRLYIPRKCGGRGFLNAKTLHNREVCSLRDYFLVTDVGMHRDVVAADKGLTPLSLAKENWRKPVVLDTNDRMEVWKSKELHGRFFRALHGPDVDFQASVAWLRFGDLFGETEGFVFAIMDEVMMTNNYRRFIVKDGTVDICRACHRPGESIRHIISGCSRLANGEYLHRHNLVARIIHQQLALKYNLVESEVPYYRYTPDPVLENGYITLYWDRSIITDRTIVANKPDIVMVDRSERRAMIVDITIPHDENLVKAEKDKQIKYLDLAHEVVDMWEVDSAIIVPIVVTANGLIAKSLDQHLRRLSLGSWIKGLIQKAVLLDTARIVRKFLSLEP

SEQ ID NO: 11509 - protein, 1200 aa, Apamea monoglypha
MMMLTRSAARRARPPPPDSSLSSASPPPVPSLTVSAVTTPAAVVASSSSDEYFSPPTTPPPARRRGGRRPPDGLGPRGPPASDRVPALGGSVQRMRWTQSINENVMRSYYGTTEGGNNLTAYRVRMLSLFQVLEPAVNVTAQRLSDQVRVIQRNHLLDDTVLDRLRNEMQSSHVIAPQSQTAAVLPQSNTSHADEGSNDRATNVRIQCNEELRNALEGAIREYRFMSPELRPRLPRLPMHNKNRALVAVLDAQLSSYFDVCEDLTDTHSILYCAAVAACRVAHVKFASDSRATRPKPAIPPWQCRIERRIGGARALIGKLICFREGNTRPRVMRFVRRAFSGTDISSQDYLSHVTERIDFLKQKVYAWANRIRRYKRRVDRYTQNRTFQSDERWVYRGWERPDQGVADTCLPDDDAMYSFWRSIWSVPVSHTEGDWAREVERACDPIPEMEAITICAQDVARAVRPLPNWKSPGPDGLHNFWIKWFTRSHARLASQFQIALESGSLPQFLTTGVTHLLHKSASTAEPKNYRPITCLPTVYKVLTSILRAKINKHIDTNSIMSASQNGCKNGSRGTKELLLIDMAISQQVRRSRKDLSTCWIDYKKAYDSVPHTWLMRVLELYKVDTTLRTFLMTCMGQWRTVLRYPGCRNIQRNSEPIRIERGIFQGDSLSPLWFCLALNPLSTLLEDSGLGYRLRRGGQVISHLLYMDDLKLFASNNLQLMELLKITETFSSAIRMEFGVDKCAVMHVKRGEIVESVGTQLSDSTNLRALSASETYKYLGMSEALGINVTDMKQSLKERFFGRLKKVLNSLLSGGNKVRAFNSWVMPVLMYSFGILKWTQTELDALDRRVRTLLTANRMHHPRSSVMRLYIPRKCGGRGFLNAKTLHNREICCLREYFLETDVGMHRDVVAVDKGLTPLSLAKENWRKPVVLDTNDRLEVWQSKELHGRFYRALHGPDVDLLASVAWLRFGDLFGETEGFVCAIMDEVMMTNNYRRFIVKDGTVDICRACHRPGESIRHIISGCSRLANGEYLHRHNLVARIIHQQLALKYSLVESEVPYYRYVPDPVLENGHITLYWDRSIITDRTIVANKPDIVVVDRSERRAMIVDITVPHDENLVKAEKDKQIKYLDLAREVVDMWDVDSAINVPIVVTANGLIAKSLDQHLRRLSLGSWIKGLIQKAVLLDTARIVRRFLSLEP

SEQ ID NO: 11510 - protein, 1198 aa, Apamea monoglypha
MLTRSAARRARLPSPDSSLSSASPPPVPSPTVSAVTTPAAVVASSSSDEYFSPPTTPPPARRRGGRRPPDGLGPRGPLASDRVPAPGGSVQRMRWTRSINENVMRSYYGATEGENNLTAYRVRMLSLFQVLEPAVNVSAQRLSDQVRVIQRNHMLDDTVLDRLRSEMQSSHVIAPQSQTAAVLPQSNTSHADEGSNDRATNVSIQCNEELRNALEGAIREYRFMSPELRPRLPRLPMHNKNRALVAVLDAQLSSHFDACEDLTDTHSILYCAAVAACRVAHVKFDSDSRATRPKPVIPAWQCRIERRIGGARALIGKLICFREGNTRPRVMRFVRRAFLGTDISSQDYLSRVTERIDFLKQKVYAWANRIRRYKRRVERYTQNRTFQSDERWVYRGWERPDQSVADTCLPDDDAMCSFWRSIWSAPVSHTEGDWTGKIERACELIPEMGAITICPQDVARAVRPLPNWKSPGPDGLHNFWIKWFQRSHAPLAAQFQSALESGLLPQFITTGITHLLHKSGSTADPKNYRPITCLPTIYKVLTSILRAKINKHIDSNSIMSVSQNGCRNGSRGTKELLLIDMAISQQVRRSRKDLSTCWIDYKKAYDSVPHTWLMRVLELYKVDTTLRTFLMTCMGQWRTVLRYPGCRNIQRNSEPIRIERGIFQGDSLSPLWFCLALNPLSTLLDDSGLGYRLRRGGQVISHLLYMDDLKLFAPNNLQLMKLLKITETFSSAIRMEFGVDKCAVMHVKRGEIVESVGTQLSDFTNLRALSAAETYKYLGMSEALGINVTDMKQSLKERFFGRLKKVFNSLLSGGNKVRAFNSWVMPVLMYSFGILKWTQTELEALDRRVRTLLTANRMHHPRSSVMRLYIPRKCGGRGFLNAKTLHNREICSLREYFLETDVGMHRDVVAVDKGLTPLSLAKENWRKPVVLDTNDRMEVWQSKELHGRFYRALHGPDVDLLASVAWLRFGDLFGETEGFVCAIMDEVMMTNNYRRYIVKDGTVDICRACHRPGESIRHIITGCSRLANGEYLHRHNLVARIIHQQLALKYSLVESEVPYYRYVPDPVLENGNITLYWDRSIITDRTIVANKPDIVVVDRSERRAMIVDITVPHDENLVKAEKDKQIKYLDLAREVVDMWDVDSAIIVPIVVSANGLIAKSLDQHLRRLSLASWIKGLIQKAVLLDTARIVRRFLSLEP

SEQ ID NO: 11511 - protein, 1048 aa, Apamea monoglypha
MRWTQSINENVMRSYYGATEGGNNLTAYRVRMLSLFQVLEPAVNVTAQRLSDQVRVIQRNHMLDDTVLDRLRNEIQSSHVIAPQSQTAAVLPQSNTSHADEGSNDRATNVSIQCNEELRNALEGAIREYRFMSPELRPRLPRLPMHNKNRALVAVLDAQLSSYFDVCEDLTDTHSILYCAAVAACRVAHVKFVSDSRATRPKPAIPPWQCRIERRIGGARALIGKLICFREGNTRPRVMRFVRRAFSGTDISSQDYLSRVTERIDFLKQKVYAWANRIRRYKRRVDRYTQNRTFQSDERWVYRGWERPDQGVADTCLPDDDAMYSFWRSIWSVPVSHTEGDWAREVERACDPIPEMEAITICAQDVARAVRPLPNWKSPGPDGLHNFWVKWLTRSHARLASQFQIALESGSLPQFLTTGVTHLLHKSASTAEPKNYRPITCLPTVYKVLTSILRAKINKHIDTNSIMSASQNGCKNGSRGTKELLLIDMAISQQVRRSRKDLSTCWIDYKKAYDSVPHTWLMRVLELYKVDTTLRTFLMTCMGQWRTVLRYPGCRNIQRNSEPIRIERGIFQGDSLSPLWFCLALNPLSTLLEDSGLGYRLRRGGQVISHLLYMDDLKLFAPNNLQLMELLKITETFSSAIRMEFGVDKCAVMHVKRGEIVESVGTQLSDSTNLRALSASETYKYLGMSEALGINVTDMKQSLKERFFGRLKKVLNSLLSGGNKVRAFNSWVMPVLMYSFGILKWTQTELDALDRRVRTLLTANRLHHPRSSVMRLYIPRKCGGRGFLNAKTLHNREICSLREYFLETDVGMHRDVVAVDKGLTPLSLAKENWRKPVVLDTNDRMEVWQSKELHGRFYRALHGPDVDLLASVAWLRFGDLFGETEGFVCAIMDEVMMTNNYRRFIVKDGTVDICRACHRPGESIRHIISGCSRLANGEYLHRHNLVARIIHQQLALKYNLVESEVPYYRYVPDPVLENGNITLYWDRSIITDRTIVANKPDIVVVDRSERRAMIVDITVPHDENHVRLPSTAPQNLHLWCTPLQCTRL

SEQ ID NO: 11512 - protein, 1030 aa, Apamea monoglypha
MQSSHVIAPQSQTAAVLPQSNTSHADEGSNDRATNVSIQCNEELRNALEGAIREYRFMSPELRPRLPRLHNKNRALVAVLDAQLSSHFDACEDLTDTHSILYCAAVAACRVAHVKFDSDSRATRPKPAIPAWQCRIERRIGGARALIGKLICFREGNTRPRVMRFVRRAFLGTDISSQDYLSRVTERIDFLKQKVYAWANRIRRYKRRVERYTQNRTFQSDERWVYRCWERPDQDVADTCLPDDDAMCSFWRSIWSAPVSHTEGDWAREVERACDPIPEMEAITICPQDVARAVRPLPNWKSPGPDGLHNFWIKWFTRSHARLASQFQTALESGSLPQFLTTGVTHLLHKSGSTAEPKNYRPITCLPTVYKVLTSILRAKINKHIDTNSIMSASQNGCKNGSRGTKELLLIDMAISQQVRRSRKDLSTCWIDYKKAYDSVPHTWLMRVLDLYKVDATLRTFLMSCMGQWRTVLRYPGRRNIQRNSEPIRIERGIFQGDSLSPLWFCLALNPLSTLLEDSGLGYRLRRGGQVISHLLYMDDLKLFAPNNLQLMELLKVTETFSSAIRMEFGVDKCPVMHVKRGEIVESVGTQLSDSTNLRALSVSETYKYLGMSEALGINVTDMKQSLKERFFGRLKKVLNSLLSGGNKVRAFNSWVMPVLMYSFGILKWTQTELDALDRRVRTLLTANRMHHPRSSVMRLYIPRKCGGRGFLNAKTLHNREICSLREYFLETDVGMHRDVVAVDKGLTPLSLAKENWRKPVVLDTNDRMEVWQSKELHGRFYRALHGPDVDLLASVAWLRFGDLFGETEGFVCAIMDEVMMTNNYRRFIVKDGTVDICRACHRPGESIRHIISGCSRLANGEYLHRHNLVARIIHQQLALKYSLVESEVPYYRYVPDPVLENGNITLYWDRSIITDRTIVANKPDIVVVDRSERRAMIVDITVPHDENLVKAEKDKQIKYLDLAREVVDMWDVDSAVIVPIVVTANGLIAKSLDQHLRRLSLGSWIKGLIQKAVLLDTARIVRRFLSLEP

SEQ ID NO: 11513 - protein, 1196 aa, Furcula furcula
MLTRVKARLRPPDSSPRSASQPPAPSTGDPPAAVASSESDEYFSPPSSPPPVCRRRGRPPRDLGLLGQPAPNRVLVPGGVVRRMKWTLSLNENVMRAYYEATEGGTNLTAYRDRMLSLFQALEPAVNVSAQRLSDQVRAIQRGHMLDDAVLDRLRSEVQGSRVVPCIPSSQAVAPAVNTAPAPRLAATSGDDRDDMSTNISTNVSTQLRSTLEDVVREYRTMPQGLRPRLPRLPMHKRNRALVCALDSLLSSYFDSSEDLADAHSLLYCAAMTACRVARVKFPNSDAATRPRPAVPAWQCRIERRIGEARVLIGKLTCFREGNTRLRVMRFVRRAFSGTGIDPREYFSRVTERIDFLKQKVCAWANRIRRYRARVDRYSQNNKFQRDQRWVYRSWERPSQIGGEVQRPDDDAMIRFWRNIWSVPVTHSEGDWIRDVKQVCEPIPEMGAITIRPQDVADAVRPLPNWKAPGPDGLHNFWLKWLRSSHACLASLFQSAVESGSLPEFLTTGITHLLHKTNSTADPKNYRPITCLPTVYKTLTSILRAKIYRHVEGNSIMSASQNGCRSGARGTKELLLIDMAICQQARRNRKDLSTCWIDYKKAYDSVPHTWLMRVLELYKVNTTLRTFLASCMRQWRTVLLYPGSRQTLGDGEPIRIERGIFQGDSLSPLWFCLALNPLSTLLRGSGLGCRLRRGGQVISHLLYMDDLKLFAPTEPQLMGLLKVTETFSNSIRMRFGVDKCAVMHVKRGRLVESRSVQLSDSTDLRTLSATETYKYLGMSQALGINETDMKQSLRERFLGRLRKVLKSFLSGGNRVRAYNGWVMPVLMYSFGILKWTQTELDTLNRTVRTLLTTYRVHHPRSSVMRLYIPRKCGGRGFLNAKTLHNREICNLREYFLHCSGEMHTDVVAVDNGLTPLSLAKGNWRKPVVLTTGDREAVWQSKELHGRFYRALHGPDVDFSASVAWLRFGDLFGETEGFVCAIMDEVVMTNNYRKYILRDGTIDICRACHRPGESLRHIISGCSRLANGEYLHRHNQVARIIHQQLALKYRLVTSEVPYYRYVPEPVLEDGHITLYWDRSIITDRTIVANKPDIVLIDRTERYAMIVDVTVPHDENLVKAEKDKECKYLDLAHEVVDMWDIDRAIIVPIVVSAHGLMAKSLDKHLKRLTLDGWIKGQMQKAVLLETARIVRKFLSLEP

SEQ ID NO: 11514 - protein, 1196 aa, Furcula furcula
MLTRHKARLRPPDSSPRSASQPPAPSTGGAPAAVASSESDEYFSPPSSPPPVCRQRGRPPRNLGLLGQPAPNRVPVPGGVVRRMKWTHSINENVMRAYYKATEGGTNLTAYRDRMLSLFQTLEPAVNVSAQRLSDQVRAIQRGHMLDDAVLDRLRSEVQGGRVVPCIPSSQAVAPAVNAAPAPRLAANSGDDRDDMSTNISTNVSTQLRSTLEDVVREYRTMPQGLRPRLPRLPMHKRNRALVCALDSLLSSYFDSSEDLADAHSLLYCAAMTACRVARVKFPNSDAATRPRPALPAWQCRIERRIGEARVLIGKLTCFREGNTRPRVMRFVRCAFSGTGIEPREYLSRVTERIDFLKQKVCAWANRIRRYRARVDRYSQNNMFQRDQRWVYKSWERPSQIGVEVLRPDDDAMIRFWRNIWSVPVTHSEGDWIGDVRQVCEPIPEMGAITIRPQDVADAVRPLPNWKAPGPDGLHNFWLKWLRSSHACLASLFQSAVESGSLPEFLTTGITHLLHKTNSTADPKNYRPITCLPTVYKTLTSILRAKIYRHVESNSIMSASQNGCRSGARGTKELLLIDMAICQQARRNRKDLSTCWIDYKKAYDSVPHTWLMRVLELYKVNTTLRTFLASCMRQWRTVLLYPGSRQTLGDGEPIRIERGIFQGDSLSPLWFCLALNPLSTLLKSSGLGYRLRRGCQVISHLLYMDDLKLFAPTEVQLMGLLKVTETFSSSIRMEFGVDKCAVMHVKRGRLVESRSVQLSDSTDLRTLSATETYKYLGMSQALGINETDMKQSLRERFLGRLRKVLKSLLSGGNRVRAYNGWVMPVLMYSFGILKWTQTELDTLDRTVRTLLTAYRMHHPRSSVIRLYIPRKCGGRGFLNAKTLHNREIYNLREYFHHCGGEMHTDVVAVDSGLTPLSLAKGNWRKPVVLTTGDREAVWQSKELHGRFYRALHGPDVDFSASVAWLRFGDLFGETEGSVCAIMDEVVMTNNYRKYILRDGTIDICRACHRPGESLRHIISGCSRLANGEYLHRHNQVARIIHQQLALKYRLVTSEVPYYRYVPEPVLEDGHITLYWDRSIITDRTIVANRPDIVLIDRTERRAMIVDVTVPHDENLVKAEKDKECKYLDLAHEVVDLWDIDKAIIVPIVVSAHGLMAKSLDKHLKRLTLDGWIKGQMQKAVLLETARIVRKFLSLEP

SEQ ID NO: 11515 - protein, 1196 aa, Furcula furcula
MLTRNRAHPRPPDSSPRSASQPLGPSADGSLAAVASSGSDEYFSPPTSPPPVRRRRGRPLRVLGSLEQPAPNRVLAPGGVVRRMRWTSSINENVMRAYYEATERGTNLTAYRLRMLSLFQALEPAVNVSAQRLSDQVRAIQRGHMLDDAVLDRLRSEVQGSRVAPCIPSSQAVAPAVNIVPAPRPATNSDDDRDDMTTDVSTNLNTQLRSTLEDVVREYRTMPLNLRPRLPRLPMHKRNRALVCALDSLLSSYFDSSEDLADAHSLLYCAAMTACRVARVKFPSTDAATRPRPAVPAWQFRIECRIGEARVLIGKLNCFREGNTRPRVMRFVRRAFSGTGIDPREYLSRVTERIDFLKQKVCAWANRIRRYKARVDRYSQNNMFQRDQRWVYRSWERSSQIEGDGRRPDDSAMTTFWRNIWSVPVTHSEGDWMRDVEQICEPLPEMGAITIRPQDVADAVRPMPNWKAPGPDGLHNFWLKWIRSSHICLASLFQSALESGALPEFMTMGITHLLHKTSSTTDPKNYRPITCLPTVYKTLTSILRAKIYRHVEDNSIMSASQNGCRSGARGTKELLLIDMAICQQARRNRKDLSTCWIDYKKAYDSVPHTWLMRVLELYKVNPTLRTFLASCMRQWRTVLLYPGSRQILGNGDPIRIERGIFQGDSLSPLWFCLALNPLSTLLRGSGLGCRLRRGGQVISHLLYMDDLKLFAPTELQLMGLLKVTETFSNSISMEFGVDKCAVMHVKRGRMVESRSVQLLDTTDLRTLSATETYKYLGMSQALGINETDMKQSLRERFLGRLRKVLKSLLSGGNRVRAYNGWVMPVLMYSFGILKWTQTELDTLDRTVRTLLTTYRMHHPRSSVMRLYIPRKCGGRGFLNAKTLHNREICNLREYFLHCGGVMHTDVVAVDNGLTPLSLAKGNWRKPVVLTTGNREAVWQSKELHGRFYRALHGPDVDFSASVAWLRFGDLFGETEGFVCAIMDEVVMTNNYRKYILRDGTIDICRACHRPGESLRHIISGCSRLANGEYLHRHNQVARIIHQQLALKYRLVMSEVPYYRYVPEPVLEDGHITLYWDRSIITDRTIVANKPDIVLIDRNERRAMIVDVTVPHDENLVKAEKDKECKYLDLAHEVVDMWDIDRAIIVPIVVSAHGLMAKSLDKHLKRLTLGGWIKGQMQKAVLLETARIVRRFLSLEP

SEQ ID NO: 11516 - protein, 1196 aa, Furcula furcula
MLTRNRAHPRPPDSSPRSASQPLGPSTDGSLAAVASSGSDEYFSPPTSPPPVRRRRGRPPRVLGSLEQPAPNRVLTPGGVVRRMRWTSSINENVMRAYYEATERGTNLTAYRLRMLSLFQALEPAVNVSAQRLSDQVRAIQRGHMLDDAVLDRLRSEVQGSRVAPCISSSQAVAPAVNIVPAPRPATNSDDDRDDMTTDVSTNLNTQLRSTLEDVVREYRTMPLNLRPRLPRLPMHKRNRALVCALDSLLSSYFDSSEDLADAHSLLYCAAMTACRVARVKFPSTDAATRPRPAVPAWQFRIECRIGEARVLIGKLNCFREGNTRPRVMRFVRRAFSGTGIDPREYLSRVTERIDFLKQKVCAWANRIRRYKARVDRYSQNNMFQRDQRWVYRSWERSSQIEGDGRRPDDSAMTTFWRNIWSVPVTHSEGDWMRDVEQICEPLPEMGAITIRPQDVADAVRPMPNWKAPGPDGLHNFWLKWIRSSHICLASLFQSALESGSLPEFMTMGITHLLHKTSSTTDPKNYRPITCLPTVYKTLTSILRAKIYRHVEDNSIISASQNGCRSGARGTKELLLIDMAICQQARRNRKDLSTCWIDYKKAYDSVPHTWLMRVLELYKVNPTLRTFLASCMRQWRTVLLYPGSRQILGNGDPIRIERGIFQGDSLSPLWFCLALNPLSTLLRGSGLGCRLRRGGQVISHLLYMDDLKLFAPTELQLMGLLKVTETFSNSISMEFGVDKCAVMHVKRGRMVESRSVQLLDTTDLRTLSATETYKYLGMSQALGINETDMKQSLRERFLGRLRKVLKSLLSGGNRVRAYNGWVMPVLMYSFGILKWTQTELDTLDRTVRTLLTTYRMHHPRSSVMRLYIPRKCGGRGFLNAKTLHNREICNLREYFLHCGGVMHTDVVAVDNGLTPLSLAKGNWRKPVVLTTGNREAVWQSKELHGRFYRALHGPDVDFSASVAWLRFGDLFGETEGFVCAIMDEVVMTNNYRKYILRDGTIDICRACHRPGESLRHIISGCSRLANGEYLHRHNQVARIIHQQLALKYRLVMSEVPYYRYVPEPVLEDGHITLYWDRSIITDRTIVANKPDIVLIDRNERRAMIVDVTVPHDENLVKAEKDKECKYLDLAHEVVDMWDIDRAIIVPIVVSAHGLMAKSLDKHLKRLTLGGWIKGQMQKAVLLETARIVRRFLSLEP

SEQ ID NO: 11517 - protein, 1198 aa, Mamestra configurata
MLTRAAAQRARLPPLASSLSSASPPPEPSPTVSAVIPAVAVASSSSDEYFSPPTSPLPARRRRGRRPPDGLGPRGPTASDRVPAPGGSVQRMRWTQTINENVMRSYYGATEGGTNLTAYRGRMLSLFQVLEPAVNVSAQRLSDQVRVIQRNRMLDDAVLDRLRLESRNSRVSAASPPAAVQIQSSVSPRPNNVGEDDDDGAISVSTQCNERLRSALEDAFREYRSTPPELRPRLPRLPMHNKNRALVCALDSQLANCFDSSEDLADTHSILYCAAAAACRVAHVKFPNSDRATRPAVPAWQCRIERRIGEARALIGKLICFREGNTRRRVMRFVRRAFSGTDTSPRDYLTRVTERIDFLKQKIYAWANRIRRYKRRVERYTQNRTFQSNERWVYRAWERPDQGVTDTRLPDDDVMCSFWRNIWSVPVSHTEGDWTREVERACDPIPEMGAITISPQDVARAVRPLPNWKSPGPDGLHNFWIKWFKRSHARLASQFQSALESGSLPQFLTTGITHLLHKSGSTAEPKNYRPITCLPTVYKVLTSILRAKINQHIETNSIMSASQNGCRNRSRGTKELLLIDVAISQQVRRSRRDLSTCWIDYKKAYDSVPHTWLMRVLELYKVDAVLRTFLMSCMGQWRTVLRYPGCRQIQANSDPIRIERGIFQGDSLSPLWFCLALNPLSTLLEGSGQGYRLRRGGQVISHLLYMDDLKLFAPNNLQLMKLLKVTETFSSAISMEFGVDKCAVMHVKRGEIMESVGTQLSDSIHLRSLSSTETYKYLGMSEALGINANDVKQSLKERFFGRLNKVLNSLLSGGNKVRAFNGWVMPVLMYSFGILKWTQTELDALDRRVRSLLTANRMHHPRSSVMRLYIPRKCGGRGFLNAKTLHNREICSLREFFLEADVGMHRDVVAVDKGLTALSLANENWRKPVVLDTNDRREVWQSKELHGRFYRVLHGPDVDFLASVAWLRFGDLFGETEGFVCAIMDEVMMTNNYRKYIVKDGTVDICRACHRPGESIRHIISGCSSLANGDYLHRHNLVARIIHQQLALKYNLVESEVPYYRYVPDPVLENGNCTLYWDRSIITDRTIVANKPDIVVIDRLERRAMIVDIAVPHDVNLVKTEKDKQTKYLDLAREVVDMWDVNTAVIVPIVVTANGIIAKSLDQHLKRLSLGSWIKGLIQKAVLLDTARIVRRFLSQGP

SEQ ID NO: 11518 - protein, 1210 aa, Amphipyra berbera
MTAMLTRSRAKAITQSTRPRSSTPSLSSASQPPDSSIVSDVTPAAAVASSSSDEFFSPPTSPLPPPARRRGRGRPPASIGPRGPPASDRVPAPGGSVQRMRWTLTMNENCMRAYFGATEGGTNLTAYRGRMLSLFQVLEPTVNVSAQRLSDQVRVIQRDHRLTDAALDRLRSEVQSNRIISLQSQTAAQPQAPTVVPPLPIHADEESDDRVTNVSTQCNDQLRSALELAIREYRFTPPNIRPRIPRLPMHRKNRALMCALDSLLSSYFDNSENLEDTHSILYCAAVAACRVAHAKFDNNDRATRPKPAVPAWQCKIERRINEARALIGKLICFREGNTRPRVMRFVRRAFSGTDINPRDYLSRVTERIDFLKQKVYAWANRIRRYKRRVERYTQNRMFHSDERWVYRTWERPDHDVSDTHLPDNDVMNTFWRNIWSMPVTHIEGDWMQEVQRACEPIEEMGDITIVPQDVTSAVRPMANWKSPGPDGLHNFWLKWLRSSHARLASQFQSSLESGSFPEFLTTGVTHLLHKSGSTAEPKNYRPITCLPTVYKLLTSILRAKINSHIINNSIMSVSQNGCKNGSRGTKELLLIDMAISQQVRRSRKDLSTCWIDYKKAYDSVPHTWLMRVLELYKVNTTLCAFLASCMGQWRTVLHYPGCRQIQGRGEPIRIERGIFQGDSLSPLWFCLALNPLSTLLEGSGLGYRLRRGGQVISHLLYMDDLKLFAPNNLQLVKLLKVTETFSNSIRMEFGVDKCAVMHVKRGGIMESVGTQLSDSIHLRSLSSTETYKYLGMPEALGINETDMKQSLRERFYGRLKKVLKSLLSGGNKVRAFNGWVMPVLMYSFGILKWTQTELDALDRRVRTLLTAYRMHHPRSSVMRLYIPRKCGGRGFLNAKTLHNREVCSLREYFLHADVGMHRDVVAVDKGFTPLSLAKENWRKPVVLDTNGRREVWQSKELHGRFYRALHGPDVDFLASVAWLRFGDLFGETEGFVCAIMDEVILTNNYRKYIVKDGTVDICRACHCPGESIRHIISGCSRLANGEYLHRHNLVARIIHQQLALKYNLVDAEVPYYKYVPDPVLENGHITLYWDRSIITDRTIVANKPDIVVIDRSERLAMIVDITVPHDENLVKAEKDKEIKYQDLAHEVVDMWEVDSAVIVPIVVTANGLIAKSLDQHLTRLALGSWIKGLIQKAVLLDTARIVRRFLSLRP

SEQ ID NO: 11519 - protein, 1203 aa, Amphipyra berbera
MLTRARARKQTAHPRSPDSSLSSASQPPESSPPVSAVTPAAAVASSSSDEYYSPPSSPPPVRRRGGARPPACLGPRGQPATNRVPAAGGNVSRMRWTQSINENVMRAYYGATEGGINLTAYRERMLFLFQVLEPAINVSAQRLSDQVRVVQRNRRLDDTVLERLRSEARNSQTVTFPVQAAVQMQPIAVPPRPIHVDGEGVGEAINVSNQCSEELRSALDDAILEFRTTPPEIRPRLPRLPMHGKNRALMCALDSLLSNYFDGSEDLADTHSILYCAAIAACRVAHVKFTENERATRPKPAVPAWQSRIERRIGGARVLIGKLICFREGNNRPRVMRFVRRAFSGTDISPRDYMSRVTERIDFLKQKVYAWANRIRRYKRRVERYTQNRIFQSDQRRVYRAWERPDPGGGDVRLPDDDALSSFWRSIWSVPIAHTEDGWMRDIEQVCEPIAEMEPITITPQDVADAARPLPNWKSPGPDGLHNFWLKWLRSSHARLASQFQSSLESGSLPQFLTTGVTHLLYKSGSTAEPKNYRPITCLPTVYKLLTSILRVKITTHIDNNCIMSASQNGCRKGSRGTKELLLIDMAISQQVRRSQKDLSTCWIDYKKAYDSVPHSWLMRVLELYKINTTLRTFLMSCMRHWRTVLRYPGCRRIRGSGEQIRIERGIFQGDSLSPLWFCLALNPLSTLLEGTGLGYQLRRGGQVISHLLYMDDLKLFAPTDLQLMELLKVTENFSNSIRMEFGVDKCAVMHVKRGRIAESEGIQLPNSVQLRSLSPTETYKYLGMSEALGISETDMRQSLRERFFGRLNKLLKSLLSGGNKVRALNGWVMPVLMYSFGTLKWTQADLDALDRRVRALLTAHRMHHPRSSVMRLYIPRKCGGRGFLNAKTLHNREVYSLREYFLQAEGVMHRDVVAVDKGFTPLALARENWRKPAVLSTNDREVVWQSKELHGRYYRALHGPDVDFSASVSWLRSGNLFGETEGFVCAIMDEVMMTNNYRKYIVKDGTVDICRACHRPGESIRHIVSGCSRLANGEYLHRHNLVARIIHQQLALKYNLVESEVPYYRYVPDPVLENGHATLYWDRSIITDRTIVANKPDIVVIDRSERRTMIVDITVPHDENLVKAEKDKQIKYLDLAHEVVGMWDVDSAVIVPIVVTANGIIAKSLDIHLMRLSLGGWIKGLIQRAVLLDTARIVRRFLSLEP

SEQ ID NO: 11520 - protein, 1111 aa, Amphipyra berbera
MRWTPTMNENCMRAYFGATEGGTNLTAYRGRMLSLFQALEPAVNVSAQRLSDQVRVIQRDHRLTDAALDRLRSEVQSNRIISLQSQNAAQPQVPCMVPPRPNHADEESDDRVTNVSTQCNEQLRSALEHAIREYRFTPPNLRPRIPRLPMNKKNRALMCALDSLLSSYFDNSEGLEDTHSILYCAAVAACRVAHAKFDNNDRDTRPKPAVPAWQCRVECRINEARALIGKLICFREGNTRPRVMRFVRRAFLGTDINPRDYMSRVTERIDFLKQKVYAWANRTRRYKRRVERYTQNRMFHSDERRVYRTWERPDHDVSDTHLPDSDVMNTFWRNIWSMPVTHTEGDWMQEIQRACEPIEEMEDVTIVPQDVTSAVRPMSNWKSPGPDGLHNFWLKWLRSSHARLASQFQSSLESGSLPQFLTTGVTHLLHKSGSTAEPKNYRPITCLPTVYKLLTSILRSKISTHITNNFIMSTSQNGCKNGSRGTKELLLIDMTISQQVRRSRKDLSTCWIDYKKAYDSVPHTWLMRVLELYKVNTTLCAFLTSCMGQWRTVLHYPGCRQIQGRGEPIRIKRGIFQGDSLSPLWFCLALNPLSTLLEGSGLGYRLRRGGQVISHLLYMDDLKLFAPNNLQLVKLLKVTETFSNSIRMEFGVDKCAIMHVKRGGIMESVGTQLSDSIHLRSLSSTETYKYLGMSEALGINVADMKQSLRERFYGRLKKVLKSLLSGGNKVRAFNGWVMPVLMYSFGILKWTQTELDALDRRVRTLLTAYRMHHPRSSVMRLYIPRKCGGRGFLNAKTLHNREVCNLREYFLQADVGMHRDVVAVDKGFTPLSLAKENWRKPVVLDTTGRRDVWQSKELHGRFYRALHGPDVDFLASVAWLRFGDLFGETEGFVCAIMDEVIMTNNYRKYIVKDGTVDICRACHCPGESIRHIISGCSRLANGEYLHRHNLVARIIHQQLALKYNLVDAEVPYYKYVPDPVLENGHITLYWDRSIITDRTIIANKPDIVVIDRSERLTMIVDITVPHDENLVKAEKDKEIKYQDLAHEVVDMWEVDSAVIVPIVVTANGLIAKSLDQHLMRLSLGSWVKGLIQKAVLLDTARIVRKFLSLRP

SEQ ID NO: 11521 - protein, 1202 aa, Amphipyra berbera
MLTRSRTRTTEQRSARPPPPDSPLSSASQPPELGLPVTPAAAASSSSSDEYFSPPTSPRPVRRQGRGRPPNSLGPRGPPAPSRVLAAGGYVQRMKWTQSINENVMRAYYGSTEGGTNLTAYRVRMLTLFQELEPAINVSAQRLSDQVRVIQRNHRLDDAALDRLRLEVQNSRAIPVPSQTAVHQLINVAPPRSDRVDGDEDDGAVTVSSQYNDRLRSALEDAIRECRANPESRPRLPRLPMHNKNRALVCALDSLLASYFESSEDLGDTHSILYCAAVAACRVANVKFNNSERATRPKLAVPAWQCRIERRIDETRALIGKLICFREGNTRPRVMRFVRRAFSGTGISPREYTSRATERIDFLKQKVCAWASRIRRYKRRVERYTQNRMFQCDQRWVYRAWERPDQSVSGGRLPDDDAMSSFWRSIWSVPVIHTEGDWMRDIERTCESIEEMGEIVISPQDVAGAVRPLPNWKSPGPDGLHNFWIKWLRSSHARLASQFQSSLESGSLPQFLTTGVTHLLHKSGSTAEPKNYRPITCLPTVYKLLTSILRSKINTHIGNNSVLSSSQNGCRNGSRGTKELLLIDTAISQQVRRSQKSLSTCWIDYKKAYDSVPHTWLMRVLELYKINTTLRTFLRSCMGQWRTVLRYPGCQPIRGSGEPIRIERGIFQGDSLSPLWFCLALNPLSTLMEGSGLGYPLRRGGQVVSHLLYMDDLKLFAPTKLQLVDLLKVTETFSNSIRMEFGVDKCAVMHVRRGRIMESEGLQLSDSIHLSPLSANDTYKYLGMSEGLGISEADMKQSLRERFFGRLKKVLKSLLSGGNKVRAFNGWVMPVLMYSFGILKWTQTELDALDRRVRTLLTAYRMHHPRSSVMRLYIPRKCGGRGLLNAKTLHNREVCSLREFFLHADAGMHRDVVAVDKGLTPLSLARENWRKPVVLSTNDRREIWQSKELHGRFYRALHGPDVDFLASVSWLRFGDLFGETEGFVCAIMDEVIMTNNYRKYIVKDGTVDICRACHCPGESLRHIISGCSRLANGEYLHRHNQVARIIHQQLALKYNLVESEVPYYRYVPDPVLENGRITLYWDRSIITDRTIVANKPDIVVIDRSERRTMIVDVTIPHDGNLVKAEKDKQIKYLDLAHEVVNMWDVESATIVPIVVTANGLMAKSLDKHLMRLSLGGWIKGLIQKAVLLDTARIVRRFLSLEP

SEQ ID NO: 11522 - protein, 1208 aa, Amphipyra berbera
MLTRSRTKTQDTRTRPRPSASSLSSASQPPDSSIVSDVTPAAAVASSSSDEFYSPPTSPPPPPRRGRRGRGRPPACMGPRGPPASDRVPAPGGSVQRMRWTLTMNENCMRAYFGATEGGTNLTAYRGRMLSLFQVLEPTVNVSAQRLSDQVRVIQRDHRLTDAALDRLRSEVQSNRIISLQSQTAAQPQTPTVVPPLPIHADEESDDRVTNVSTQCNEQLRSALELAIREYRFTPPNIRPRIPRLPMHRKNRALMCALDSLLSSYFDNSENLEDTHSILYCAAVAACRVAHAKFDNNDRATRPKPAVPAWQCRIERRINEARALIGKLICFREGNTRPRVMRFVRRAFSGTDINPRDYLSRVTERIDFLKQKVYAWANRIRRYKRRVERYTQNRMFHSDERWVYRTWERPDHDVSDTHLPDNDVMNTFWRNIWSMPVTHAEGDWMQEVQRACEPIEEMGDITIVPQDVTSAVRPMANWKSPGPDGLHNFWLKWLRSSHARLASQFQSSLESGSLPEFLTTGVTHLLHKSGSTAEPKNYRPITCLPTVYKLLTSILRAKINSHIINNSIMSVSQNGCKNGSRGTKELLLIDMAISQQVRRSRKDLSTCWIDYKKAYDSVPHTWLMRVLELYKVNTTLCAFLTSCMGQWRTVLHYPGCRQIQGRGEPIRIERGIFQGDSLSPLWFCLALNPLSTLLEGSGLGYRLRRGGQVISHLLYMDDLKLFAPNNLQLMKLLKVTETFSNSIRMEFGVDKCAVMHVKRGGIMESVGTQLSDSIHLRPLSSTETYKYLGMSEALGINETDMKQSLRERFYGRLKKVLKSLLSGGNKVRAFNGWVMPVLMYSFGILKWTQTELDALDRRVRTLLTAYRMHHPRSSVMRLYIPRKCGGRGFLNAKTLHNREVCSLREYFLQADVGMHRDVVAVDKGFTPLSLAKENWRKPVVLDTNGRREVWQSKELHGRFYRALYGTDVDFLASVAWLRFGDLFGETEGFVCAIMDEVMMTNNYRKYIVKDGTVDICRACHCPGESIRHIISGCSRLANGEYLHRHNLVARIIHQQLALKYNLVDAEVPYYKYVPDPVLENGHITLYWDRSIITDRTIVANKPDIVVIDRSERLTMIVDITVPHDENLVKAEKDKEIKYQDLAHEVVDMWEVDSAVIVPIVVTANGLIAKSLDQHLTRLALGSWVKGLIQKAVLLDTARIVRRFLSLRP

SEQ ID NO: 11523 - protein, 961 aa, Noctua janthe
MHNKNRALVAVLDSQLSNYFDNCEDLTDAHSILYCAAVTACRVAHVKFSDDRATRPKPAVPAWQYRIERRIDGARALIGKLICFREGNTRPRVMRFVRRAFSGTDISPRDYMSRVTERIDFLKQKVYAWANRIRRYKRRVDRYTQNRTFQRDERWVFRAWERPDQGVADTRLPDDDAMCSFWRSIWSVPVSHTEGEWTRRVERACDLVPEMGAINISPQDVVRAVRPLPNWKSPGPDGLHNFWIKWFTRSHARLAILFQSALESGSLPEFLTTGITHLLHKSGSTAEPKNYRPITCLPTVYKVLTSILRAKINKHIDDNSVMSASQNGCRNGSRGTKELLLIDMAISQQVRRSRKDLSTCWIDYKKAYDSVPHTWLMRVLELYKIDATLRTFLMLCMGQWRTVLRYPGCRQIQRNSEPIRIERGIFQGDSLSPLWFCLALNPLSTLLEDSGLGYRLRRGGQVISHLLYMDDLKLFAPNDLQLMELLKVTETFSSAIRMEFGVDKCAVMHVKRGEIVESVGTQLSDSINLRSLSATETYKYLGMSEALGINVADMKQSLKERFFGRLKKVFNSLLSGGNKVRAFNGWVMPVLMYSFGILKWTQTELDALDRRVRTLLTAYRMHHPRSSVMRLYIPRRCGGRGFLNAKTLHNREICSLREYFLETDVGMHRDVVAVDKGLTPLSLAKENWRKPVVLDTNDRMEVWHSKELHGRFFRALHGPDVDLSASVAWLRSGDLFGETEGFVCAIMDEVMMTNNYRRFIVKDGTVDICRACHRPGESIRHIISGCSRLANGEYLHRHNLEARIIHQQLALKYNLVESEEPYYKYVPDPVLENGSITLYWDRSIITDRTIVANKPDIVVVDRSERRAMIVDITVPHDENLVKAEKDKQIKYLDLAREVVDMWDVDSAIIVPIVVSAHGLIAKSLDQYLRRLSLGSWIKGLIQKAVLLDTARIVRRFLSLEP

SEQ ID NO: 11524 - protein, 1197 aa, Noctua janthe
MLTRSATRRARLSPPDPSLSSASPPPESSPIVSAVTPAVAVASSSSDEYFSPPTTPPPVRRRGGRRPPDGLGPRGPPASDRVPAPGGSVPRMRWTQSINANVMRAYYGATEGGNNLTAYRVRMLSLFQVLEPAVNVSAQRLSDQVRVIQRNGMLDDTVLDRLRTEMQSSHVIATPPQTVVPPQSAIIPTHDNNVSNDMVTNVSTQCNEEMRCALEGAIREYRFMQPDLRPRVPRLPMHNKNKVLVAVLDSQLSNYFDNCENLTDAHSVLYCAAVAACRVAHVKFSDDRATRPKPAVPSWQYRIERRIGEARALIGKLICFREGNTRPRVMRFVRRAFSGTDISARDYMSRVTERIDFLKQKVYAWANRIRRYKRWVDRYTQNRTFQRDERWVYRAWERPDQDVADTRLPDDDAMCSFWRSIWSVPVSHTEGEWTREVERACDLVPEMGAITISPQDVVRAVRPLPNWKSPGPDGLHNFWIKWFTRSHARLAILFQSALESGSLPEFLTTGITHLLHKSGSTAEPKNYRPIACLPTVYKVLTSILRAKINKHIDDNSVMSASQNGCRNGSRGTKELLLIDMAISQQVRRSRRDLSTCWIDYKKAYDSVPHTWLMRVLELYKVDSTLRIFLMSCMGQWRTVLRYPGCRQIQRNSEPIRIERGIFQGDSLSPLWFCLALNPLSTLLEDSGLGYRLRRGGQVISHLLYMDDLKLFAPNDLQLMELLKVTETFSSAIRMEFGVDKCAVMHVKRGEIVESVGTQLSDSINLRSLSATETYKYLGMSEALGINVADMKQSLKERFFGRLKKVFNSLLSGGNKVRAFNGWVMPVLMYSFGILKWTQTELDALDRRVRTLLTTYRMHHPRSSVMRLYIPRRCGGRGFLNAKTLHNREICSLREYFLETDVGMHRDVVTVDKGLTPLSLAKENWRKPVVLDTNDRMEVWQSKELYGRFLRALHGPDVDLPASVAWLRSGDLFGETEGFVCAIMDEVMMTNNYRRFIVKDGTVDICRACHRPGESIRHIISGCSRLANGEYLHRHNLVARIIHQQLALKYNLVESEVPYYKYVPDPVLENGNITLYWDRSIVTDRTIVANKPDIVVVDRSERRAMIVDITVPHDGNLVKAEKDKQIKYLDLAHEVVDMWDVDSAIIVPIVVSAHGLIAKSLDQYLRRLSLGSWIKGLIQKAVLLDTARIVRRFLSLEP

SEQ ID NO: 11525 - protein, 1197 aa, Noctua janthe
MLTRSATRRARLSPPDPSLSSASPPPESSPIVSAVTPAVAVASSSSDEYFSPPTTPPPVRRRGGRRPPDGLGPRGPPASDRVPAPGGSVPRMRWTQSINANVMRAYYGATEGGNNLTAYRVRMLSLFQVLEPAVNVSAQRLSDQVRVIQRNGMLDDTVLDRLRTEMQSSHVIATPPQTVVPPQSTIIPTHDNNVSNDMVTNVSTQCNEEMRCALEGAIREYRFMQPDLRPRVPRLPMHNKNKVLVAVLDSQLSNYFDNCENLTDAHSVLYCAAVAACRVAHVKFSDDRATRPKPAVPSWQYRIERRIGEARALIGKLICFREGNTRPRVMRFVRRAFSGTDISARDYMSRVTERIDFLKQKVYAWANRIRRYKRRVDRYTQNRTFQRDERWVYRAWERPDQGVADTHLPNDDAMCSFWRSIWSVPVSHTEGEWTREVERACDLVPEMGAITISPQDVVRAVRPLPNWKSPGPDGLHNFWIKWFTRSHARLAILFQSALESGSLPEFLTTGITHLLHKSGSTAEPKNYRPIACLPTVYKVLTSILRAKINKHIDDNSVMSASQNGCRNGSRGTKELLLIDMAISQQVRRSRRDLSTCWIDYKKAYDSVPHTWLMRVLELYKVDSTLRIFLMSCMGQWRTVLRYPGCRQIQRNSEPIRIERGIFQGDSLSPLWFCLALNPLSTLLEDSGLGYRLRRGGQVISHLLYMNDLKLFAPNDLQLMELLKVTETFSSAIRMEFGVDKCAVMHVKRGEIVESVGTQLSDSINLRSLSATETYKYLGMSEALGINVADMKQSLKERFFGRLKKVFNSLLSGGNKVRAFNGWVMPVLMYSFGILKWTQTELDALDRRVRTLLTTYRMHHPRSSVMRLYIPRRCGGRGFLNAKTLHNREICSLREYFLETDVGMHRDVVAVDKGLTPLSLAKENWRKPVVLDTNDRMEVWQSKELHGRFFRALHGPDVDLPASVAWLRSGDLFGETEGFVCAIMDEVMMTNNYRRFIVKDGTVDICRACHRPGESIRHIISGCSRLANGEYLHRHNLVARIIHQQLALKYNLVESEVPYYKYVPDPVLENGNITLYWDRSIVTDRTIVANKPDIVVVDRSERRAMIVDITVPHDGNLVKAEKDKQIKYLDLAHEVVDMWDVDSAIIVPIVVSAHGLIAKSLDQYLRRLSLGSWIKGLIQKAVLLDTARIVRRFLSLEP

SEQ ID NO: 11526 - protein, 1186 aa, Noctua janthe
MVKLRIMFHELKHSFQSSPIVSAVTPAVAVASSSSDEYFSPPTTPPPVRRRGGRRPPDGLGPRGPPASDRVPAPGGSVPRMRWTQSINANVMRAYYGATEGGNNLTAYRVRMLSLFQVLEPAVNVSAQRLSDQVRVIQRNGMLDDTVLDRLRTEMQSNHVIATPPQTVVPPQSTIIPTHDNNVSNDMVTNVSTQCNEEMRCALEGAIREYRFMQPDLRPRVPRLPMHNKNKVLVAVLDSQLSNYFDNCENLTDAHSVLYCAAVAACRVAHVKFSDDRATRPKPAVPSWQYRIERRIGEARALIGKLICFREGNTRPRVMRFVRRAFSGTDISARDYMSRVTERIDFLKQKVYAWANRIRRYKRRVDRYTQNRTFQRDERWAYRAWERPDQGVADTHLPDDDAMCSFWRSIWSVPVSHTEGEWTREVERACDLVPEMGAITISPQDVVRAVRPLPNWKSPGPDGLHNFWIKWFTRSHARLAILFQSALESGSLPEFLTTGITHLLHKSGSTAEPKNYRPIACLPTVYKVLTSILRAKINKHIDDNSVMSASQNGCRNGSRGTKELLLIDMAISQQVRLSRRDLSTCWIDYKKAYDSVPHTWLMRVLELYKVDSTLRIFLMSCMRQWRTVLRYPGCRQIQRNSEPIRIERGIFQGDSLSPLWFCLALNPLSTLLEDSGLGYRLRRGGQVISHLLYMDDLKLFAPNDLQLMELLKVTETFSSAIRMEFGVDKCTVMHVKRGEIVESVGTQLSDSINLRSLSATETYKYLGMSEALGINVADMKQSLKERFFGRLKKVFNSLLSGGNKVRAFNGWVMPVLMYSFGILKWTQTELDALDRRVRTLLTTYRMHHPRSSVMRLYIPRRCGGRGFLNAKTLHNREIYSLREYFLETDVGMHRDVVAVDKGLTPLSLAKENWRKPVVLDTNDRMEIWQSKELHGRFFRALHGPDVDLPASVAWLRSGDLFGETEGFVCAIMDEVMMTNNYRRFIVKDGTVDICRACHRPGESIRHIISGCSRLANGEYLHRHNLVARIIHQQLALKYNLVESEVPYYKYVPDPVLENGNITLYWDRSIVTDRTIVANKPDIVVVDRSERRAMIVDITVPHDGNLVKAEKDKQIKYLDLAHEVVDMWDVDSAIIVPIVVSAHGLIAKSLDQYLRRLSLGSWIKGLIQKAVLLDTARIVRRFLSLEP

SEQ ID NO: 11527 - protein, 1048 aa, Mythimna ferrago
MLDDTVLDRLRTEMSDRVITPPSQPVVPAVVPPSSYISFHTDEVSSDTVTNVSNQCNSELRSALECAIREYRNIPPELRPRIPRLPMCNKNRALVAALDSQLSNYFDDCEDLTDTHSIMYCAAVAACRVAHVKFPNSDVATRPKPAVPAWQCRIERRIGGARALIGKLICFREGNTRPRVMRFVRRAFSGTDISPRDYMSRVTERIDFLKQKVYAWANRIRRYKRRVERYTQNRTFRSNERWVYSAWERPDQGVTDARLPDDDAMSSFWRSIWSVPVSHTEGDWTREVERACDPIPQMGAIDISPQDVARAVRPLPNWKSPGPDGLHNFWIKWFTRSHARLAYQFQSALESGSLPQFLTTGITHLLHKSGSTAEPKNYRPITCLPTVYKVLTSILRSKINSHIDENSIMSPSQNGCRNGSRGTKELLLIDMTISQQVRRFRKDLSTCWIDYRKAYDSVPHTWLMRVLELYKIDTTLRTFLMSCMRQWSTVLRYPGCRNIQRNSEPVRIERGIFEGDSLSPLWFCLALNPLSTLLENSGLGYRLKRGGQVISHLLYMDDLKLFAPNNLQLMELLKVTEIFSSAIRMEFGVDKCAVMHVKRGEVMESVSTQLTDSINLRSLSPTETYKYLGMSEALGISITGMKQSLRERFFGRLKKVFNSLLSGGNKVRAFNGWVMPVLMYSFGVLKWTQTELDALDRRVRTLLTAYRMHHPRSSVMRLYIPRKCGGRGFLNAKTLHNREVCSLREYFLAADVGMHRDVVAVDKGLTPLSLANKNWRKPIVLDTNDRREVWQSKELHGRFFRALHGPDVDQLASVAWLRFGDLFGETEGFVCAIMDEVIMTNNYRRFIVKDGTVDICRACHRPGESIRHIISGCSRLDNGEYLHRHNLVARIIHQQLALKYSLVESEVPYYRYEPDPVLDNGHITLYWDRPLITDRTIVANKPDIVVVDRSERRAMIVDISVPHDENLVKAEKDKQIKYIDLAREVVDMWEVDSAVIVPIVVSANGLIAKSLDQHLRRLSLGDWIKGLIQKAVLLDTARIVRRFLSLEP

SEQ ID NO: 11528 - protein, 1134 aa, Mythimna ferrago
MLTRAAARRARPPPPASSLSSASPPPEPSPIVSAVTPAVAAASSSSDEYYSPPTTPPPTRRRGGRRPPDCLGPRGPPASDRVPAPGGSVQRMRWTQSINENVMRSYYGATEGGNNLTAYRVRMLSLFQVLEPAVNVSAQRLSDQVRVILRNHMLDDTVLDRLRTEMSDRVITPPSQPVVPAVVPPSSYISFHTDEVSSDTVTNVSNQCNSELRSALECAIREYRNIPPELRPRIPRLPMCNKNRALVAALDSQLSNYFDDCEDLTDTHSIMYCAAVAACRVAHVKFPNSDVATRPKPAVPAWQCRIERRIGGARALIGKLICFSNERWVYRAWERPDQGVTDARLPDDDAMSSFWRSIWSVPVSHTEGDWTREVERACDPIPQMGAIDISPQDVARAVRPLPNWKSPGPDGLHNFWIKWFTRSHARLAYQFQSALESGSLPQFLTTGITHLLHKSGSTAEPKNYRPITCLPTVYKVLTSILRSKINSHIDENSIMSPSQNGCRNGSRGTKELLLIDMTISQQVRRSRKDLSTCWIDYRKAYDSVPHTWLMRVLELYKIDTTLRTFLMSCMRQWSTVLRYPGCRNIQRNSEPVRIERGIFQGDSLSPLWFCLALNPLSTLLENSGLGYRLKRGGQVISHLLYMDDLKLFAPNNLQLMELLKVTEIFSSAIRMEFGVDKCAVMHVKRGEVVESVSTQLTDSINLRSLSPTETYKYLGMSEALGISITGMKQSLRERFFGRLKKVFNSLLSGGNKVRAFNGWVMPVLMYSFGVLKWTQTELDALDRRVRTLLTAYRMHHPRSSVMRLYIPRKCGGRGFLNAKTLHNREVCSLREYFLAADVGMHRDVVAVDKGLTPLSLANEKWRKPIVLDTNDRREVWQSKELHGRFFRALHGPDVDQLASVAWLRFGDLFGETEGFVCAIMDEVIMTNNYRRFIVKDGTVDICRACHRPGESIRHIISGCSRLANGEYLHRHNLVARIIHQQLALKYSLVESEVPYYRYEPDPVLDNGHITLYWDRPIITDRTIVANKPDIVVVDRSERRAMIVDISVPHDENLVKAEKDKQIKYIDLAREVVDMWEVDSAVIVPIVVSANGLIAKSLDQHLRRLSLGDWIKGLIQKAVLLDTARIVRRFLSLEP

SEQ ID NO: 11529 - protein, 868 aa, Mythimna ferrago
MRFVRRAFSGTDISPRDYMSRVTERIDFLKQKVYAWANRIRRYKRRVERYIQNSTFRSNERWVYRAWERPDQGVTDTRPPDDDAMCSFWRNIWSVPVSHTEGGWTREVERACESVTEMGAITISPQDVARAVRPLPNWKSPGPDGLHNFWIKWLQRSHARLASQYQATLESGSLPEFLTTGVTHLLHKSGSTAEPKNYRPITCLPTVYKVLTSILRAKINHHVDNNAIMSASQNGCRNGSRGTKELLLIDMAISQQVRRSRKDLSTCWIDYKKAYDSVPHTWLMRVLELYKVDATLRTFLMSCMRQWKTVLRYPGCRNIQRNSEPVRIERGIFQGDSLSPLWFCLALNPLSTLLENSGLGYRLKRGGQVISHLLYMDDLKLFAPNNLQLMELLKVTETFSSAIRMEFGVDKCAVMHIKRGEIVESVGIQLSDSIHLRSLSPTETYKYLGMSEALGINATDMKQSLRERFFGRLKKVLNSLLSGGNKVRAFNGWVMPVLMYAFGVLKWTQTELDALDRRVRTLLTAYRMHHPRSSVMRLYIPRKCGGRGFLNAKSLHNREVCSLREYFLAADGGMHRDVVAVDKGLTPLSLANENWRKPVVLDTNVRREVWQSKELHGRFFRALHGPDVDQLASVAWLRVGDLFGETEGFVCAIMDEVIMTNNYRRFIVKDGTVDICRACHRPGESIRHIISGCSRLANGEYLHRHNLVARIIHQQLALKYSLVESEVPYYRYVPDPVLDSGDITLYWDRSIITDRTIVANKPDIVVVDRSERRAMIVDISVPHDENLAKAEKDKQIKYIDLAREVVDMWEVDSAIIVPIVVSANGLIAKSLDQHLRRLSLGDWIKGLIQKAVLLDTARIVRRFLSLEP

SEQ ID NO: 11530 - protein, 930 aa, Mythimna ferrago
MYCAAVAACRVAHVKFPNSDVATRPKPAVPAWQCRIERRIGGARALIGKLICFREGNTRPRVMRFVRRAFSGTDISPRDYMSRVTERIDFLKQKVYAWANRIRRYKRRVERYTQNRTFRSNERWVYRAWERPDQGVTDARLPDDDAMSSFWRSIWSVPVSHTEGDWTREVERACDPIPQMGAIDISPQDVARAVRPLPNWKSPGPDGLHNFWIKWFTRSHARLAYQFQSALESGSLPQFLTTGITHLLHKSGSTAEPKNYRPITCLPTVYKVLTSILRSKINSHIDENSIMSPSQNGCRNGSRGTKELLLIDMTISQQVRRSRKDLSTCWIDYRKAYDSVPHTWLMRVLELYKIDTTLRTFLMSCMRQWSTVLRYPGCRNIQRNSEPVRIERGIFQGDSLSPLWFCLALNPLSTLLENSGLGYRLKRGGQVISHLLYMDDLKLFAPNNLQLMELLKVTEIFSSAIRMEFGVDKCAVMHVKRGEVVESVSTQLTDSINLRSLSPTETYKYLGMSEALGISITGMKQSLRERFFGRLKKVFNSLLSGGNKVRAFNGWVMPVLMYSFGVLKWTQTELDALDRRVRTLLTAYRMHHPRSSVMRLYIPRKCGGRGFLNAKTLHNREVCSLREYFLAADVGMHRDVVAVDKGLTPLSLANENWRKPIVLDTNDRREVWQSKELHGRFFRALHGPDVDQLASVAWLRFGDLFGETEGFVCAIMDEVIMTNNYRRFIVKDGTVDICRACHRPGESIRHIISGCSRLANGEYLHRHNLVARIIHQQLALKYSLVESEVPYYRYEPDPVLDNGHITLYWDRPIITDRTIVANKPDIVVVDRSERRAMIVDISVPHDENLVKAEKDKQIKYIDLAREVVDMWEVDSAVIVPIVVSANGLIAKSLDQHLRRLSLGDWIKGLIQKAVLLDTARIVRRFLSLEP

SEQ ID NO: 11531 - protein, 1200 aa, Mythimna ferrago
MLTRSRARQQQTHPTSSDSSFSSASQPPGPAPAVSPVIPVAAVASSSSDEYFSPPTTPPPARRRGRGRPPACLGPRGPPASGGVPAAGGSVQRMRWTQSINENVMRSYFGATEGGTNLTAYRGRMLSLFQVLEPAVNVSAQRLSDQVRVIQRNRMLDDAVLDRLRLESRNGRVSPVSPPAAVQLQPSVSPRPDHVGEDDDDGAISVSTQCNARLRSALEDAFREYRSIPPELRPRLPRLPMHRKNRALVCALDSQLSNCFDSSEDLTDTHSILYCAAAAACRVAHVKIRNSDRATRPAKPAWQCRIERRIGEARALIGKLICFREGNTRPRVMRFVRRAFSGTDVSPRDYLPRITERIDFLRQKVYAWANRIRRYKRRVERYTQNRAFQSNERWVYRAWVRPDQSVIDTRLPDDDAMYSFWRSIWSVPVSHTEGDWTRGVERECELIPEMGAITISPQDVARAVRPLPNWKSPGPDGLHNFWLKWFKSSHARLASQFQSALESGSLPQFLTTGLTHLLHKSGSTAEPKNYRPITCLPTVYKVLTSILRAKINSHIETNSIMSASQNGCRNGSRGTKELLLIDVAISQQVRRSRRDLSTCWIDYKKAYDSVPHTWLMRVLELYKIDVTLRTFLMSCMGQWRTVLHYPGCRRVSENSEPLRIERGIFQGDSLSPLWFCLALNPLSTLLEGSGLGYRLRREGQVISHLLYMDDLKLFASNNLQLMELLKVTETFSSAIRMEFGLDKCAVMHVKRGEIMESVGTQLSDSIHLRSLSSTETYKYLGMSEALGINAADVKQSLRERFFCRLNKVLKSLLSGGNKVRAFNGWVMPVLMYSFGILKWTQTELDALDRRVRTLLTANRMHHPRSSVMRLYIPRKCGGRGFLNAKTLHNREVCSLREYFLETDVGMHRDVVAVDKGLTPLSLASENWRKPIVMDTNERKEVWKGKELHGRFYRALHGPDVDLLASVSWLRFGNLFGETEGFVFAIMDEVMMTNNYRKYIVKDGTVDICRACHRPGESIRHIISGCSHLANGDYLHRHNLVARIIHQQLALKYNLVESEIPYYRYVPDPVLENGSVTLYWDRSIITDRTIVANKPDIVVIDRLERRTMIVDIAVPHDENLVKAEKDKQTKYLDLAREVVDMWEVDRAIIVPIVVTANGLIAKSLDQHLRRLSLGSWIKGLIQKAVLLDTARIVRRFLSQEP

SEQ ID NO: 11532 - protein, 1200 aa, Mythimna ferrago
MLTRAAARRARPPPPASSLSSASLPPEPSLTVSAVTPAAAAASSSSDEYYSPPTTPPPARRRGGRRPPACLGPRGPPVSDRVPAAGGSVPRMRWTQSTNENVMRAYYGATEGGNNLTAYRVRMLSLFQVLEPAVNVSAQRLSDQVRVIQRNHMLDDTVLDRLRTEMSNRVITPPSQPVVPVVVPQSSHISLHTDEVSTDTVTNVSTQCNNELRSALECAIREYRNMPLELRPRLPRLPMHNKNKALVAALDSQLSNYFDDCEDLTDTHSIMYCAAVAACRVAHVKFPNSDVATRPKPAVPAWQCRIERRIGGARALIGKLICFREGNTRPRVMRFVRRAFSGTDISPRDYMSRVTERIDFLKQKVYAWANRIRRYKRRVERYIQNGTFRSNERWVYRAWERPDQGVTDTRLPDDDAMCSFWRNIWSVPVSHTEGGWSREVERACESITEMGAITISPQDVARAVRPLPNWKSPGPDGLHNFWIKWLQRSHARLASQYQTALESGSLPEFLTTGVTHLLHKSGSTAEPKNYRPITCLPTVYKVLTSILRAKINHHVDNNAIMSASQNGCRNGSRGTKELLLIDMAISQQVRRSRKDLSTCWIDYKKAYDSVPHTWLMRVLELYKVDATLRTFLMSCMRQWRTVLRYPGCRNIQRNSEPVRIERGIFQGDSLSPLWFCLALNPLSTLLENSGLGYRLKRGGQVISHLLYMDDLKLFAPNNLQLMELLKVTGTFSSAIRMEFGVDKCAVMHIKRGEIVESVGIQLSDSIHLRSLSPTETYKYLGMSEALGINATDMKQSLRERFFGRLKKVLNSLLSGGNKVRAFNGWVMPVLMYAFGVLKWTQTELDALDRRVRTLLTAYRMHHPRSSVMRLYIPRKCGGRGFLNAKSLHNREVCSLREYFLAADGGMHRDVVAVDKGLTPLSLANENWRKPVVLDTNVRKEVWQSKELHGRFFRALHGPDVDQLASVAWLRVGDLFGETEGFVCAIMDEVIMTNNYRRFIVKDGTVDICRACHRPGESIRHIISGCSRLANGEYLHRHNLVARIIHQQLALKYSLVGSEVPYYRYVPDPVLDNGDITLYWDRSIITDRTIVANKPDIVVVDRSERRAMIVDISVPHDENLAKAEKDKQIKYIDLAREVVDMWEVDSAIIVPIVVSANGLIAKSLDQHLRRLSLGDWIKGLIQKAVLLDTARIVRRFLSLEP

SEQ ID NO: 11533 - protein, 1057 aa, Mythimna ferrago
MGTGCRHRVNLYITKKSHQSYLQSPPVRFFNNNNVAPVMVPPSNHVANPADEESTDMVIEVSTQCTNELRSALECAIREYRNMPSVLRPRLPRLPMHNKNKALVAALDMQLSNYFDNCKDLTDTHSIMYCAAVAACRVAHVKFPNSDVATRPKPAVPAWQCRIERRIGGARALIGKLICFREGNTRPRVMRFVRRAFSGTDISPRDCMPRVTERIDFLKQKVYAWANRIRRYKRRVERYTQNRAFQSNERWVYRAWERPDQGVTDTRLPDDDAMCSFWRNIWSVPVSHTEGSWTGEVERACESITEMGAITISPQDVARAVRPLPNWKSPGPDGLHNFWIKWLQRSHARLASQYQAALESSSLPEFLTTGVTHLLHKSGSTAEPKNYRPITCLPTVYKVLTSILRDKINNHIDNNSIMSASQNGCRKGSRGTKELLLIDMAISQQVRRSRKDLSTCWIDYKKAYDSVPHTWLMRVLELYKVDATLRTFLMSCMRQWRTVLHYPGCRNIQRNSEPVRIERGIFQGDSLSPLWFCLALNPLSTLLENSGLGYRLKRGGQVISHLLYMDDLKLFAPNNLQLMELLKVTETFSSAIRMEFGVDKCAVMHIKPGEIVESAGTQLSDSIHLRSLSSTETYKYLGMSEALGINATVMKQSLKERFFGRLKKVLNSLLSGGNKVRAFNGWVMPVLMYAFGVLKWTQTELDALDRRVRTLLTAYRMHHPRSSVMRLYIPRKCGGRGFLNAKTLHNREVCSLREYFLAADVGMHRDVVAVDKGLTPLSLANENWRKPVVLDTNVRKEVWQSKELHGRFFRALHGPDVDKLASVAWLRVGDLFGETEGFVCAIMDEVIMTNNYRRFIVKDGTVDICRACHRPGESIRHIISGCSRLANGEYLHRHNLVARIIHQQLALKYSLVESEVPYYRYVPDPVLDNGDITLYWDRSIITDRTIVANKPDIVVVDRSERRAMIVDISVPHDENLVKAEKDKQIKYIDLAREVVDMWEVDSAIIVPIVVSANGLIAKSLDQHLRRLSLGDWIKGLIQKAVLLDTARIVRRFLSLEP

SEQ ID NO: 11534 - protein, 1198 aa, Mythimna ferrago
MLTRAAARRARLPAPASPLSSASPPPEPSPTVSAVTPAVAAASSSSDEYYSPPTTPPPTRRRGGRRPPACLGSRGPPASERVPATGGCVSRMRWTQSINENVMRAYFGATEGGNNLTAYRVRMLSLFQVLEPAVNVSAQRLSDQVRVIQRNHMLDDTVLDRLRTEMGSHAVTSSSQTVVPPQVSNHLSINADEEITDMVTHVSTQCNNELRSALECAIREYRNIPPELRPRIPRLPMCNKNRALVAALDSQLSNYFDDCEDLTDTHSIMYCAAVAACRVAHVKFPNTDVATRPKPAVPAWQCRIERRIGGARALIGKLICFREGNTRPRVMRFVRRAFSGTDISPRDYMSRVTERIDFLKQKVYAWANRIRRYKRRVERYIQNSTFRSNERWVYRTWERPDQGVTDTHLPDDDAMCSFWRNIWSVPVSHTEGGWTREVERACESITEMGAITISPQDVARAVRPLPNWKSPGPDGLHNFWIKWLQRSHARLASQYQTALESGSLPEFLTTGVTHLLHKSGSTAEPKNYRPITCLPTVYKVLTSILRAKINNHVDNNAIMSASQNGCRNGSRGTKELLLIDMAISQQVRRSRKDLSTCWIDYKKAYDSVPHTWLMRVLELYKVDATLCTFLMSCMRQWRTVLRYPGCRNIQRNSEPVRIERGIFQGDSLSPLWFCLALNPLSTLLENSGLGYRLKRGGQVISHLLYMDDLKLFAPNNLQLMELLKVTETFSSAIRMEFGVDKCAVMHIKRGEIVESVGTQLSDSIHLRSLSPTETYKYLGMSEALGINATDMKQSLKERFFGRLKKVLNSLLSGGNKVRAFNGWVMPVLMYAFGVLKWTQTELDALDRKVRTLLTAYRMHHPRSSVMRLYIPRKCGGRGFLNAKTLHNREVCSLREYFLAADVGMHRDVVAVDKGLTPLSLANENWRKPVALDTNVRKEVWQSKELHGRFFRALHGPDVDQLASVAWLRVGDLFGETEGFVCAIMDEVIMTNNYRRFIVKDGTVDICRACHRPGESIRHIISGCSRLANGEYLHRHNLVARIIHQQLALKYSLVESEVPYYRYVPDPVLDSGDITLYWDRSIITDRTIVANKPDIVVVDRSERRAMIVDISVPHDENLVKAEKDKQIKYIDLAREVVDMWEVDSAIIVPIVVSANGLIAKSLDQHLRRLSLGDWIKGLIQKAVLLDTARIVRRFLSLEP

SEQ ID NO: 11535 - protein, 868 aa, Mythimna ferrago
MRFVRRAFSGTDISPRDYLPRMTERIDFLRQKVYAWANRIRRYKRRVERYTQNRAFQSNERWVYRAWERPDQSVIDTRLPDDDAMYSFWRSIWSVPVSHTEGDWTREVERECELIPEMGAITISPQDVARAVRPLPNWKSPGPDGLHNFWLKWFKSSHARLASQFQSALESGSLPQFLTTGITHLLHKSGSTAEPKNYRPITCLPTVYKVLTSILRAKINSHIETNSIMSASQNGCRNGSRGTKELLLIDVAISQQVRRSRKDLSTCWIDYKKAYDSVPHTWLMRVLELYKIDVTLRTFLMSCMGQWRTVLHYPGCRRVSENSEPLRIERGIFQGDSLSPLWFCLALNPLSTLLEGSGLGYRLRREDQVISHLLYMDDLKLFASNNLQLMELLKVTETFSSAIRMEFGLDKCAVMHVKRGEIMESVGTQLSDSIHLRSLSSTETYKYLGMSEALGINAADVKQSLRERFFGRLNKVLKSLLSGGNKVRAFNGWVMPVLMYSFGILKWTQTELDALDRRVRTLLTANRMHHPRSSVMRLYIPRKCGGRGILNAKTLHNREVCSLREYFLETDVGMHREVVAVDKGLTPLSLANENWRKPIVMDTNERKEVWKGKELHGRFYRALHGPDVDLLASVSWLRFGDLFGETEGFVFAIMDEVMMTNNYRKYIVKDGTVDICRACHRPGESIRHIISGCSHLANGDYLHRHNLVARIIHQQLALKYNLVESEVPYYRYVPDPVLENGSVTLYWDRSIITDRTIVANKPDIVVIDQLERRTMIVDIAVPHDENLVKAEKDKQTKYLDLAREVVDMWEVDRAIIVPIVVTANGLIAKSLDQHLRRLSLGSWIKGLIQKAVLLDTARIVRRFLSQEP

SEQ ID NO: 11536 - protein, 1191 aa, Eilema sororculum
MLTRAQARNRNAQSTSPGSSLSSAAQLPAVEPAASSSSSSDEFFSPPTSPTPVRRPGRGRPPTCLGPRRPPASNRAPATGGNVHRMRWTTSINENVMRAYFAATEGGTNLSAYRTRMLPLFQALEPTINTSAQRLSDQVRVIQRNRLLNETVLETLRLECLQNICVTPAPAPAPASTAEINDDAYVAPDDTPIPVSIQYNEEIKEALECALREYRSMPVHVRPRLPRLPIHRRNIALVSALDSLLPRYLENSENLGDTHSILYCTAVAACRIAGAKFPIKDPAIRPKPAIPAWQCRIERRVAEARVLIGKLICFRSGNTRPRVMRYVTRAFAGTDISPLDYTSRVTERIDFLKQKVYAWANRIRRYKKRVDRYTLNCMFQRDQRWVYRSWERTEESVDDVRRPDAEATNAFWRSIWSVPVSHTEGDWMREVERACETIPEMEEINIDAIDIDCAVRPLSNWKSPGPDGLHNFWLKWLRSSHVVLASQFQSAVESGTLPAFMTTGVTHLLHKTGSTLEPNNYRPITCLPTVYKLLTSILRAKINNHINNNSIMCASQNGCRNGARGTKELLLIDMTISQQARRNRKDLAACWIDYKKAFDSVPHTWLLRVLELYKVNTTLCTFLRSCMGQWRTVLFYPGCRQALGSGEPITIERGIFQGDSLSPLWFCLALNPLSTLLVNSGLGYRLRREGQMVSHLFYMDDLKLFAHTNPQLIALLKVTETFSHSIKMAFGVDKCAVIHVKRGRVVESEGIQLSDSTNLRSLLVTETYKYLGMSQTLCINEADMKQMLQDRFFGRLKKVLNSLLSGGNKVRACNSWVMPLLMYSFGILKWTQTELDTIDRKVRAQLTAFRMHHPRSSVMRLYIPRKCGGRGFLNAKTLHNREVCNLRDYFLKSNVDMHRDVVNVDTGLTPLGLAKENWRRPTIVSTDSRREVWQSKELHGRFYRALHRPEVDLLASVSWLRFSDLFGETEGFVCAIADEVIKTNNYRKYIMRDGTIDICRACHQPGESLRHITSGCSRLANGEYLHRHNQVARIIHQRLALKYNLVEVEVPYYRYVPEPVLENSHITLYSDRSIITDRTVVANKPDIVVIDRSERRALIVDVTIPHDENLVKAEKDKQVKYLDLAHEVVDMWNVDSAIIVPIVVSVNGLIAKSLDQHLKRLGLDGWVKGQMQKAVLLDTARIVRKFLSLEP

SEQ ID NO: 11537 - protein, 1075 aa, Eilema sororculum
MLPLFQALEPSVNTSAQRLSDQVRVIQRNHMLNETVLETLRQECLRNICVNPALAPAPASTTALNEDSHVTRDDTPIPVSIQYNEEIKEALEYALREYRSMPIHVRPRLPRLPIHRRNIALVSALDSLLPKYLENSENLGDTHSILYCTAVAACRMAGAKFHIKDPAIRPKPAIPAWQCRIERRVAEARVLIGKLICFRSGNTRPRVMRYVTRAFAGTNISPQDYTSRVTERIDFLKQKVCAWANRIRRYKKRVDRYTVNRMFQRDQRWVYRSWERTDESVDDLRRPDAEATNGFWRNIWSVPVSHTEGDWMREVERACETIPEMEEIYIDATDVDCAVRSLSNWKSPGPDGLHNFWLKWLRSSHVVLASQFQSAIESGTLPAFMTTGVTHLLHKTGNTLEPNNYRPITCLPTVYKLLTSILRAKINNHINNNSIMCTSQNGCRNGARGTKELLLIDMTISQQARRNRKDLVACWIDYKKAFDSVPHTWLLRVLELYKVNTTLCTFLRSCMGQWRTVLLYPGCRQALGSGEPITIERGIFQGDSLSPLWFCLALNPLSTLLVNSGLGYRLRREGQMVSHLFYMDDLKLFAHTNPQLIALLKVTETFSNSIKMAFGVDKCAVIHVKRGRVVESEGIQLSDSTNLRSLLVTETYKYLGMSQALCINEVGMKQMLQERFFGRLKKVLNSLLSGGNKVRACNSWVMPLLMYSFGILKWTQTELDTIDRKVRTQLTAFRMHHPRSSVMRLYIPRKCGGRGFLNAKTLHNREVCNLRDYFLKSNVDMHRDVVNVDTGLTPLGLAKENWRRPTIVGTDSRREVWQSKELHGRFYRALHRPEVDLLASVSWLRFSDLFGETEGFVCAIADEVIKTNNYRKYIMRDGTIDICRACHQPGESLRHITSGCSRLANGEYLHRHNQVARIIHQRLALKYNLVEVEVPYYRYVPEPVLENSHITLYWDRSIITDRTVVANKPDIVVIDRSERRALIVDVTIPHDENLVKAEKDKQVKYLDLAHEVVDMWNVDSAIIVPIVVSVNGLIAKSLDQHLKRLGLDGWVKGQMQKAVLLDTARIVRKFLSLEP

SEQ ID NO: 11538 - protein, 1191 aa, Eilema sororculum
MLTRAQARNRNAQTTSPDSSLSSAAQPPAMEPAASSSSSSDEFFSPPTSPTPVRRPGRGRPPTCLGPRRPPASNRAPAAGGNVHRMRWTNSINENVMRAYFAATEGGTNLSAYRTRMLPLFQALEPSINTSAQRLSDQVRVIQRNRMLNETVLETLRQECLRNICVTPAPAPAPASTAEINNDTYVAPDDTPIPVSIQYNEEIKEALECALREYRSVPVHVRPRLPRLPIHRRNIALVSALDSLLPRYLENSENLGDTHSILYCAAVAACRMAGAKFPIKDPAIRPKSAIPAWQCRIERRVAEARVLIGKLICFRSGNTRPRVMRYVTRAFAGTDISPQDYTSRVTERIDFLKQKVYAWANRIRRYKRRVDRYTVNHMFQRDQRWVYRSWERTDESVDDVRRPDAEATNAFWRSIWSVPVSHTEGDWMCEVERACETIPEMEEIYIDATDVDCAVRSLSNWKSPGPDGLHNFWLKWLRSSHVVLASQFQSAIESGTLPAFMTTGVTHLLHKTGSTLEPNNYRPITCLPTVYKLLTSILRAKINNHINNNSIMCASQNGCRNGARGTKELLLIDMAISQQARRNRKDLTACWIDYKKAFDSVPHTWLLRVLELYKVNTTLCTFLRSCMGQWRTVLFYPGCRQALGGGVPITIERGIFQGDSLSLLWFCLALNPLSTLLVNSGLGYRLRREGQMVSHLFYMDDLKLFAHTNPQLIALLKVTETFSNSIKMAFGVDKCAVIHVKRGRVVESEGIQLSDSTNLRSLLVTETYKYLGMSQALCINEVDMKQMLQERFFGRLKKVLNSLLSGGNKVRACNSWVMPLLMYSFGILRWTQTELDTIDRKVRTQLTAYRMHHPRSSVMRLYIPRKCGGRGFLNAKTLHNREVCNLRDYFLKSNVDMHRDVVNVDTGLTPLGLAKENWRRPTIVSTDSRREVWQSKELHGRFYRALHRPEVDLLASVSWLRFSDLFGETEGFVCAIADEVIKTNNYRKYIMRDGTIDICRACHQPGESLRHITSGCSRLANGEYLHRHNQVARIIHQRLALKYNLVEVEVPYYKYVPEPVLQNSHITLYWDRSIITDRTVVANKPDIVVIDRSERRALIVDVTIPHDENLVKAEKDKQVKYLDLAHEVVDMWNVDSAIIVPIVVSVNGLIAKSLDQHLKRLGLDGWVKGQMQKAVLLDTARIVRKFLSLEP

SEQ ID NO: 11539 - protein, 1106 aa, Eilema sororculum
MRWTNSINENVMRAYFAATEGGTNLSAYRTRMLPLFQALEPSINVSAQRLSDQVRVIQRNRMLNETVLETLRLECLRNICVTPAPVPVPASTVELNDDTCVAPDDTPIPVSIQYNEEIKEALECALREYRSMPVHVRPRLPRLPIHRRNIALVSALDSLLPRYLENSENLGDTHSILYCTAVAACRMAGAKFPIKDPAIRPKSAIPAWQCRIERRVTEARVLIGKLICFRSGNTRPRVMRYVTRAFAGTDISPQDYTSRVTERIDFLKQKVYAWANRIRRYKKRVDRYTVNRMFQRDQRWVYRSWERTEESVDDVRRPDAEVTNAFWRSIWSVPVSHTEGDWMHEVERACETIPEMEEINIDAIDVDCAVRSLSNWKSPGPDGLHNFWLKWLRSSHVVLASQFQSAVESGTLPAFMTTGVTHLLHKTGSTLEPNNYRQITCLPTVYKLLTSILRAKINNHINNNSIMCASQNGCRNGARGTKELLLIDMAISQQARRNRKDLTACWIDYKKAFDSVPHTWLLRVLELYKVNTTLCTFLRSCMGQWRTVLFYPGCRQALGGGVPITIERGIFQGDSLSPLWFCLALNPLSTLLVNSGLGYRLRREGQMVSHLFYMDDLKLFAHTNPQLITLLKITETFSNSIKMAFGVDKCAVIHVKRGRVVESEGIQLSDSTNLRSLLVTETYKYLGMSQALCINEVDMKQMLQERFFGRLKKVLYSLLSGGNRVRACNSWVMPLLMYSFGILKWTQTELDSIDRKVRTKLTAFRMHHPRSSVMRLYIPRKCGGRGFLNAKTLHNHEVCNLRDYFLKSNVDMHRDVVNVDTGLTPLGLAKENWRRPTIVSTDSRREVWQSKELHGRFYRALHRPEVDLLASVSWLRFSDLFGETEGFVCAIADEVIKTNNYRKYIMRDGTIDICRACHQPGESLRHITSGCSRLANGEYLHRHNQVARIIHQRLALKYNLVEVEVPYYRYVPEPVLENSHITLYWDRSIITDRTVVANKPDIVVIDRSERRALIVDVTIPHDENLVKAEKDKQVKYLDLAREVVDMWNVDSAIIVPIVVSVNGLIAKSLDQHLKRLGLDGWVKGQMQKAVLLDTARIVRKFLSLEP

SEQ ID NO: 11540 - protein, 1212 aa, Ptilodon capucinus
MTDAPRRNPRRLCRQRTVNEPNAQSTPPDPSPRSASPSPASIIRTSVTAVASSESDEYFSPPTSPPPVRQQRGRPLGHLGLLGQPAPNRVLVPSGVVRRMRWTSSINENVMRAYYEATEGGTNLTAYRNRMLPLFQSLEPAVNVSAQRLSDQVRVIQRGNMLADTVLDRLRSEMQSRRVVPVASSQPAAQPVASATVTSRLAADSDVDRDNAPINVSNQYNELLRSTLEDVVRVYRSMPNHLRPRIPRLPMHKGNRALVGALDSLLSIYFDSSDNLADTHSILYCAAITVCRVASVKVFNTDTATRPKPAVPAWQCRIERRISEARALIGKLSCFREGNTRPRVMRFVKRAFAGTDVSPREYISRVTERIDFLKQKIYAWANRIRRYKVRVDRYSQNSMFQRDQRWVYRSWERPSEPVSELQRPDNNATTTFWRDIWSVPVTHYEGDWIGDVERMCEPIKEMEAISIGPLDVANAVRSLPNWKAPGPDGLHNFWLKWLRSSHVRLASQFQSALQSGSLPEFITTGVTHLLHKTGSTTDPKNYRPITCLPTIYKTLTSILRAKIARHVEDNSIMSASQNGCRSGSRGTKELLLIDMTICQQARRNRKDLSTCWIDYKKAYDSVPHTWLVRVLELYKIDTTLRTFLESCMRQWKTVLLCPGSRQILGNGEPIRIERGIFQGDSLSPLWFCLALNPLSTLLEESGFGFRLRRGGQVISHLLYMDDLKLFAPTALQLTGLLKVTETFSNSIRMEFGVDKCAVMHAKQGRLVESEGIQLSDSIQLRSLAATETYKYLGMSQGLGISETDMKQFLRDRFLGRLKKVLKSLLSGGNKVRAYNGWVMPVLMYSFGILKWTQTELDTLDRTVRTTLTSYRMHHPRSSVMRLYIPRKCGGRGFLNVKTLHNREICSLREYFLRADGEMHVDVVAVDNGLTPLSLAKENWRKPVVLTTDDRRLVWQGKELHGRYYRALHGPDVDLAASVAWLRFGDLFGETEGFVCAIMDEVVMTNNYRKYILRDGTIDICRACHRPGESLRHIISGCSRLANGQYLHRHNQVARIIHQQLALKYRLVTSEVPYYRYEPQPVLEEGHISLYWDRSIITDRTIVANKPDIVLIDRQERRAMIVDITVPHDENLVKAEKDKESKYLDLAHEVVDMWDIDAAIIVPIVVSAHGLLAKSLDKHLKRLALGGWIKGQIQKAVLLETARIVRKFLSLEP

SEQ ID NO: 11541 - protein, 1212 aa, Ptilodon capucinus
MTDAPRRNPRRQCRQRSAVRHYAQSTPPDQSPRSASPSPASIIRTSVTAVASSESDEYFSPPTSPPPVRRQRGRPPGHLGLLGQPAPNRVLVSSGVVRRMRWTSSMNENVMRAYYEATEGGTNLTAYRDRMLPLFQSLEPAVNVSAQRLSDQVRVIQRGNMLADTVLDRLRSEVQSRRVVPVASSQPAAQPVANATVTSRLAADSDVDRDNAPIDVSTQYNDLLRSTLEDVVREYRSMPNHLRPRIPRLPMHKGNRALVGALDSLLSIYFDSSDDLVDTHSILYCAAITVCRVARVKVFNTDTATRPKPAVPAWQCRIERRISEARALIGKLSCFREGNTRPRVMRFVKRAFAGTDVSPREYISRVTERIDFLKQKIYAWANRIRRYKARVDRYSQNSMFQRDQRWVYRSWERPNEPVSELQRPDDNAMTTFWRDIWSVPVTHYEGNWIGDVERMCEPIKEMEAISIGPLDVANAVRSLPNWKAPGPDGLHNFWLKWLRSSHVRLASQFQSALQSGSLPEFITTGVTHLLHKTGSTTDPKNYRPITCLPTIYKTLTSILRVKIARHVEDNSIMSASQNGCRSGSRGTKELLLIDMTICQQARRNRKDLSTCWIDYKKAYDSVPHTWLVRVLELYKIDTTLRTFLESCMRQWKTVLLCPGSRQILGNGEPIRIERGIFQGDSLSPLWFCLALNPLSTLLEGSGFGFRLRRGGQVISHLLYMDDLKLFAPTALQLSGLLKVTETFSNSIRMEFGVDKCAVMHAKQGRMVESEGIQLSDSIQLRSLAATETYKYLGMSQGLGISETDMKQLLRDRFLGRLKKVLKSLLSGGNKVRAYNGWVMPVLMYSFGILKWTQTELDALDRTVRTTLTAYRMHHPRSSVMRLYIPRKCGGRGFLNVKTLHNREICSLREYFLRADGEMHVDVVAVDNGLTPLSLAKENWRKPVVLTTDDRRVVWQGKELHGRYYRALHGPDVDLAASVAWLRFGDLFGETEGFVCAIMDEVVMTNNYRRYILRDGTIDICRACHRPGESLRHIISGCSRLANGQYLHRHNQVARIVHQQLALKYRLVTSEVPYYRYEPQPVLEEGHITLYWDRSIITDRTIVANKPDIVLIDRQERRAMIIDITVPHDENLVKAEKDKESKYLDLAHEVVDMWDIDAAIIVPIVVSAHGLLAKSLDKHLKRLALGSWIKGQIQKAVLLETARIVRKFLSLEP

SEQ ID NO: 11542 - protein, 1212 aa, Ptilodon capucinus
MTDAPRRNPRRLCRQRTVNEPNAQSTPPDTSPRSASPSPASIIRTSVTAVASSESDEYFSPPTSPPPVRRQRGRPPGHLGLLGQPAPNRVLVPSGVVRRMRWTSSINENVMRAYYEATEGGTNLTAYRNRMLPLFQSLEPAVNVSAQRLSDQVRVIQRGNMLADTVLDRLRSEMQSRRVVPVASSQPAAQPVASATVTSRLAADSDVDRDNAPIDVSNQYNDLLRSTLEDVVRVYRSMPNHLRPRIPRLPMHKGNRALVGALDSLLSIYFDSSDNLADTHSILYCAAITVCRVARVKVFNTDTATRPKPAVPAWQCRIERRISEARALIGKLSCFREGNTRPRVMRFVKRAFAGTDVSPREYISRVTERIDFLKQKIYAWANRIRRYKVRVDRYSQNSMFQRDQRWVYRSWERPNEPVSELQRPDDNAMTTFWRDIWSVPVTHYEGDWIGDVERMCEPIKEMEAISIGPLDVANAVRSLPNWKAPGPDGLHNFWLKWLRSSHVRLASQFQSALQSGSLPEFITTGVTHLLHKTGSTTDPKNYRPITCLPTIYKTLTSILRAKIARHVEDNSIMSASQNGCRSGSRGTKELLLIDMTICQQARRNRKDLSTCWIDYKKAYDSVPHTWLVRVLELYKIDTTLRTFLESCMRQWKTVLLCPGSRQILGNGEPIRIERGIFQGDSLSPLWFCLALNPLSTLLEESGFGFRLRRGGQVISHLLYMDDLKLFAPTALQLTGLLKVTETFSNSIRMEFGVDKCAVMHAKQGRLVESEGIQLSDSIQLRSLAATETYKYLGMSQGLAISETDMKQLLRDRFLGRLKKVLKSLLSGGNKVRAYNGWVMPVLMYSFGILKWTQTELDTLDRTVRTTLTAYRMHHPRSSVMRLYIPRKCGGRGFLNVKTLHNREICSLREYFLRADGEMHVDVVAVDNGLTPLSLAKENWRKPVVLTTDDRRLVWQGKELHGRYYRALHGPDVDLAASVAWLRFGDLFGETEGFVCAIMDEVVMTNNYRKYILRDGTIDICRACHRPGESLRHIISGCSRLANGQYLHRHNQVARIIHQQLALKYRLVTSEVPYYRYEPQPVLEEGHISLYWDRSIITDRTIVANKPDIVLIDRQERRAMIVDITVPHDENLVKAEKDKESKYLDLAHEVVDMWDIDAAIIVPIVVSAHGLLAKSLDKHLKRLALGGWIKGQIQKAVLLETARIVRKFLSLEP

SEQ ID NO: 11543 - protein, 1204 aa, Agrochola circellaris
MLTRSRARRLIDTHPTPSDSSLSSASQLPDPAPDVSPVIPAAAAASSSSDEYFSPPTSPPPARRGRGRPPASLGLRGPPASDRVPAPGGSVRRMRWTQTVNENVMRAYFGATEGGSNLTAYRGRMLSLFQVLEPAVNVSAQRLSDQVRVIQRNHMLDDAVLDRLRLESRNNRVTPASPLVAVQLQNSLSATPRPDHVGEEVDDGVISVSSQCNAQLRNALEDAFREYRSTPPGLRPRLPRLPMHKKNKALVCTLDSLLSNYFDGSKDLADTHSILYCAAVAACRVAHVKFPSSDRAPRPKPAVPAWQCRIERRIGEARVLIGKLICFREGNTRPRVMRFVKRAFSGTDTSSRDYLTRVTERIDFLKQKICAWANRIRRYRRRVERYTQNRTFQSDERWVYRAWERLDQGVIDTRLPDDDAMCSFWRSLWSAPVNHTEGDWTGKIERACERIPEMGAINISPQDVACAVRPLPNWKSPGPDGLHNFWIKWLQRSHARLASQFQSALESGSLPQFLTTGITHLLHKSGSTAEPKNYRPITCLPTVYKVFTSILRTKINKHIDTNSIMSVSQNGCKNGSRGTKELLLIDMAINQQVRRSRRDLSTCWIDYKKAYDSVPHTWLMRVLELYKVDATLRTFLISCMGQWRTVLRYPGCRQIQRNSEPIRIERGIFQGDSLSPLWFCLALNPLSTLLEDSGLGYRLRRGGQVISHLLYMDDLKLFAPNNLQLVELLKVTETFSSAIRMEFGVDKCAVMHVKRGGIVESGGTQLPDSIHLRSLSSIETYKYLGMSEALGINTADMKQSLKERFFDRLNKVLNSLLSGGNKVRAFNGWVMPVLMYSFGILKWTQTELDALDRRVRTLLTVNRMHHPRSSVMRLYIPRKCGGRGFLNAKTLHNREVCSLREYFLEADVGMHRDVVSVDKGLTPLSLASENWRKPIVLDTNDRREVWQSKELHGRFYRALHGPDVDLLASVSWLRFGDLFGETEGFVFAIMDEVMMTNNYRKYIVKDGTVDICRACHRPGESIRHIISGCSRLANGDYLHRHNLVARIIHQQLALKYNLVESEVPYYKYVPDPVLENGNITLYWDRSIITDRTIVANKPDIVVIDRLERRTMIIDIAVPHDENLVKAEKDKQIKYLDLAHEVVDMWDVDTAVIVPIVVTANGIIAKSLDQHLRRLSLGSWIKGLIQKAVLLDTARIVRRFLSQEP

SEQ ID NO: 11544 - protein, 1204 aa, Agrochola circellaris
MLTRSRARRLIDTHPTPSDSSLSSASQLPDPAPDVSPVIPAAAAASSSSDEYFSPPTSPPPARRGRGRPPASLGLRGPPASDRVPAPGGSVRRMRWTQTVNENVMRAYFGATEGGSNLTAYRGRMLSLFQVLEPAVNVSAQRLSDQVRVIQRNHMLDDAVLDRLRLESRNNRVTPASPLVAVQLQNSLSATPRPDHVGEEVDDGVISVSSQCNAQLRNALEDAFREYRSTPPGLRPRLPRLPMHKKNKALVCTLDSLLSNYFDGSKDLADTHSILYCAAVAACRVAHVKFPSSDRAPRPKPAVPAWQCRIERRIGEARVLIGKLICFREGNTRPRVMRFVKRAFSGTDTSSRDYLTRVTERIDFLKQKICAWANRIRRYRRRVERYTQNRTFQSDERWVYRAWERLDQGVIDTRLPDDDAMCSFWRSIWSAPVNHTEGDWTGKIERACERIPEMGAINISPQDVACAVRPLPNWKSPGPDGLHNFWIKWLQRSHARLASQFQSALESGSLPQFLTTGITHLLHKSGSTAEPKNYRPITCLPTVYKVFTSILRTKINKHIDTNSIMSVSQNGCKNGSRGTKELLLIDMAINQQVRRSRRDLSTCWIDYKKAYDSVPHTWLMRVLELYKVDATLRTFLISCMGQWRTVLRYPGCRQIQRISEPIRIERGIFQGDSLSPLWFCLALNPLSTLLEDSGLGYRLRRGGQVISHLLYMDDLKLFAPNNLQLVELLKVTETFSSAIRMEFGVDKCAVMHVKRGGIVESGGTQLPDSIHLRSLSSIETYKYLGMSEALGINTADMKQSLKERFFDRLNKVLNSLLSGGNKVRAFNGWVMPVLMYSFGILKWTQTELDALDRRVRTLLTVNRMHHPRSSVMRLYIPRKCGGRGFLNAKTLHNREVCSLREYFLEADVGMHRDVVSVDKGLTPLSLASENWRKPIVLDTNDRREVWQSKELHGRFYRALHGPDVDLLASVSWLRFGDLFGETEGSVFAIMDEVMMTNNYRKYIVKDGTVDICRACHRPGESIRHIISGCSRLANGDYLHRHNLVARIIHQQLALKYNLAESEVPYYKYVPDPVLENGNITLYWDRSIITDRTIVANKPDIVVIDRLERRTMIIDIAVPHDENLVKAEKDKQIKYLDLAREVVDMWDVDTAVIVPIVVTANGIIAKSLDQHLRRLSLGSWIKGLIQKAVLLDTARIVRRFLSQEP

SEQ ID NO: 11545 - protein, 1201 aa, Hydraecia micacea
MLTRSAAARRARLPPPDSSLSSASPPAPLVSSPTVSAVTAPAAAVASSSSDEYFSPPTTPPPARRRGGRRPPDSLGPRGPPASDRVPAPGGSVQRMRWTRSINENVMRSYYGATEGGSNLTAYRVRMLSLFQVLEPAVNVSAQRLSDQVRVIQRNHMLDDTVLDRLRNEIQSSHAIAPQSQTAVILPQSNTSHADEGSNDRATNVSTQCNEELRSALEDAIQEYRFMSPELRPRLPRLPMHNKNRALVAVLNSQLSKYFDDCEDLTDTHSILYCAAVAACRVAHVKFTNDSRATRPKPAVPAWQCRIERRIGGARALIGKLICFREGNTRPRVMRFVRRAFLGTDISPQDYTSCVTERIDFLKQKVYAWANRIRRYKRRVERYTQNRTFQSDERWVYRDWERPDQSVADTCLPDDDAMCSFWRSIWSVPVGHTEGDWARDVERACDPIPEMEAITICPQDVARAVRPLPNWKSPGPDGLHNFWIKWFSKSHARLASQFQTALESGSLPQFLTTGITHLLHKSGSTAEPKNYRPITCLPTVYKVLTSILRAKINKHIDTNFIMSASQNGCRNGSRGTKELLLIDMTISQQVRRFRKDLSTCWIDYKKAYDSVPHTWLMRVMELYKVDTTLRTFLMSCMGQWRTVLRYPGCRNIQRNSEPIRIERGIFQGDSLSPLWFCLALNPLSTLLEDSGLGYRLRRGGQVISHLLYMDDLKLFAPNNLQLMELLKVTQTFSNAIRMEFGVDKCAVMHVKRGEIVESVGNQLSDSTNLRALSASETYKYLGMSEALGINVTDMKQSLKERFFGRLKKVLNSLLSGGNKVRAFNGWVMPVLMYSFGILKWTQTELDALDRRVRTLLTANRMHHPRSSVMRLYIPRKCGGRGFLNSKTLHNREICSLREYFLETDVGMHRDVVMVDKGLTPLSLAKENWRKPVVLDTNDRMEVWQSKELHGRFFRALHGPDVDLLASVAWLRFGDLFGETEGFVCAIMDEVMMTNNYRRFIVKDGTVDICRACHRPGESIRHIISGCSRLANGEYLHRHNLVARIIHQQLALKYSLVESEVPYYRYVPDPVLENGNITLYWDRSIITDRTIVANKPDIVVVDRSERRAMIVDITVPHDENLVKAEKDKQIKYLDLAREVVDMWDVDSAIIVPIVVTANGLIAKSLDQHLRRLSLASWIKGLIQKAVLLDTARIVRRFLSLEP

SEQ ID NO: 11546 - protein, 1201 aa, Hydraecia micacea
MLTRSATARRARIPPPDSSLSSASPPAPLVSSPTVSAVMTPAAAVASSSSDEYFSPPTTPPPARRRGGRRPPDGLGPRGPPASDRVPAPGGSVQRMRWTRSINENVMRSYYGATEGGSNLTAYRVRMLSLFQVLEPAVNVSAQRLSDQVRVIQRNHMLDDTVLDRLRNEIQSSHAIAPQSQTAVILPQSNTSHADEGSNDRATNVSTQCNEELRSALEDAIQEYRFMSPELRPRLPRLPMHNKNRALVAVLNSQLSKYFDDCEDLTDTHSILYCAAVAACRVAHVKFTNDSRATRPKPAVPAWQCRIERRIGGARALIGKLICFREGNTRPRVMRFVRRAFLGTDISPQDYTSCVTERIDFLKQKVYAWANRIRRYKRRVERYTQNRTFQSDERWVYRDWERPDQSVADTCLPDDDAMCSFWRSIWSVPVSHTEGDWARDVERACDPIPEMEAITICPQDVARAVRPLPNWKSPGPDGLHNFWIKWFSRSHARLASQFQTALESGSLPQFLTTGITHLLHKSGSTAEPKNYRPITCLPTVYKVLTSILRAKINKHIDTNFIMSASQNGCRNGSRGTKELLLIDMTISQQVRRFRKDLSTCWIDYKKAYDSVPHTWLMRVLELYKVDTTLRTFLMSCMGQWRTVLRYPGCRNIQRNSEPIRIERGIFQGDSLSPLWFCLALNPLSTLLEDSGLGYRLRRGGQVISHLLYMDDLKLFAPNNLQLMELLKVTQTFSNAIRMEFGVDKCAVMHVKRGEIVESVGNQLSDSTNLRALSASETYKYLGISEALGINVTDMKQSLKERFFGRLKKVLNSLLSGGNKVRAFNGWVMPVLMYSFGILKWTQTELDALDRRVRTLLTANRMHHPRSSVMRLYIPRKCGGRGFLNSKTLHNREICSLREYFLETDVGMHRDVVMVDKGLTPLSLAKENWRKPVVLDTNDRMEVWQSKELHGRFFRALHGPDVDLLASVAWLRFGDLFGETEGFVCAIMDEVMMTNNYRRFIVKDGTVDICRACHRPGESIRHIISGCSRLANGEYLHRHNLVARIIHQQLALKYSLVESEVPYYRYVPDPVLENGNITLYWDRSIITDRTIVANKPDIVVVDRSERRAMIVDITVPHDENLVKAEKDKQIKYLDLAREVVDMWDVDSAIIVPIVVTANGLIAKSLDQHLRRLSLGSWIKGLIQKAVLLDTARIVRRFLSLEP

SEQ ID NO: 11547 - protein, 1201 aa, Hydraecia micacea
MLTRSAAARRARLPPPDSSLSSASPPAPLVSSPTVSAVTAPAAAVASSSSDEYFSPPTTPPPARRRGGRRPPDSLGPRGPLASDRVPAPGGSVQRMRWTRSINENVMRSYYGATEGGSNLTAYRVRMLSLFQVLEPAVNVSAQRLSDQVRVIQRNHMLDDTVLDRLRNEIQSSHAIAPQSQTAVILPQSNTSHADEGSNDRATNVSTQCNEELSSALEDAIQEYRFMSPELRPRLPRLPMHNKNRALVAVLNSQLSKYFDDCEDLTDTHSILYCAAVAACRVAHVKFTNDSRATRPKPAVPAWQCRIERRIGGARALIGKLICFREGNTRPRVMRFVRRAFLGTDISPQDYTSCVTERIDFLKQKVYAWANRIRRYKRRVERYTQNRTFQSDERWVYRDWERPDQSVADTCLPDDDAMCSFWRSIWSVPVSHTEGDWARDVERACDPIPEMEAITICPQDVARAVRPLPNWKSPGPDGLHNFWIKWFSRSHARLASQFQTALESGSLPQFLTTGITHLLHKSGSTAEPKNYRPITCLPTVYKVLTSILRAKINKHIDTNFIMSASQNGCRNGSRGTKELLLIDMTISQQVRRFRKDLSTCWIDYKKAYDSVPHTWLMRVLELYKVDTTLRTFLMSCMGQWRTVLRYPGCRNIQRNSEPIRIERGIFQGDSLSPLWFCLALNPLSTLLEDSGLGYRLRRGGQVISHLLYMDDLKLFAPNNLQLMELLKVTQTFSNAIRMEFGVDKCAVMHVKRGEIVESVGNQLSDSTNLRALSASETYKYLGMSEALGINVTDMKQSLKERFFGRLKKVLNSLLSGGNKVRAFNGWVMPVLMYSFGILKWTQTELDALDRRVRTLLTANRMHHPRSSVMRLYIPRKCGGRGFLNSKTLHNREICSLREYFLETDVGMHRDVVMVDKGLTPLSLAKENWRKPVVLDTNDRMEVWQSKELHGRFFRALHGPDVDLLASVAWLRFGDLFGETEGFVCAIMDEVMMTNNYRRFIVKDGTVDICRACHRPGESIRHIISGCSRLANGEYLHRHNLVARIIHQQLALKYSLVESEVPYYRYVPDPVLENGNITLYWDRSIITDRTIVANKPDIVVVDRSERRAMIVDITVPHDENLVKAEKDKQIKYLDLAREVVDMWDVDSAIIVPIVVTANGLIAKSLDQHLRRLSLASWIKGLIQKAVLLDTARIVRRFLSLEP

SEQ ID NO: 11548 - protein, 1203 aa, Amphipyra tragopoginis
MLTRARAREKVARPRSPDPSLRSASQPPESSPSVSAVTPAAAVASSSSDEYFSPPSSPPPVRRRGGARPPACLGPQGQPASNRVPAAGGNVSRMRWTQSINENVMRAYYGATEGGINLTAYRDRMLLLFQVLEPAINVSTQRLSDQVRVIQRNRRLDDTVLERLRSEVQNNRAVTPPVQAVVQAQLPAVPPRPSHGDGEGDGEVIEVSNQCSDELRSALEGAILEYRATPPELRPRLPRLPMHKKNRALVCALDSLLSNYFDGSEDLADTHSILYCAAIAACRVAHVKFTDNERATRPKPAVPAWQCRIERRIGGARALIGKLICFREGNTRPRVMRFVRRAFSGTGISPRDYMSRITERIDFLKQKVYAWANRIRRYKRRVERYTLNRTFQSDQRRVYRTWERPDPCGSDVRLPDDEAMSSFWRSIWSVPVAHTEGGWMRDIERACESIPEMGAIIISPQDVAGAARPLPNWKSPGPDGLHNFWLKWLRSSHACLASQFQSSLESGSLPQFLTTGATHLLYKSGSTAEPKNYRPITCLPTVYKLLTSILRVKISNHIDNNSIMSASQNGCRNGSRGTKELLLIDMTISQQVRRSRKDLSTCWIDYKKAYDSVPHTWLMRVLELYKINATLRTFLMSCMRQWRTVLRYPGCREIRGRGEPVRIERGIFQGDSLSPLWFCLALNPLSTLLEGTRLGYRLRREGQVISHLLYMDDLKLFAPTDLRLMELLKVTENFSSSIRMEFGVDKCAVMHVKRGRIVESEGTQLSNSIQLRSLSPTETYKYLGMSEALGISEADVRQSLRERFFGRLNKVLRSLLSGGNKVRAFNGWVMPVLMYSFGILKWTQTDLDALDRRVRALLTTHRMHHPRSSVMRLYIPRKCGGRGFLNAKTLHNREVCSLREYFLQAEGEMHRDVVAVDKGLTPLALAKENWRKPAVLSTNDREEVWQSKELHGRFYRALHGPDVDFPASVSWLRFGDLFGETEGFVCAIMDEVMMTNNYRRYIVKDGTVDICRACHRPGESIRHIVSGCSRLANGEYLHRHNLVARIIHQQLALKYNLVESEVPYYRYVPDPVLENGHVTLYWDRSIITDRTIVANKPDIVVIDRSERRTMIVDITVPHDENLVKAEKDKQIKYLDLAHEVVGMWDVDSAVIVPIVVTANGLIAKSLDQHLKRLSLGGWIKGLIQKAVLLDTARIVRRFLSLEP

SEQ ID NO: 11549 - protein, 1200 aa, Amphipyra tragopoginis
MLTRSKARARDAHPPPPDSSPSSASQQQGLDPASPAAAVASSSSDEYYSPPSSPPPARRRGGTRPPGGLGLRGPLASDGVPAPGGIVPRMKWTQKINESVMRAYYGATEGGTNLTAYRGRMLSLFQVLEPAVNVSAQRLSDQVRVIQRGHMLDDTVLDRIRSEVQSSPVISPSPQVLEQSQNLAATLPRPNPADEEDDDRATNVSTQCNEELRSALEDAMREYRYTRSDLRPRIPRLPMHRKNRALMCALDSLLSNYFDGSEDLGDTHSILYCAAVAVCRVAHVKFIDNERVTRPKNAVPAWQCRIERRIAEARALIGKLVCFREGNTRPRVMRFVRRAFSGTDVSPREYMSRVTERIDFLKQKVYAWASRIRRYRRRVDRYTQNRLFQSDERWVYRTWERPDQRVSDTHLPDNDVISAFWRDIWSVPVTHTEGDWMQEVQRACEPIQEMGDIIISPQDVASAVRPMSNWKSPGPDGLHNFWLKWLRSSHACLASQFQSSLESESLPQFLTTGVTHLLHKSGSTAEPKNYRPITCLPTVYKLLTSILRSKINFHIENNCIMSPSQNGCRNGSRGTKELLLIDMAISQQVRRSRKNLSTCWIDYKKAYDSVPHTWLMRVLELYKVNTTLCAFLTSCMRQWRTVLRYPGCRQIQGIGEPIRIERGIFQGDSLSPLWFCLALNPLSTLLEGSGLGYRLRRGGQVISHLLYMDDLKLFAPNKLQLLELLKVTETFSNSIRMEFGVDKCAVMHVKRGRIMESVGTQLTDSIHLRSLSSTETYKYLGMSEALGINGTDMKQSLRERFCGRLKKVLNSLLSGGNKVRAFNGWVMPILMYSFGILKWTQTELDALDRRVRSLLTANRMHHPRSSVMRLYIPRKCGGRGFLNAKTLHNREVCSLREYFSQADVGMHRDVVAVDKGFTPLSLAKENWSKPVVLDTNDRREVWRSKELHGRFYRALHGSDVDFLASVAWLRFGDLFGETEGFVCAIMDEVMMTNNYRKYIVKDGTVDICRACHCPGESIRHIVSGCSRLANGEYLHRHNLVARIIHQQLALKYNLVDAEVPYYKYVPDPVLENGHITLYWDRSIITDRTIVANKPDIVVIDRSERLTMIVDITVPHDENLVKAEKDKEIKYQDLAHEVVAMWDVDSAIIVPIVVTANGLIAKSLDQHLKRLSLGSWIKGLVQKAVLLDTARIVRKFLSLRP

SEQ ID NO: 11550 - protein, 1110 aa, Amphipyra tragopoginis
MKWTQNINENVMRAYYGSTEGGTNLTAYRVRMLTLFQELEPAINVSAQRLSDQVRVIQRNHRLDDAALDRLRLEVQNSRVTPVPSQTAVHHININVVPPRSDCVDGDVDDRAVTVSSQYNDRLRSALEDAIREYRANPELRPRLPRLPMHNKNRALVCALDSLLSSYFESSEDLVDTHSILYCAAVAACRVANVKFNNSERATRPKPAIPAWQCRIERRIDGARALIGKLICFREGNTRPRVMRFVRRAFSGTGISPREYMSQVTERIDFLKQKVCAWASRIRRYKRRVERYAQNRMFQCDQRWVYRAWERPDQGVSDGRLPDDDAMSSFWRSIWSVPVTHTEGDWTRDIERACEPIEEMGEILISPQDVASAARPLPNWKSPGPDGLHNFWIKWLRSSHARLASQFQSSLESGSLPQFLTTGVTHLLHKSGSTAEPKNYRPITCLPTVYKLLTSILRTKINTHVENNSIMSPSQNGCRNGSRGTKELLLIDMAISQQVRRSRKSLSTCWIDYKKAYDSVPHTWLMRVLELYKINTTLRTFLTSCMRQWRTVLRYPGCRPIMGSGEPISIERGIFQGDSLSPLWFCLALNPLSTLLEGSGLGYPLRRGGQVVSHLLYMDDLKLFAPTKLQLVELLKVTETFSNSIRMEFGVDKCAVMHVRRGGIMESEGLQLSDSIHLRSLSANDTYKYLGMSEGLGISEADMKQSLRERFFGRLKKVLKSLLSGGNKVRAFNGWVMPVLMYSFGILKWTQTELDALDRRVRTLLTANRMHHPRSSVMRLYIPRKCGGRGLLNAKTLHNREVCSLREYFLHADAGMHRDVVTVDKGLTPLNLAKENWRKPVVLSTNDRREVWQSKELHGRFYRALHGPDVDFLASVSWLRFGDLFGETEGFVCAIMDEVIMTNNYRKYIVKDGTVDICRACHCPGESLRHIISGCSRLANGEYLHRHNQVARIIHQQLALKYNLVESEVPYYKYVPDPVLENGHITLYWDRSIITDRTIVANKPDIVVIDRSERRTMIVDVTIPHDENLVKAEKDKQIKYLDLAHEVVNMWDVDSATIVPIVVTANGLMAKSLDQHLKRLSLGGWIKGLIQKAVLLDTARIVRRFLSLEP

SEQ ID NO: 11551 - protein, 1204 aa, Amphipyra tragopoginis
MLTRSRAKALSTHLPPSASSLSSASQPPETASIVSVVTPAAAVASSSSDEYFSPATTPPPARRRGRGRPPACLGPRGPPASDRVPAPGGSVQRMRWTQSMNENCMRAYFGATEGGTNLTAYRGRMLSLFQALEPAVNVSAQRLSDQVRVIQRGHMLDDTVLDRLRSEVQSSPVISPSSQVLAQQQNLAAAFPRPNHAGEEDDDRATNVSTQYNEELRSALEDAMREYRYTRSDLRPRIPRLPMNRKNRALVCALDSLLSNYFDGSEDLGDTHSILYCAAVAACRVAHVKFIDNERATRPKNAVPAWQCRIERRIAEARALIGKLICFREGNIRPRVMRFVRRAFSGTDVSPREYMSRVTERIDFLKQKVCAWANRIRRYRRRVDRYTQNRLFQSDERWVYRTWERPDQRVSDTHLPDNDVMNAFWRNIWSVPVTHTEGDWMQEVQRACEPIQEMGDIIISPQDVASAVRPMSNWKSPGPDGLHNFWLKWLRGSHARLASQFQSSLESGSLPQFLTTGVTHLLHKSGSTAEPKNYRPITCLPTVYKVLTSILRAKINNHIDNNSIMSASQNGCRNGSRGTKELLLIDMAISQQVRRSRKDLSTCWIDYKKAYDSVPHTWLMRVLELYKVNTTLCAFLTSCMGQWRTVLHYPGCRQIQRMGEPIRIERGIFQGDSLSPLWFCLALNPLSTLLEGSGLGYRLRRGGQVISHLLYMDDLKLFAPNNLQLLELLKVTETFSNSIRMEFGVDKCAVMHVKRGRIMESVGTQLSDSIHLRSLSSTETYKYLGMSEALGVNETGMKQSLKERFFGRLKKVFNSLLSGGNKVRAFNGWVMPVLMYSFGILKWTQTELDALDRRVRSLLTANRMHHPRSSVMRLYIPRKCGGRGFLNAKTLHNREVCSLREYFSQADVGMHRDVVAVDKGFTPLSLAKENWRKPVVLDTNDRREVWRSKELHGRFYRALHGPDVDFLASVAWLRFGDLFGETEGFVCAIMDEVMMTNNYRKYIMKDGTVDICRACHCPGESIRHIVSGCSRLANGEYLHRHNLVARIIHQQLALKYNLVDSEVPYYKYVPDPVLENGHVTLYWDRSIITDRTTAANKPDIVVIDRSERLTVIVDITVPHDENLVKAEKDKEIKYQDLAHEVVAMWDVDSAIIVPIVVTANGLIAKSLDQHLKRLSLGSWIKGLIQKAVLLDTARIVRKFLSLRP

SEQ ID NO: 11552 - protein, 970 aa, Amphipyra tragopoginis
MSRDIQRDNNKNNKNRALVCALDSLLSSYFESSEDLGDTHSILYCAAVAACRVANVKFNNSERATRPKPAVPVWQCRIERRIDGARALIGKLICFREGNTRPRVMRFVRRAFSGTGISPREYMSRVTERIDFLKQKVCAWASRIRKRRVERYTQNRMFQCDQRWLYRAWERPEQGVSDGRLPDDDAMSSFWRSIWSVPVTHTEGDWMRDIERACEPIEEMGEILISPHDVASAARPLPNWKSPGPDGLHNFWIKWLRSSHARLASQFQSSLESGSLPQFLTTGVTHLLHKSGSTAEPKNYRPITCLPTVYKLLTSILRSKINTHVENNSVMSSSQNGCKNGSRGTKELLLIDMAISQQVRRSRKNLSTCWIDYKKAYDSVPHAWLMRVLELYKINTTLRTFLRSCMGQWRTVLRYPGCQLIRGSDVPIRIERGIFQGDSLSPLWFCLALNPLSTLLEGSGLGYPLRRGGQVVSHLLYMDDLKLFAPTKLQLVELLKVTETFSNSIRMEFGVDKCAVMHVRRGEIMESEGLQLSDSIHLRPLSANDTYKYLGMSEGLGISEADMKQSLRERFFGRPKKVLKSLLSGGNRVRAFNGWVMPVLMYSFGILKWTQTELDALDRRVRSLLTANRMHHPRSSVMRLYIPRKCGGRGLLNAKTRHNREVCSLREYFLRADAGMHRDVVAVDKGLTPLNLAKENWRKPVVLSTNDRREIWQSKELHGRFYRALYGPDVDFQASVSWLRFGDLFGETEGFVCAIMDEVIMTNNYRKYIVKDGTVDICRACHCPGESLRHIISGCSRLANGEYLHRHNQVARIIHQQLALKYNLVESEVPYYKYVPDPVLENGHITLYWDRSIIADRTIIANKPDIVVIDRSERRTMIVDVTIPHDENLVKAENDKQIKYLDLAHEVVNMWYVDSATIVPIVVTANGLMAKSLDQHLKRLSLGGWIKGQIQKAVLLDTARIVRRFLSLEP

SEQ ID NO: 11553 - protein, 1204 aa, Amphipyra tragopoginis
MIKRSRAKTQSTQPPPSASSLSSASQPPEPASIVSDVTPAAAVASSSSDEYYSPPTSPPPARRRGRGRPPACLGPRGPPASDRVPASGGSVQRMRWTQSMNENCMRAYFGATEGGTNLTAYRGRMLSLFQALEPAVNVSAQRLSDQVRVIQRDHRLDGAALDRLRSEMQSSHVVPLQSQTAVQSQVPSVVAPRSIPADEESDDRVTNVSTQSNEQLRSALELAFRECRSTLPDLRPRLPRLPMNNKNKALMCALDSLLSSYFDGSEDLADTHSILYCAAVAACRVAHVKVDNNDRATRPKPAVPAWQCRIERRIGEARALIGKLICFREGNTRPRVMRFVRRAFSGTDTSPRDYMSRVAERIDFLKQKVYAWANRIRRYKRRVERYTQNRMFQRDQRWVYRAWERPDQGVRDVHLPDDDAMNSFWRSIWSVPVSHAEGDWMRDVERVCEPILDMGAISISPQDVASAARPLPNWKSPGPDGLHNFWLKWLRSSHARLASQFQSSLETGTLPQFLTTGVTHLLHKSGSTAEPKNYRPITCLPTVYKLLTSILRRKISSHIENNSIMSASQNGCRNGSRGTKELLLIDMAISQQVRRSRKDLSTCWIDYKKAYDSVPHTWLLRVLELYKVNTTLCAFLTSCMGQWRTVLRYPGCRQIQGIGEPIRIERGIFQGDSLSPLWFCLALNPLSTLLEGSGLGYRLRRGGQVISHLLYMDDLKLVAPNNLQLLDLLKVTETFSNSIRMEFGVDKCAVMHVKRGRIMESVGTQLSDSIQLRSLSSTETYKYLGMSEALGINEADMKQSLRERFYGRLKKVLKSLLSGGNKVRAFNGWVMPVLMYSFGILKWTQTELDALDRRVRTLLTAYRMHHPRSSVMRLYIPRKCGGRGFLNAKTLHNREVCSLREYFSQADVGMHRDVVAVDKGLTPLSLAKENWRKPAVLDTNGRKDVWRSKELHGRFYRALHGPDVDFLASVAWLRFGDLFGETEGFVCAIMDEVMMTNNYRKYVVKEGTVDICRACHCPGESIRHIVSGCSRLANGEYLHRHNLVARIIHQQLALKYNLVDAEVPYYRYVPDPVLENGHITLYWDRSIITDRTIVANKPDIVVIDRSERRAVIVDVTVPHDENLVKAENDKKIKYLDLAREVVDMWEIDSAVIVPIVVTANGLIAKSLDQHLMRLSLGSWIKGLIQKAVLLDTARIVRKFLSLEP

SEQ ID NO: 11554 - protein, 1205 aa, Amphipyra tragopoginis
MLTRSRAKTQQSTHLPPSASSLSSASQPPEPASIVSDVTPAAAVASSSSDEYFSPATTPPPARRRGRGRPPACLGPRGPPASDRVPAPGGSVQRMRWTQSMNENCMRAYFGATEGGTNLTAYRGRMLSLFQALEPAVNVSAQRLSDQVRVIQRDHRLDDAALDRLRNEMQNSHVTPLPAQIRTQPLVPPAVPLEPNHGDGEEEDRAISAGTQYSELMRSALEDALREFRSTPPELRPRLPRLPMHNKNRALVCALDLLLSNVLESSEDLGDTHSILYCAAVAACRVAHVKFPNDNRATRPKSAVPAWQCRIERRIDEARVLIGKLTCFREGNRRPRVMRFVRRAFSGTDIGPGEYVSRITERIDFLKQKVYAWANRIRRYRRRVDRYTQNRIFQSDQRWVYRTWERPDQGVSDAHLPDNDVMNAFWRNIWSVPVTHTEGDWMQEVQRACEPIQEMGAVTIGPQDVASAVRPIPNWKSPGPDGLHNFWIKWLRSSHARLASQFQSSLESGSLPSFLTTGVTHLLFKSGSTAEPKNYRPITCLPTVYKLLTSILRAKLNHHIDSNAIMCATQNGCRNGSRGTKELLLIDMAISQQVRRSRKDLSTCWIDYKKAYDSVPHTWLMRVLELYKINATLRTFLMSCMGQWRTVLHYPGCRQIQGNGELIRIERGIFQGDSLSPLWFCLALNPLSTLLEGSGLGYRLRRGGQVISHLLYMDDLKLFAPNNLQLLELLKVTETFSNSIRMEFGVDKCAVMHVKRGRIMESVGTQLSDFIHLRSLSSTETYKYLGMSEALGINEADMKQSLRERFFGRLIKVLKSLLSGGNKVRAFNGWVMPVLMYSFGILRWTQTELDALDRRVRTLLTAYRMHHPRSSVMRLYIPRKCGGRGFLNAKTLHNREVCSLREYFSQADVGMHRDVVAVDKGLTPLSLAKENWRKPVVLDTNGRRDVWRSKELHGRFYRALHGPDVDFLASMAWLRFGDLFGETEGFVCAIMDEVMMTNNYRKYIVKDGTVDICRACHCPGESIRHIVSGCSRLANGEYLHRHNLVARIIHQQLALKYNLVDTEVPYYRYVPDPVLENGHVTLYWDRSIITDRTIVANKPDIVVIDRLERRTMIVDITVPHDENLVKAENDKKIKYLDLAHEVVDMWDVDSAVIVPIVVTANGLIAKSLDQHLMRLSLGSWIKGLIQKAVLLDTARIVRKFLSLEP

SEQ ID NO: 11555 - protein, 1198 aa, Amphipyra tragopoginis
MLTRARSKAARPPPPDSPLSSASQPPELGPPVTPAAAAASSSSDEYFSPPTSPRPVRRQGRHRPPTSLGPRGPPAPSRVLATGGCVQRMKWTQSINENVMRAYYGSTEGGTNLTAYRVRMLTLFQELEPAINVSAQRLSDQVRVIQRNHRLDDAALDRLRLEVQNSRVTPFPSQTAVHEVNINIVPPRSDYVDGDMDDRAVTVSSQYNDQLRSALEDAIREYRANPELRPRLPRLPMHNKNRALVCALDSLLSSYFESSEDLGDTHSILYCAAVAACRVANVKFNNSERATRPKPAVPAWQCRIERRIDGARALIGKLICFREGNTRPRVMRFVRRAFSGTGISPREYMSQVTERIDFLKQKVCAWASRIRRYKRRVERYTQNRMFQCDQRWVYRAWERPDQGVSDWRLPDDDAMNSFWRSIWSVPVIHTEGDWMRDIERACEPIEEMGEILISPQDVASAARPLPNWKSPGPDGLHNFWIKWLRSSHARLATQFQSSLESGSLPQFFTTGVTHLLHKSGSTAEPKNYRPITCLPTVYKLLTSILRSKINTHIENNSVMSSAQNGCRNGSRGTKELLLIDMAISQQVRRSRKNLSTCWIDYKKAYDSVPHTWLMRVLELYKINATLRTFLMSCMGQWRTVLRYPGCRPIRESGEPIRIERGIFQGDSLSPLWFCIALNPLSTLLEGSGLGYPLRRGGQVVSHLLYMDDLKLFAPTKLQLVELLKVTETFSNSIRMEFGVDKCAVMHVRRGGIMESEGLQLSDSIHLRPLSANDTYKYLGMSEGLGISEADMKQSLRERFFGRLKKVLKSLLSGGNRVRAFNGWVMPVLMYSFGILKWTQTELDALDRRVRSLLTANRMHHPRSSVMRLYIPRKCGGRGLLNAKTLHNREVCSLREYFLHADAGMHRDVVAVDKGLTPLNLAKENWRKPVVLSTNDRREIWQSKELHGRFYRALHGPDVDFQASVSWLRFGDLFGETEGFVCAIMDEVIMTNNYRKYIVKDGTVDICRACHCPGESLRHIISGCSRLANGEYLHRHNQVARIIHQQLALKYNLVESEVPYYKYVPDPVLENGHITLYWDRSIITDRTIVANKPDIVVIDRSERRTMIVDVTIPHDENLVKAEKDKQIKYLDLAHEVVNIWDVDSATIVPIVVTANGLMAKSLDQHLKRLSLGGWIKGLIQKAVLLDTARIVRRFLSLEP

SEQ ID NO: 11556 - protein, 1075 aa, Noctua pronuba
MVLEPAVSVSAQRLSDQVRVIQRNHMLDDTVLDRLRSESRSNPVTPASPMIAVQLQSVTSTSPRSDRGGEEDDNDVISVSTQCNAQLRSALEGAFREYRSTPPELRPRLPRLPMHKKNKALMCALDSQLSNCFDSSKDLADTHSILYCGAVAACRVAHVKFPNNDRATRPKLAVPAWQCRIERRIGEARALIGKLICFREGNTRPRVMRFVRRAFSGTDISFRDYLTRVTERIDFLKQKICAWASRIRRYKRRVDRYTQNRTFQSDERWIYRAWERPDQGVTDTCLPDDDAMCSFWRSIWSVPVSHTEGDWTREVERACDPIPQMGAINISPQDVACAVRPLPNWKSPGPDGLHNFWIKWFQRSHARLASQFQSALESGSLPQFLTTGITHLLHKSGSTTEPKNYRPITCLPTVYKVLTSILRAKINHHIDSNSIMSASQNGCRNGSRGTKELLLIDMAISQQVRRSRRDLSTCWIDYKKAYDSVPHTWLMRVLELYKVDATLRTFLMSCMGHWRTVLRYPGCRQIQGNSEPIKIERRIFQGDSLSPLWFFLALNPLSTLLEGSGLGYRLRRGGQVISHLLYMDDLKLFAPNNLQLMKLLKVTETFSSAIRMEFGVDKCAVMHVKRGEIMESVGTQLSDSIYLRSLSSTETYKYLGMSEALGINTADMKQSLRERFFGRLNKVLGSLLSGGNKVRAFNGWVMPVLMYSFGILKWTQTELDALDRRVRALLTANRMHHPRSSVMRLYIPRKCGGRGFLNAKTLHNREVCSLREYFLEADVGMHRDVVSVDKGLTPLSLANGNWRKPRVLDTNDRKEVWQGKELHGRFYRALHGPDVDFLASVSWLRFGDLFGETEGFVCAIMDEVMMTNNYRKYIVKDGTVDICRACHRPGESIRHIISGCSRLANGEYLHRHNLVARIIHQQLALKYNLVESEVPYYKYAPDPVLDDGNITLYWDRSIITDRTIVANKPDIVVIDRLERRAMIVDITVPHDENLVKAEKDKQFKYLDLAHEIVDMWDVNTAVIVPIVVSANGLIAKSLDQHLKRLALGSWIKGLIQKAVLLDTARIVRGFLSQEP

SEQ ID NO: 11557 - protein, 1204 aa, Noctua pronuba
MLTRLRAKQLAHPPSPGSSLSSASQPPGRATSVSTLSPVAAVASSSSDEFFSPPSTPPPPQRRRGRGRPPAGLGPRGQQAPNRVPAAGGNVSRMRWTQSINEQVMRAYYGATEGGSNLTAYRGRMLSLFQVLEPAVSVSAQRLSDQVRVIQRNHMLDDTVLDRLRSESRSNPVTPASPMIAGLLQSATSTSPRSDHGGEEDDSEVISVSTQCNAQLRSALEGAFREYRSTPPELRPRLPRLPMHKKNKALMCALDSQLSNYFDSSKDLADTHSMLYCGAVAACRVAHVKFPNNDRATRPKLAVPAWQCRIERRIGEARALIGKLICFREGNTRPRVMRFVRRAFSGIDITFRDYLARVTERIDFLKQKICAWASRIRRYKRRVERYTQNRTFQSDERWVYRAWERPDQGVTDTRLPGDDAMCLFWRSIWSVPVSHTEGDWTREVDQACDPIQEMGAIIISPQDVACAVRPLPNWKSPGPDGLHNFWIKWFQRSHACLASQFQLALESGSLPQFLTTGITHLLHKSGSTAEPKNYRPITCLPTVYKVLTSILRAKINQHIENNSIMSASQNGCRNGSRGTKELLLIDMAISQQVRRSRKDLSTCWIDYKKAYDSVPHTWLMRVLELYKVDATLRTFLMSCMRHWRTVLRYPGCRQIQRNSEPIRIERGIFQGDSLSPLWFCLALNPLSTLLEGSGLGYRLRRGGQVISHLLYMDDLKLFAPNNLQLMKLLKVTETFSSAIRMEFGVDKCAVMHVKRGEIMESVGTQLSDSIHLRSLTSTETYKYLGMSEALGINTADMKQSLRERFFGRLNKVLGSLLSGGNKVRAFNGWVMPVLMYSFGILKWTQTELDALDRRVRALLTANRMHHPRSSVMRLYIPRKCGGRGFLNAKTLHNREVCSLREYFLEADVGMHRYVVSVDKGLTPLSLANENWRKPKVLVTNDRKEVWQGKELHGRFYRALHGPDVDFLASVSWLRFGDLFGETEGFVCAIMDEVMMTNNYRKYIVKDGTVDICRACHRPGESIRHIISGCSRLANGEYLHRHNLVARIIHQQLALKYNLVQSEVPYYKYAPDPVLDDGNITLYWDRPIVTDRTIVANKPDIVVIDRLERRAMIVDITVPHDENLVKAEKDKQFKYLDLAREVVDMWDVNTAVIVPIVVSANGLIAKSLDQHLRRLALGSWIKGLIQKAVLLDTARIVRRFLSQEP

SEQ ID NO: 11558 - protein, 1204 aa, Noctua pronuba
MITRSRAKQQKAHPPSPGSSLSSASQPPGRATSVSSVSPVAAVASSSSDEFFSPPSTPSPPRRRGRGRPPAGLGPRGQQAPNRVPAAGGNVSRMRWTQSINENVMRAYYGATEGGSNLTAYRGRMLSLFQVLEPGVSVSAQRLSDQVRVIQRNHMLDDTVLDRLRFDSRSNLVTPASPMIAVQLQNVSSAPPRSDHDGEEDDDEVISVSTQCNAQLRSALEGAFREYRSIPPELRPRLPRLPMHKKNKALVCALDSQLSTCFDSSKDLADTHSILYCGAVAACRVAHVKFPNNDRATRPKLAVPAWQRRIERRIGEARALIGKLICFREGNTRPRVMRFVRRAFSGTGISFRDYLARVTERIDFLKQKICAWANRIRRYKRRVERYTQNRTFQSDERWVYRAWERPDQGVTDTRLPDADAICLFWRSIWSVPVSHTEGDWTREVEQACDPIPEMGAIIISPQDVACAVRPLPNWKSPGPDGLHNFWIKWFQRSHACLASQFQSALESGSLPQFLTTGITHLLHKSGSTAEPKNYRPITCLPTVYKVLTSILRAKINHHIDSNSIMSASQNGCRNGSRGTKELLLIDMAISQQVRRSRRDLSTCWIDYKKAYDSVPHTWLMRVLELYKVDATLRTFLKSCMGHWRTVLRYPGCRQIQGNSEPIRIERGIFQGDSLSPLWFCLALNPLSTLLEGSGLGYRLRRGGQVISHLLYMDDLKLFAPNNLQLMKLLKVTETFSSAIRMEFGVDKCAVMHVKRGEIMESVGTQLSDSIHLRSLSSTETYKYLGMSEALGINTTDMKQSLRERFFGRLNKVLGSLLSGGNKVRAFNGWVMPVLMYSFGILKWTQTELDALDRRVRALLTANRMHHPRSSVMRLYIPRKCGGRGFLNAKTLHNREVCSLREYFLEADVGMHRDVVSVDKGLTPLSLANENWRKPRVLDTNDRKEVWQGKELHGRFYRALHGPDVDFLASVSWLRFGDLFGETEGFVCAIMDEVMMTNNYRKYIVKDGTVDICRACHRPGESIRHIISGCSRLANGEYLHRHNLVARIIHQQLALKYNLVESEVPYYKYAPDPVLDDGNITLYWDRSIITDRTIVANKPDIVVIDRLERRAMIVDITVPHDENLVKAEKDKQFKYLDLAREVVDMWDVSTAVIVPIVVSANGLIAKSLDQHLRRLSLGSWIKRLIQKAVLLDTARIVRRFLSQEP

SEQ ID NO: 11559 - protein, 1198 aa, Spilosoma lubricipeda
MLTRARSRALLPSSDSSLRSALPSSDARTEVPTVAEASSSSSSDEFFSPPTSPTPVRRQGRDRPPTSLGPRGPLTSNRAPAAGGDVRRMKWTQSINENVMRAYFRATELGTNLTAYRVRLVSLFQELEPAVNVSAQRLSDQVRAIQRCHLLHDVVLERIRSDVRGTLTVPSSSHSVDLVATTPQLPHNEYVDEQVESEVMTVSTQCNDRIRSALEDAIQEYRHVDYKNRPRLPRLPIHKRNLALVSALNSLLPDYFGNSEDLSDTHSILYCAAIAVCRVASVKFVEQITTTRPKNEVPAWQCRIERRITETRTLIGKLITFQSGNTRPRVMRFVKQAFLGTTISPQQYMSSVTERIDFLKQKVYAWANRIRRYRKRVDRFIQNRMFQRNEKWVYRKWEEPSLRVGEGRFPDENVTNTFWRNIWSVPITHTEGDWYRDVERSCESITSMEPITISKDDIGCAVRSLPNWKSPGPDGLHNFWLKWFRSSHACLASQYQAAVDSGSLPQFLTTGITHLLYKSGSAMDPKNFRPITCLPTMYKLLTSILRLKISTHINNNLIMSVSQNGCRSGSRGTKELLIIDMTISQQVRRNRKSLATCWIDYKKAYDSVPHTWLLRVLELYKIDTTLCTFLKSCMGQWRTVLRYPGCRQTAVNDVLINIERGIFQGDSLSPLWFCLALNPLSALLEDSGLGYRLQKDDQVISHLFYMDDLKLLAPTKLQLTALLKVTENFSNSIKMEFGVDKCAVMYVKKGVIVESEGTELSDSTRLRSLSATETYKYLGFSQSLGIPEPDMKQSLRERFFGRLKKVLKSLLSGGNKVRAYNGWVMPVLMYSFGILRWTQTELDALDRRVRTLLTAFRMHHPRSSVMRLYIPRKFGGRGLLNAKTLHNREIYNLREYFLHTDVGVHRSVVTVDTGLTPLALAKENWRKPVVLSTNDRREVWKGKELHGRFYRALNGPDIDFKASTSWLRYGDLFGESEGFVCAIMDEVIMTNNYRKYILKDGTVDICRACHRPGESIRHIISGCSRLANGEYLHRHNQVARIVHQQLALKYHLVSSEVPYYRYVPDPVLENGRATLYWDRSIITDRTIVANKPDIVVIDRLERRAMIVDIAVPHDENLVKVEKEKQIKYLDLSHEIVDMWNVDSAIIVPIVVSAHGLIAKSLDQHLKRLTLEGWIKGLMQKAVLLDTARIVRRFLSLEP

SEQ ID NO: 11560 - protein, 1171 aa, Spilosoma lubricipeda
MPEQKYQLSQRRRALHQVTSFSLRRRRQHQQERYRPPDSLGPRGPLTSNRAPAAGGNVRRMKWTHSINENVMRAYFRATELGTNLTAYRVRLVSLFQELEPAVNVSAQRLSDQVRAIQRCHLLDDAVLERIRSDIRNSLAVPSSSHVVDTIVNTTSQLPRSEYIDERVDSEIISVSTQCNDTIRSTLEDAIREYRYVDSNNRPRLSRLPIHKRNLALVSALDSLLPDYFNNSEDLSDTHSILYCAAIAVCRVAGVNFVECKTATRPKNTVPAWQCRIERRIAGTRTLIGKLISFRSGNTRPKVMRFVKQAFLGTTVSPQQYMSCVTERIDFLKQKVYAWANRIRRYRKRTDRYNQNRTFQRNEKWMYQKWEKLSPCMSDEHLPDKNATNYFWRNIWSTPVTHTEGHWCRDVERSCDSITPMEPVRIDKEDVSCAVRSLANWKAPGPDGLHNFWLKWFRSSHAYLASQFQTALDSGSLPQFLTTGITHLLHKSGSTTDPKNFRPITCLPTLYKLLTSILRLKITAHINNNSIISVSQNGCRSGTRGTKELLIIDMTISQQVRRNRKSLATCWIDYKKAYDSVPHTWLLRVLELYKIDTTLCTFLKSCMGQWRTVLRYPGCRQSTMNDVLIKIERGIFQGDSLSPLWFCLALNPLSALLEDSGSGYRLQKDDQVISHLFYMDDLKLLAPTKLQLTALLKVTENFSNSIKMEFGVDKCAVMYVKKGVIVESEGTELSDSTRLRSLSATETYKYLGFSQSLGIPEPDMKQSLRERFFGRLKKVLKSLLSGGNKVRAFNGWVMPVLMYSFGVLRWTQTELDAIDRRVRTLLTAFRMHHPRSSVMRLYIPRKLGGRGLLNAKTLHNREIYNLREYFLHTDVGMHRSVVTVDIGLTPLALAKENWRKPVVLSTNDRREVWKGKELHGRFYRALNGPDIDFKASTSWLRYGDLFGETEGFVCAIMDEVIMTNNYRKYILKDGTVDICLACHRPGESIRHIISGCTRLANGEYLHRHNQVARIVHQQLALKYHLVSSEVPYYRYVPDPVLENGRATLYWDRSIITDRTIVANKPDIVVIDRLERRAMIVDIAVPHDENLVKVEKEKQIKYLDLSHEIVDMWNVDSAIIVPIVVSAHGLIAKSLDQHLKRLTLEVWIKGLVQKAVLLDTARIVRRFLSLEP

SEQ ID NO: 11561 - protein, 1194 aa, Autographa pulchrina
MLTRSRSRRPAPPPSPDSSSSSASQLPDHVPAPAPAVASSSSDEYYSPPTSPTPVRRQERRRPPSSLAPAGQPASNRAPAPGGDVRRMKWTQGINENVMRAYYGATEGGTNLTAYRARMLSLFQGLEPDVNVSAQRLSDQVRVIQRNHRLDDATLDRLRSEVQRSPAASTPSPAVVPVIGSPPTNPADGAEEDGAITVSTQCSEHIRSTLEDTIREFRSTPPGLRPRLPRLPMHNRNKAIMGVLDSLLLVYFGSSEDLSDTHSILYCAALAACRVANVKINNINLDTRPKPAVPAWQCRIERRVAEARALIGKLIAFKDGNSRPRVMRFVRRAFTGTNISPSEYTARVTERIDFFKQKVCAWASRIRRYKCRVDRFHQNRMFQRDQRWVFRTWERPVLGMDDRRLPDEDATNSFWRKFWSVPVSHSEGVWMRDVEESCEPIQEMRAITIGPQDVANAIRPMSNWKAPGPDGLQNFWLKWFRSSHGCLASQFQYAIESDALPQFFTTGSTHLLHKTGSTTDPKNYRPITCLPTIYKLLTSILRVKINEHIDSHSIMSASQNGCRNGSRGTKELLLIDMTICQQVRRSKKNLSTCWIDYKKAYDSVPHSWLMRVLELYKINTTLRAFLSSCMRRWTTVLRYPGCRDIQQSGEPIRIERGIFQGDSLSPLWFCLALNPLSTLLENSRLGYSLRRGSQVISHLLYMDDLKLFASNELQLMGLLKITESFSNSIRMEFGVDKCAVMHVKQGGIVESQGIQLSDSINLRSLSAADTYKYLGMSEALGIDVADMKQSLLTRFFGRLNKVLKSLLSGGNRVRAFNGWVMPVLMYSFGILKWTQTELDALDRRVRTLLTANRMHHPRSSVMRLYIPRKCGGRGFLNAKTLYNREVCNLREYFLQVDVGMHRDVVVVDKGFTPLSLGKENWHKPVVLSVKDRRDVWQSKELHGRFYRSLHGPDVDFLASVAWLRFGDLFGETEGFVCAIMDEVIMTNNYRKYIIKDGTVDICRACHCPGESIRHIISGCSRLANGEYLHRHNQVARIIHQQLALRYKLVEAEVPYYRYVPDPVLDNGHVTLYWDRSIITDRTIVANKPDIVVIDRSERRAMIVDVTIPHDENLVKAEKEKQMKYLDLAHEVVDMWEVDSAIIVPIVITANGIIAKSLDQHLKRLSLGIWVKGLIQKAVLLDTARIVRRFLSLEP

SEQ ID NO: 11562 - protein, 1198 aa, Ochropleura plecta
MLTRSAHARSARHPPPGSSLSSASPPPEPSLVVSAVTPAVAVASSSSDEYFSPPTTPPPVRRRGRHRPPDGLGPRGPPASDRVPALGGSVQRMRWTQSINENVMRSYYGATEGGNNLTAYRVRMLSLFQVLEPAVNVSAQRLSDQVRVIQRNRMLDDTVLDRLRTEMQSSQVITSSSQVVVPPQSHQVVNRANEVSNGMATNVSTQCSEEMRSTLEGAIREYRYMSPELRPRLPRLPMHNKNRALVAALDSQLSSYFDNCENLTDAHSILYCAAVAACRVAHVKFPDDRATRPKPAIPFWQCRIERRIGAARALIGKLICFREGNTRPRVMRFVRRAFAGTDISPPDYMSRIAERIDFLKQKVYAWANRIRRYKRRVERYTQNRTFQSDERWVYRAWERPDQGVSDTHLPDDDAMCLFWRSIWSVPVSHTEGEWTREVERACDPIPEMGVLTISPQDVACAVRPLPNWKSPGPDGLHNFWIKWIQRSHVRLAALFQSALESGSLPKFLTTGITHLLHKSGSTAEPKNYRPITCLPTLYKVLTSILRAKITKHIDDNSIMSASQNGCRNGSRGTKELLLIDMAISQQVRRSRRHLSTCWIDYKKAYDSVPHTWLMRVLEMYKVDATLRTFLSSCMRQWSTVLRYPGCRQFQMNSEPIRIERGIFQGDSLSPLWFCLALNPLSTLLENSGLGYRLRRGGQVISHLLYMDDLKLFAPNDLQLMELLKVTETFSSAIRMEFGVDKCAVMHVKRGEIVESVGTQLSDSINLRSLSATETYKYLGMSEALGINGADMKQSLKERFFGRLRKVLNSLLSGGNKVRAFNGWVMPVLMYSFGILKWTQTELDTLDRKVRTLLTAFRMHHPRSSVMRLYIPRSCGGRGFLNAKTLHNREICSLREYFLETDVGMHRDVVAVDKGLTPLSLAKENWRKPVVLDTNDRREVWQSKELHGRFFRALHGPDVDQSASVAWLRSGDLFGETEGFVCAIMDEVMMTNNYRRFIVKDGTVDICRACHRPGESIRHIISGCSRLANGEYLHRHNLVARIIHQQLALKYNLVELEVPYYRYEPDPVLEHGNITLYWDRSIITDRTVVANKPDIVVVDRSERRAMIVDITVPHDENLVKAEKDKQIKYIDLAREVVDMWDVDSAIIVPIVVTANGLIAKSLDQHLRRLSLGSWIKGLIQKAVLLDTARIVRRFLSLEP

SEQ ID NO: 11563 - protein, 961 aa, Ochropleura plecta
MHNKNRALVAALDSQLSSYFDNCENLTDAHSILYCAAVTVCRVAHVKFPDDRATRPKPAIPFWQCRIERRIGAARALIGKLTCFREGNTRPRVMRFVRRAFAGTDISPPDYISRIAERIDFLKQKVYAWANRIRRYKRRVERYTQNRTFQSDERWVYRAWERPDQGVSDTHLPDDNAMCLFWRSIWSVPVSHTEGEWTREVERACDPIPEMGALTISPQDVACAVRPLPNWKSPGPDGLHNFWIKWIQRSHVRLAALFQTALESGSLPKFLTTGITHLLHKSGSTAEPKNYRPITCLPTLYKVLTSILRAKITKHIDDNSIMSASQNGCRNGSRGTKELLLIDMAISQQVRRSRRHLSTCWIDYKKAYDSVPHTWLMRVLELYKIDATLRTFLISCMRQWSTVLRYPGCRQIQRNSEPIRIERGIFQGDSLSPLWFCLALNPLSTLLENSGLGYRLRRGGQVISHLLYMADLKLFAPNDLQLMELLKVTETFSSSIRMEFGVDKCAVMHVKRGEIVESVGTQLSDSINLRSLSATETYKYLGMSEALGINVADMKQSLKERFFGRLRKVFNSLLSGGNKVRAFNGWVMPVLMYSFGILKWTQTELDALDRKVRTLLTTFRMHHPRSSVMRLYIPRSCGGRGFLNAKTLHNREICSLREYFLETDVGMHRDVVAVDKGFTPLSLAKENWRKPVVLDTNDRREVWQSKELHGRFFRALHGPDVDQPASVAWLRSGDLFGETEGFVCAIMDEVMMTNNYRRFIVKDGTVDICRACHRPGESIRHIISGCSRLANGEYLHRHNLVARIIHQQLALKYSLVESEVPYYRYEPDPVLEHGNITLYWDRSIITDRTIVANKPDIVVVDRSERRAMIVDITVPHDENLVKAEKDKQIKYIDLAREVVDMWDVDSAIIVPIVVSANGLIAKSLDQHLKRLSLGSWIKGLIQKAVLLDTARIVRRFLSLEP

SEQ ID NO: 11564 - protein, 1200 aa, Hecatera dysodea
MLTRSRAQAQTAQATSSGSSLSSASQPPGPAPPVSPEIPVAAVASSSSDEYFSPPTTPPPARRRGRGRPPTSLGPRGPPASDRVPAIGGSVQRMRWTQSINVNVMRSYFGATEGGTNLTAYRGRMLSLFQVLEPAVNVSAQRLSDQVRVIQRNNMLDDAVLDRLRLESRSSCVSTASPPVTAQQRTCVLPRPDHDGEEDEDRAISVSSQCNEQLRSALEDAFREYRSTPPELRPRLPRLPMHNKNRALVCALDSQLSIYFDSSENLTDTHSILYCGAAAACRVAHVKLPNSDRVARLAIPAWQCRIERRIGEARALIGKLICFREGNTRPRVMRFVRRAFSGTDISPRDYLTRVTERIDFLKQKVYAWANRIRRYKRRVERYTQNRTFQRNERWVYRAWERPDQGVTDTRLPDDEAMLSFWRNIWSVPVSHTEGDWTREVERACDPIPEMGEINISPQDVARAVRPLPNWKSPGPDGLHNFWIKWFKGSHARLAAQFQTALESGSLPKFLTTGITHLLHKSGSTSEPKNYRPITCLPTVYKVLTSILRAKINNHIDSNSIMSASQNGCRNGSRGTKELLLIDVAISQQVRRSRRDLSTCWIDYKKAYDSVPHTWLMRVLELYKVDAVLRTFLMSCMGQWRTVLHYPGCRQTQANSEPIRIERGIFQGDSLSPLWFCLALNPLSTLLEGSGQGYRLRRGGQVISHLLYMDDLKLFAPNNLQLMKLLKVTETFSSDISMEFGVDKCAVMHVKRGEIMESVGTQLSDSIHLRSLCSTETYKYLGMSEALGINATGVKQSLKERFFGRLNKVLNSLLSGGNKVRAFNGWVMPVLMYSFGILKWTQTELDALDRRVRSLLTANRMHHPRSSVMRLYIPRKCGGRGFLNAKTLHNREVCSLREYFLEADVGMHRDVVAVDKGLTPLSLANENWRKPVVLDTNDRREVWKSKELHGRFYRVLHGPDVDFLASVAWLRFGDLFGETEGFICAITDEVMMTNNYRKYIVKDGTVDICRACHRPGESIRHIISGCSSLANGDYLHRHNLVARIIHQQLALKYNLVESEVPYYRYAPDPVLENGNCTLYWDRSIITDRTIVANKPDIVVIDRLERRAMIVDIAVPHDENLVKAEKDKQSKYLDLAHEVVDMWNVNTAVIVPIVVTANGIIAKSLDQHLKRLSLGSWIKGLIQKAVLLDTARIVRRFLSREP

SEQ ID NO: 11565 - protein, 1200 aa, Hecatera dysodea
MLTRSRTRCQNTRLTPSDSSLSSASQPPGPTPPVSPEIPVAAVASSSSDEYFSPPTTPPPARRRGRGRPPNSLGPRGPPASDRVPAIGGSVQRMRWTHSINENVMRSYFGATEGGTNLTAYRGRMLSLFQVLEPAVNVSAQRLSDQVRVIQRNRMLDDAVLDRLRLESRSSRVSPASPPAAVQIQPSISPRPDHVSEDVDDGTISVSTQCNERLRSALEDAFREYRSTPPELRPRLPRLPMHNKNRALVCALDSQLSIYFDSSENLTDTHSILYCGAAAACRVAHVKLLNSDRVARPAVPAWQCRIERRIAEARALIGKLICFREGNTRRRVMRFVKRAFSGTDISPRDYLTRVTERIDFLKQKVYAWANRIRRYKRRVERYTQNRIFQNNERWVYRAWERPDQGVTDTHLPDDEAMLSFWRNIWSVPVSHTEGDWTREVERACDSIPEMGAINISPQDVARAVRPLPNWKSPGPDGLHNFWIKWLTRSYARLASQFQSALESRSLPQFFTTGITHLLHKSGSTADPKNYRPITCLPTVYKVLTSILRAKINDHIESNSIMSTSQNGCRSGARGTKELLLIDVAISQQVRRSRKDLSTCWIDYKKAYDSVPHTWLMRVLELYKVDAVLRAFLMSCMGQWRTVLHYPGCRQTQANSEPIRIERGIFQGDSLSPLWFCLALNPLSTLLEGSGQGYRLRRGGQVISHLLYMDDLKLFAPNNLQLMKLLKVTETFSSDISMEFGVDKCAVMHVKRGEIMESVGTQLSDSILLRSLCSTETYKYLGMSEALGINATSVKQSLKERFFGRLNKVLNSLLSGGNKVRAFNGWVMPVLMYSFGILKWTQTELDALDRRVRSLLTANRMHHPRSSVMRLYIPRKCGGRGFLNAKTLHNREVCSLREYFLEADVGMHRDVVAVDKGFTPLSLANENWRKPVVLDTNDRREVWQSKELHGRFYRVLHGPDVDFLASVAWLRFGDLFGETEGFICAITDEVMMTNNYRKYIVKDGTVDICRACHRPGESIRHIISGCSSLANGDYLHRHNLVARIIHQQLALKYNLVESEVPYYRYAPDPVLENGNCTLYWDRSIITDRTIVANKPDIVVIDRLERRAMIVDIAVPHDENLVKAEKDKQSKYLDLAREVVDMWDVNTAVIVPIVVTANGIIAKSLDQHLKRLSLGSWIKGLIQKAVLLDTARIVRRFLSREP

SEQ ID NO: 11566 - protein, 1200 aa, Mythimna impura
MLTRSRAREQETHPTSSGSSFSSASQPPGPAPAVSPVIPAAAVASSSSDEYFSPPTTPPPARRRGRGRPPASLRPRGPPASDRVPAAGGSVQRMRWTQSINENVMRSYFGATEGGSNLTAYRGRMLSLFQVLEPTVNVSAQRLSDQVRVIQRNRMLDDAVLDRLRLESQRSRASSATPPAAVQLQPSALPRPDHVGDADDDAAISVSTQCNERLRSALEDAFREYRSTPPGLRPRLPRLPMHKRNRALVCALDSQLSNCFDSSKDLADTHSILYCAAAAACRVAHVKFPNCDRATRPAVPAWQRRIERRIGEARALIGKLICFREGNTRPRVMRFVRRAFLGTDISPQNYLPCVTERIDFLKQKVYAWASRIRRYKRRVERYTQNRTFQSNERWVYRTWERPDQDVTDTRLPDDDAMCSFWRRIWSVPVSHIEGDWIREVERTCDLLPEMGAITISPQDVARAVRPLPNWKSPGPDGLHNFWIKWFQGSHARLASQFQSALESGSLPEFLTTGITHLLHKSGSTADPKNYRPITCLPTVYKVLTSILRAKINTHIETNSIMSASQNGCRNGARGTKELLLIDMAISQQVRRSRKDLSTCWIDYKKAYDSVPHTWLMRVLELYKVDTTLRTFLMSCMGQWRTVLHYPGCRQIRENSEPIRIERGIFQGDSLSPLWFCLALNPLSTLLEGSGLGYRLKRGGQVISHLLYMDDLKLFAPNNLHLMELLKVTETFSSAIRMEFGVDKCAVMHVKRGEIMESVGTQLSDSIYLRSLCSTETYKYLGMSEALGINAADVKQSLKERFFGRLNRVLKSLLSGGNKVRAFNGWVMPVLMYSFGILKWTQTELDALDRRVRTLLTANRMHHPRSSVMRLYIPRKCGGRGFLNAKTLHNREVCSLREYFLETDVGMHRDVVAVDKGLTPLSLANGNWRKPIILDTNDRREVWQSKELHGRFYRALHGPDVDLLASVSWLRFGDLFGETEGFVCAIMDEVVMTNNYRKYIVKDGTADICRACHRPGESIRHIISGCSHLANGDYLHRHNLVARIIHQQLALKYNLVESEVPYYKYVPDPVLDNGSITLYWDRSIITDRTIVANKPDIVVIDRLERRTVIVDIAVPHDENLVKAEKDKQTKYLDLAREVVDMWEVDTAVIVPIVVTANGLISKSLDQHLRRLSLGSWIKGLIQKAVLLDTARIVRRFLSQEP

SEQ ID NO: 11567 - protein, 1078 aa, Mythimna impura
MLSLFQVLEPAVNVSAQRLSDQVRVIQRNHMLDDTVLDRLRTEMSNHTIAPSSQSVVPVMVPPSYHLSGHVDEEITDMVTHISTQCNNELRSALECAIREYRNMPLELRPRLPRLPMHNKNKALVAALDLQLSNYFDDCKDLTDTHSIMYCAAVAACRLAHVKFPNCDVATRPKPAVPAWQCRIERRIGGARALIGKLICFREGNTRPRVMRFVRRAFSGTDISPRVYMSRVTERIDFLKQKVYAWANRIRRYKRRVDRYTQNRTFRSNERWVYRAWERPDQGVTDACLPDDDAMSSFWRSIWSVPVSHTEGDWTREVERACDPIPQMGAIDISPQDVARAVRPLPNWKSPGPDGLHNFWIKWFTRSHARLAYQFQSALESGSLPQFLTTGITHLLHKSGSTAEPKNYRPITCLPTVYKVLTSILRSKINSHIDKNLIMSPSQNGCRNGSRGTKELLLIDMTISQQVRRSRKDLSTCWIDYKKAYDSVPHTWLMRVLELYKIDTTLRTFLMSCMRQWSTVLRYPGCRHTQRNSEPVRIERGIFQGDSLSPLWFCLALNPLSTLLENSGLGYRLKRGGQVISHLLYMDDLKLFAPNNLQLMELLKVTETFSSAIRMEFGVDKCAVMHVKRGEVVESVGTQLTDFINLRSLSPTETYKYLGMSEALGINITDMKQTLKERFFGRLKKVFNSLLSGGNKVRAFNGWVMPVLMYSFGVLKWTQTELDALDRKVRTLLTAYRMHHPRSSVMRLYIPRKCGGRGFLNAKTLHNREVCSLREYFLAADVGMHRDVVTVDKGLTPLSLANENWRKPVVLDTNDRREVWQSKELHGRFFRALHGPDVDQLASVAWLRSGDLFGETEGFVCAIMDEVIMTNNYRRFIVKDGTVDICRACHRPGESIRHIISGCSRLANGEYLHRHNLVARIIHQQLALKYSLVESEVPYYRYEPDPVLDNGHITLYWDRSIITDRTIVANKPDIVVVDRSERRAMIVDISVPHDENLVKAEKDKQIKYIDLAREVVDMWDVDSAIIVPIVVSGNGLIAKSLDQHLRRLALGDWIKGLIQKAVLLDTARIVRRFLSLEP

SEQ ID NO: 11568 - protein, 1129 aa, Mythimna impura
MEVCGTCSAYLQSCKFVYNNNNNNNNINENVMRAYYGATEGGNNLTAYRVRMLSLFQVLEPAVNVSAQRLSDQVRVIQRNHMLDDTVLDRLRTEMSNHAIAPSSQPVVPVMVPPSYHLSDHADEEITDMVTNVSTQCNNELRSALECAIREYRNMPLELRPRLPRLPMHNKNKALVAALDLQLSNYFDDCEDLTDTHSIMYCAAVAACRVAHVKFPSCDVSTRPKPAVPAWQCRIERRIGGARALIGKLICFREGNTRPRVMRFVRRAFSGTDISPRDYMSRVTERIDFLKQKVYAWANRIRRYKRRVERYTQNRTFRSNERWVYRAWERPDQGVTDTRLPDDDAMSSFWRSIWSVPVSHTEGDWTREVERACDPIPQMGAIDISPQDVARAVRPLPNWKSPGPDGLHNFWIKWFTRSHARLAYQFQSALESGSLPQFLTTGITHLLHKSGSTAEPKNYRPITCLPTVYKVLTSILRSKINSHIDKNLIMSPSQNGCRNGSRGTKELLLIDMTISQQVRRFRKDLSTCWIDYKKAYDSVPHTWLMRVLELYKIDTTLRTFLMSCMRQWSTVLRYPGCRHIQRNSEPVRIERGIFQGDSLSPLWFCLALNPLSTLLENSGLGYRLKRGGQVISHLLYMDDLKLFAPNNLQLMELLKVTETFSSAIRMEFGVDKCAVMHVKRGEVVESVGTQLTDSINLRSLSPTETYKYLGMSEALGINITDMKQSLKERFFGRLKKVFNSLLSGGNKVRAFNGWVMPVLMYSFGVLKWTQTELDALDRRVRTLLTAYRMHHPRSSVMRLYIPRKCGGRGFLNAKTLHNREVCSLREYFLATDVGMHRDVVAVDKGLTPLSLANENWRKPVVLDTNDRREVWQSKELHGRFFRAFHGPDVDQLASVAWLRFGDLFGETEGFVCAIMDEVIMTNNYRRFIVKDGTVDICRACHRPGESIRHIISGCSRLANGEYLHRHNLVARIIHQQLALKYSLVESEVPYYRYEPDPVLDNGHITLYWDRSIITDRTIVANKPDIVVVDQSERRAMIVDISVPHDENLVKAEKDKQIKYIDLAREVVDMWDVDSAIIVPIVVSANGLIAKSLDQHLRRLALGGWIKALIQKAVLLDTARIVRRFLSLEP

SEQ ID NO: 11569 - protein, 1050 aa, Mythimna impura
MLDDTVLDRLRTEMGSHAIASSSQTVVPSQVSPSNHLPNHADEESTDMVTHVLVSTQCSNELRSALECAIREYRNMPLELRPRLPRLPMCNKNKALVAALDSQLSNYFDDCEDLTDTHSIMYCAAVAACRVAHVKFPNSDVATRPKPAVPAWQCRIERRIGGARALIGKLICFREGNTRPRVMRFVRRAFSGTDISPRDYMSCVTERIDFLKQKVYAWANRIRRYKRRVERYTQNRTFRSNERWVYRAWEQPDQGVADTRLPDDDVMSSFWRNIWSVPVSHTEGGWTREVERACEPIPEMGAITISPQDVARAVRPLPNWKSPGPDGLHNFWIKWLQRSHARLASQYQTALESGSLPEFLTTGVTHLLHKSGSTAEPKNYRPITCLPTVYKVLTSILRAKINHHVDNNAIMSASQNGCRNGSRGTKELLLIDMAISQQVRRSQKDLSTCWIDYKKAYDSVPHTWLMRVLELYKIDATLRTFLMSCMRQWRTVLRYPGCRHIQRNSEPVRIERGIFQGDSLSPLWFCLALNPLSTLLENSGLGYRLKRGGQVISHLLYMDDLKLFAPNNLQLMELLKVTETFSSAIRMEFGVDKCAVMHVKRGEIVESVGTQLSDSINLRSLSPTETYKYLGMSEALGINATDMKQTLRERFFGRLKKVFNSLLSGGNKVRAFNGWVMPVLMYSFGVLKWTQTELDALDRRVRTLLTAYRMHHPRSSVMRLYIPRKCGGRGFLNAKTLHNREVCSLREYFLTADVGMHRDVVAVDKGLTPLSLANESWRKPVVLDTNDRREVWQSKELHGRFFRALHGPDVDQLASVAWLRAGDLFGETEGFVCAIMDEVIMTNNYRRFIVKDGTVDICRACHRPGESIRHIISGCSRLANGEYLHRHNLVARIIHQQLALNYSLVESEVPYYRYVPDPVLDNGDITLYWDRSIITDRTIVANKPDIVVVDRRERRTMIVDISVPHDENLVKAEKDKQIKYIDLAREVVDMWDVDSAIIVPIVVSANGLIAKSLDQHLKRLALGGWIKGLIQKAVLLDTARIVRRFLSLEP

SEQ ID NO: 11570 - protein, 1200 aa, Mythimna impura
MLTRAAARRARPPPPASSLSSASPPPEPCLTVSAVTPAVAAASSSSDEYYSPPTTPPPTRRRGERRPPACLGSRGPPASDRVPATGGCVSRMRWTQSINENVMRAYYGATEGGNNLTAYRVRMLSLFQVLEPAVNVSAQRLSDQVRVIQRNHMLDDTVLDRLRTEMGSHAIASSSQTVVPSQVSPSNHLPNHADEESTDMVTHVSTQCSKELRSALECAIREYRNMPLELRPRLPRLPMCNKNKALVAALDSQLSNYFDDCEDLTDTHSIMYCAAVAACRVAHVKFPNSDVATRPKPAVPAWQCRIERRIGGARALIGKLICFREGNTRPRVMRFVRRAFSGTDISPRDYMSCVTERIDFLKQKVYAWANRIRRYKRRVERYTQNRTFRSNERWVYRAWEQPDQIVTDTRLPDDDAMSSFWRNIWSVPVSHTEGGWTREVERACEPIPEMGAITISPQDVARAVRPLPNWKSPGPDGLHNFWIKWLQRSHARLASQYQTALESGSLPEFLTTGVTHLLHKSGSTAEPKNYRPITCLPTVYKVLTSILRAKINHHVDNNAIMSAFQNGCRNGSRGTKELLLIDMAISQQVRRSRKDLSTCWIDYKKAYDSVPHTWLMRVLELYKIDTTLRTFLMSCMRQWRTVLRYPGCRHIQRNSEPVRIERGIFQGDSLSPLWFCLALNPLSTLLENSGLGYRLKRGGQVISHLLYMDDLKLFAPNNLQLMELLKVTETFSSAIRMEFGVDKCAVMHVKRGEIVESMGTQLSDSINLRSLSPTETYKYLGMSETLGINAIDMKQALKERFFGRLKKVFNSLLSGGNKVRAFNGWVMPVLMYSFGVLKWTQTELDALDRRVRTLLTAYRMHHPRSSVMRLYIPRKCGGRGFLNAKTLHNREVCSLREYFLAADVGMHRDVVAVDKGLTPLSLANESWRKPVVLDTNDRREVWQSKELHGRFFRALHGPDVDQLASVAWLRVGDLFGETEGFVCAIMDEVIMTNNYRRFIVKDGTVDICRACHRPGESIRHIISGCSRLANGEYLHRHNLVARIIHQQLALKYSLVESEVPYYRYMPDPVLDNGDIMLYWDRSIITDRTIVANKPDIVVVDRRERRTMIVDISVPHDENLVKTEKDKQIKYIDLAREVVDMWDVDSAIIVPIVVSANGLIAKSLDQHLRRLALGGWIKGLIQKAVLLDTARIVRRFLSLEP

SEQ ID NO: 11571 - protein, 1200 aa, Mythimna impura
MLTRSRAKKANTHPTSSGSSLSSASQPPGPAPTVSPEIPVAAVASSSSDEYFSPPTTPPPARRRGRGRPPASLGPRGPPASDRVLAAGGSVQRMRWTQSINENVMRSYFGATEGGSNLTAYRGRMLSLFQVLEPAVNVSAQRLSDQVRVIQRNRMLDDAVLDRLRLESRSSRVSPASPQAAVQLQSNVSLRPDHVGEDDDDGAISVSNQCNVRLRSALEDAFREYRFTPAELRPRLPRLPMHKKNRALVCALDSQLSNCFDSSEDLTDTHSILYCAAVAACRVAPVKFPNSDRVTQPAVPAWQCRIERRIGEARALIGKLICFREGNTRPRVMRFVRRAFSGTNISPRDYLPHITERIDFLKQKVYAWANRIRRYKRRVERYTQNRTFQRNERWVYRAWERPDQGVIDTCLPDDDAMCSFWRSIWSVPVSHTEGDWTREIERTCDLIPEMEPITISPQDVARAVRPLPNWKSPGPDGLHNFWLKWFQRSHARLASQFQSSLESGSLPQFLTTGITHLLHKSGSTAEPKNYRPITCLPTVYKVLTSILRAKINSHIETNSIMSASQNGCRNGSRGTKELLLIDVAISQQVRRSRRDLSTCWIDYKKAYDSVPHTWLMRVLELYKVDATLRTFLMSCMRQWRTALHYPGCRQIRESSEPIRIERGIFQGDSLSPLWFCLALNPLSTLLEGSGLGYRLKRGGQVISHLLYMDDLKLFASNNLQLMELLKVTETFSSAIRMEFGLDKCAVMHVKRGEIMESVGTQLSDSIYIRSLCSTETYKYLGMSEALGINAADMKQSLRERFFGRLKKVLNSLLSGGNKVRAFNGWVMPVLMYSFGILKWTQTELDALDRRVRSLLTANRMHHPRSSVMRLYIPRKCGGRGFLNAKTLHNREICSLREYFLKTDVGMHRDVVAVDKGLTPLSLVNENWRKPTVMDTNERRAVWQGKELHGRFYRALHGPDVDLLASVSWLRFGDLFGETEGFVFAIMDEVMMTNNYRKYIVKDGTVDICRACHRPGESIRHIISGCSHLANGDYLHRHNLVARIIHQQLALKYNLVESEVPYYRYVPDPVLENGSVTLYWDRSIITDRTIVANKPDIVVIDRLERRTMIVDIAVPHDENLVKAEKDKQTKYLDLAREVVDMWEVDRAVIVPIVVTANGLIAKSLEQHLRRLSLGSWIKGLIQKAVLLDTARIVRRFLSQEP

SEQ ID NO: 11572 - protein, 1188 aa, Mythimna impura
MLTRAAARRARLPPPASSLSSASPPPESSPTVSAVTPAVAVASSSSDEYFSPPTSPPPARRRRGRRPPSGLGPRGPPASDRVPAPGGSVQRMRWTQSINENVMRAYYGATEGGNNLTAYRVRMLSLFQVLEPAVNVSAQRLSDQVRVIQRNHMLDDTVLDRLRTEMSNHAIAPSSQPVVPVMVPPSYHLSDHADEEITDMVTHVSTQCNNELRSALECAIREYRNMPLELRPRLPRLPMHNKNKALVAALDLQLSNYFDDCEDLTDTHSIMYCAAVAACRVVHVKFPSCDVSTRPKPAVPAWQCRIERRIGGARALIGKLICFREGNTRPRVMRFVRRAFSGTDISPRDYMSRVTERIDFLKQKVYAWANRIRRYKRRVERYTQNRTFRSNERWVYRAWERPDQGVTDTRLPDDDAMSSFWRSIWSVPVSHTEGDWTREVERACDPIPQMGAIDISPQDVARAVRPLPNWKSPGPDGLHNFWIKWFTRSHARLAYQFQSALESGSLPQFLTTGITHLLHKSGSTAEPKNYRPITCLPTVYKVLHENLIMSPSQNGCRNGSRGTKELLLIDMTISQQVRRFRKDLSTCWIDYKKAYDSVPHTWLMRVLELYKIDKTLRTFLMSCMRQWSTVLRYPGCRHIQRNSEPVRIERGIFQGDSLSPLWFYLALNPLSTLLENSGLGYRLKRGGQVISHLLYMDDLKLFAPNNLQLMELLKVTETFSSAIRMEFGVDKCAVMHVKRGEVVESVGTQLTDSINLRSLSPTETYKYLGMSEALGINITDMKQSLKERFFGRLKKVFNSLLSGGNKVRAFNGWVMPVLMYSFGVLKWTQTELDALDRRVRTLLTAYRMHHPRSSVMRLYIPRKCGGRGFLNAKTLHNREVCSLREYFLATDVGMHRDVVAVDKGLTPLSLANENWRKPVVLDTNDRREVWQSKELHGRFFRAFHGPDVDQLASVAWLRFGDLFGETEGFVCAIMDEVIMTNNYRRFIVKDGTVDICRACHRPGESIRHIISGCSRLANGEYLHRHNLVARIIHQQLALKYSLVESEVPYYRYEPDPVLDNGHITLYWDRSIITDRTIVANKPDIVVVDRSERRAMIVDISVPHDENLVKAEKDKQIKYIDLAREVVDMWDVDSAIIVPIVVSANGLIAKSLDQHLRRLALGGWIKALIQKAVLLDTARIVRRFLSLEP

SEQ ID NO: 11573 - protein, 1200 aa, Mythimna impura
MLTRAAARRARPPPPASSLSSASPPPEPCLTVSAVTPAVAAASSSSDEYYSPPTTPPPTRRRGERRPPACLGSRGPPASDRVPATGGCVSRMRWTQSINENVMRAYYGATEGGNNLTAYRVRMLSLFQVLEPAVNVSAQRLSDQVRVIQRNHMLDDTVLDRLRTEMGSHAIASSSQTAVPSQVLASNHLPNHADEESTDMVTHVSTQCSNELRSALECAIREYRNMPLELRPRLPRLPMCNKNKALVAALDSQLSNYFDDCEDLTDTHSIMYCAAVAACRVAHVKFPNSDVATRPKPAVPAWQCRIERRIGGARALIGKLICFREGNTRPRVMRFVRRAFSGTDISPRDYMSCVTERIDFLKQKVYAWANRIRRYKRRVERYTQNRTFRSNERWVYRAWEQPDQGVTDTRLPDDDAMSSFWRNIWSVPVSHTEGGWTREVERACEPIPEMGAITISPQDVARAVRPLPNWKSPGPDGLHNFWIKWLQRSHARLASQYQTALESGSLPKFLTTGVTHLLHKSGSTAEPKNYRPITCLPTVYKVLTSILRAKINHHVDNNDIMSASQNGCRNGSRGTKELLLIDMAISQQVRRSRKDLSTCWIDYKKAYDSVPHTWLMRVLELYKIDTTLRTFLMSCMRQWRTVLRYPGCRHIQRNSEPVRIERGIFQGDSLSPLWFCLALNPLSTLLENSGLGYRLKRGGQVISHLLYMDDLKLFAPNNLQLMELLKVTETFSSAIRMEFGVDKCAVMHVKRGEIVESVGTQLSDSINLRSLSPTETYKYLGMSEALGINATDMKQTLRERFFGRLKKVFNSLLSGGNKVRAFNGWVMPVLMYSFGVLKWTQTELDALDKRVRTLLTAYRMHHPRSSVMRLYIPRKCGGRGFLNAKTLHNREVCSLREYFLTADVGMHRDVVAVDKGLTPLSLANESWRKPVVLDTNDRREVWQSKELHGRFFRALHGPDVDQLASVAWLRVGDLFGETEGFVCAIMDEVIMTNNYRRFIVKDGTVDICRACHRPGESIRHIISGCSRLANGEYLHRHNLVARIIHQQLALNYSLVESEVPYYRYVPDPVLDNGDITLYWDRSIITDRTIVANKPDIVVVDRRERRTMIVDISVPHDENLVKAEKDKQIKYIDLAREVVDMWDVDSAIIVPIVVSANGLIAKSLDQHLRRLALGGWIKGLIQKAVLLDTARIVRRFLSLEP

SEQ ID NO: 11574 - protein, 1140 aa, Mythimna impura
MLTRSRAQKLHTHPTSSGSSLSSASQPPGPAPTVSPEIPVAAVASSSSDEYFSPPTTPPPARRRGRGRPPASLGLRGPPASDRVPAAGGSVQRMRWTSSINENVMRSYFGATEGGINLTAYRGRMLSLFQVLEPAVNVSVQRLSDQVRVIQRNRMLDDAVLDRLRLESQSSRVSPATTPAAVQRLRTASPRPVQVGDADDDAAISVSTQCNDRLRGALEDAFREYRSTPPGLRPRLPRLPMHKRNRALVCALDSQLSNCFDSSKDLTDTHSILYCAAVAACRVAHVKFPNCDRATRPAVPAWQCRIEHRIGEARALIGKLICFREGNTRPRVMRFVRRAFSGTDISPRDYLPCVTERIDFLKQKIYAWANRIRRYKRRVERYTRNRTFQSNERWVYRDWERSDQGVTDTRLPDDDAMCSFWRSIWSAPVSHTEGDWIREVERACDLLPEMGAITISPQDVARAVRPLPNWKSPGPDGLHNFWVKWFQRSHVRLASQFQSALESGSLPQFLTTGITHLLHKSGSTAEPKNYRPITCLPTVYKVLTSILRAKINSHIETNSIMSASQNGCRNGSRGTKELLLIDIAISQQVRRSRKNLSTCWIDYKKAYDSVPHTWLMRVLELYKVDATLRTFLMSCMGQWRTVLHYPGCRQIQENNEPIRIERGIFQGDSLSPLWFCLALNPLSTLLEGSGLGYRLKRGGQVISHLLYMDDLKLFAPNNLQLVELLKVTETFSSAIRMEFGVDKCAVIHVKRGEIMESVGIQLSDSIHLRSLCSTETYKYLGMSESLGINTDDVKQSLKERFFGRLNKVLNSLLSGGNKVRAFNGWVMPVLMYSFGILKWTQTELDALDRRVRTLLTANRMHHPRSSVMRLYIPRKCGGRGFLNAKTLHNREVCSLREYFLKTDVGMHRDVVAVDKGLTPLSLANENWRKPIVLDTNDRREVWQSKELHGRFYRALHGPDVDLLASVSWLRFGDLFGETEGFVFAIMDEVMMTNNYRKYIVKDGTVDICRACHRPGESIRHIISGCSHLANGDYLHRHNLVARIIHQQLALKYNLVESEVPYYRYVPDPVLDNGNITLYWDRSIITDRTIVANKPDIVVIDRLERRTMIVDIAVPHDENLVKAEKDKQTKYLDLAREVVDM

SEQ ID NO: 11575 - protein, 1202 aa, Phlogophora meticulosa
MLTRSRARVLNAPKTSSGSSLSSASQLPGPAPDVSPVTPAAAVASSSSDEYYSPPTSPPPVRRCGRGRPPASLGLRGPPASARVPASGGSVQRMRWTQSINENVMRSYYGATEGGTNLTAYRSRMLSLFQVLEPAVNVSAQRLSDQVRVIQRNHMLDDTVLDRLRLNSRSNRVMPASPLVAVQLPSLPIVSPRPDYVGEEDDDAAISVSSQCNVRLRSALEDAFREYRSTPPELRQRLPRLPMHKKNKALMCALDSLLSNSFDNSKDLADTHSILYCAAAAACRVANVKFPNSKKATRPAVPAWQCRIERRIGEARVLIGKLICFREGNTRPRVMRFVRRAFSGTDISSRDYLTRVTERIDFLKQKICAWANRIRRYKRRVERYTQNRTFRSDERWVYRTWERPDQGVTDTFLPDDEAMCLFWRSIWSVPVSHTEGDWTREVERTCEPLPEMGAINISPQDVACAVRPLPNWKSPGPVGLHNFWIKWLKSSHARLASQFQSALESGSLPQFLTTGITHLLHKSGSTAEPKNYRPITCLPTVYKVLTSILRSKINNHIDSTSIMSVSQNGCKNGSRGTKELLLIDMAISQQVRRSRKDLSTCWIDYKKAYDSVPHTWLMRVLELYKIDATLRTFLKSCMGQWRTVLHYPGCRQFQENSEPIRIERGIFQGDSLSPLWFCLALNPLSTLLEGSGLGYRLRRGGQVISHLLYMDDLKLFAHNNLQLMKLLKVTETFSSAIRMDFGVDKCAVMHVKRGGIVESAGTQLSDSIYLRSLSSTETYKYLGMSEALGINTADMKQSLKERFFGRLNKVLNSLLSGGNKVRAFNGWVMPVLMYSFGILKWTQTELDALDRRVRTLLTANRMHHPRSSVMRLYISRKCGGRGFLNAKTLHNREVCSLREYFLETDVGMHRDVVAMDKALTPLSLANENWRKPIVLDTTDRMEIWKSKELHGRFYRVLHGPDVDLSASVSWLRFGDLFGETEGFVCAIMDEVIMTNNYRKYIVKDGTVDICRACHRSGESIRHIISGCSRLANGDYLHRHNLVAKIIHQQLALKYNLVESEVPYYKYVPDPVLENGNITLYWDRSIITDRTIVANKPDIVVIDRLERRTMIVDITVPHDENLVKAEKEKQIKYLDLAREVVDMWDVNTAVIVPIVVTANGIIAKSLDQHLRRLSLGSWIKGLIQKAVLLDTARIVRRFLSQEP

SEQ ID NO: 11576 - protein, 1198 aa, Phlogophora meticulosa
MLTRSAARRARPPPPASSLSSASSPPKPSTIVSTVKPAVPVASSSSDEYFSPPTSPPPARRRRGRRPPDGLGPRGPPASDRVPAPGGSVQRMRWTQSINENVMRSYYGATEGGSNLTAYRVRMLSLFQVLEPAVNVSAQRLSDQVRVIQRNHMLDDVVLDRLRTEMQSSRVITSPSHTVVPPQYNIVLSSFADGEGSDKVTNVSTQYNEELRSALEGAIREYRFMLPALRPRLPRLPMHNKNRALVAALDSQLSNYFDNCDDLTDAHSILYCAAVAACRVAHVKFPNDIATRPKPAVPAWQCRIERRIAGARALIGKLVCYREGNTRPRVMRYVRRAFLGTDISPRDYMSRVTERIDFLKQKVYAWASRIRRYKRRVERYTQNRTFQSNERWVYRAWERPVQGVTDTHLPDDDVMCSFWRNIWSMPVSHTEGDWTREVERACDPIPQMGAITISPEDVARAVRPLPNWKSPGPDGLHNFWIKWLQKSHARLASQFQSALETGSLPQFLTTGITHLLHKSGSTAEPKNYRPITCLPTVYKVLTSILRVKINNHIDSNSIMSASQNGCRNGSRGTKELLLIDTAISQQVRRSRKDLSTCWIDYKKAYDSVPHTWLKRVLELYKVDATLRTFLTSCMGQWRTVLRYPGCRQIQRNSEPIRIERGIFQGDSLSPLWFCLALNPLSTLLEDSGLGYRLKRGGQVVSHLLYMDDLKLFAPSDLQLMELLKVTKTFSSAIRMEFGVDKCAVMHVKRGKIVESVGTQLPDFINFRALSPIETYKYLGMSQALGINAADMKQSLKERFFGRLKKVCNSLLSGGNKVRAFNGWVMPVLMYSFGILKWTQTELDALDRRVRTFLTASRMHHPRSSVMRLYIPRKCGGRGFLNAKTLHNREICSLRDYFLETDVGMHRDVVAVDQGLTPLSLAKENWRKPVVLDTNDRKEVWQSKELHGRFFQALHGPDVDQLASVSWLRFGDLFGETEGFVCAIMDEVIMTNNYRRFIVKDGTVDICRACHRPGESIRHIISGCSRLANEEYLHRHNLVARIIHQQLALKYSLVESEVPYYKYVPDPVLENGSVTLYWDRSIITDRTIVANKPDIVVMDRIERRATIIDVTVPHDGNLVKAEKDKQIKYLDLAREVVDMWDVDSAIVVPIVVSANGLIAKSLDQHLRRLALGSWIKGLIQKAVLLDTARIVRRFLSLEP

SEQ ID NO: 11577 - protein, 948 aa, Phlogophora meticulosa
MRSALEEAFREYRSTPPELGQCLPRLPMHKKNKALMCALDSLLSNSFDNSKDLADTHSILYCAAAAACRVANVKFPNSKKATRPAVPAWQCRIERRIGEARVLIGKLICFREGNTRPRVMRFVRRAFSGTDISSRDYLSRVTERIDFLKQKICAWANRIRRYKRRVERYTQNRTFRSDERWVYRAWERPDQGVIDTCLPDDKAMYSFWRSIWSVPVSHTEGDWTREVEQACEPLPVMGTINISPQDVACAVRPLPNWKSPGPDGLHNFWIKWLKSSHARLATQFQSALESGSLPQFLTTGITHLLHKSGSTAEPKNYRPITCLPTVYKVLTSILRSKINNHIETSSIMSVSQNGCKNGSRGTKELLLIDMTISQQVRRSRKDLSTCWIDYKKAYDSVPHTWLMRVLELYKIDATLRTFLTSCMRQWRTVLHYPGCRQFRENSEPIRIERGIFQGDSLSPLWFCLALNPLSTLLEGSGLGYRLRRGTQVISHLLYMDDLKLFAPNNLQLMELLKVTETFSSAIRMDFGVDKCAVMHVKRGGIVESAGTQLSDSIYLRSLSSTETYKYLGMSEALGINAADMKQSLKERFFGRLNKVLNSLLSGGNKVRAFNGWVMPVLMYSFGILKWTQTELDALDRRVRTLLTANRMHHPRSSVMRLYISRKCGGRGFLNAKTLHNREVCSLKEYFLEADVGLHRDVVAVDKGLTPLSLANENWRKPIVLDTTDRMEIWNSKALHGRFYRVLHGSDVDLLASISWLRFGDLFGETEGFVCAIMDEVIMTNSYRKYIVKDGTVDICRACHRPGESIRHIISGCSRLANGEYLHRHNLVARIIHQQLALKYNLVELEVPYYKYVPDPVLENGNITLYWDRSIITDRTIVANKPDIVVIDRSERRTMIVDITVPHDENLVKAEKEKQMKYFDLAREVVDMWDVNTAVIVPIVVTANGILEV

SEQ ID NO: 11578 - protein, 1198 aa, Phlogophora meticulosa
MLTRSAARRARPPPPASSLSSASSPPKPSTIVSTVKPAVPVASSSSDEYFSPPTSPPPARRRRGRRPPDGLGPRGPPASDRVPAPGGSVQRMRWTQSINENVMRSYYGATEGGSNLTAYRVRMLSLFQVLEPAVNVSAQRLSDQVRVIQRNHMLDDVVLDRLRTEMQSSRVITSPSHTVVPPQYNIVLSSFADGEGSDKVTNVSTQYNEELRSALEGAIREYRFMLPALRPRLPRLPMHNKNRALVAALDSQLSNYFDNCDDLTDAHSILYCAAVAACRVAHVKFPYDIATRPKPAVPAWQCRIERRIAGARALIGKLVCYREGNTRPRVMRYVRRAFLGTDISPRDYMSRVTERIDFLKQKVYAWASRIRRYKRRVERYTQNRTFQSNERWVYRAWERPVQGVTDTHLPDDDVMCSFWRNIWSVPVSHTEGDWTREVERACDPIPQMGAITISPQDVARAVRPLPNWKSPGPDGLHNFWIKWLQKSHARLASQFQSALETGSLPQFLTTGITHLLHKSGSTAEPKNYRPITCLPTVYKVLTSILRVKINNHIDSNSIMSASQNGCRNGSRGTKELLLIDTAISQQVRRSRKDLSTCWIDYKKAYDSVPHTWLKRVLELYKVDATLRTFLTSCMGQWRTVLRYPGCRQIQRNSEPIRIERGIFQGDSLSPLWFCLALNPLSTLLEDSGLGYRLKRGGHVVSHLLYMDDLKLFAPSDLQLMELLTVTKTFSSAIRMEFGVDKCAVMHVKRGKIVESVGTQLPDFINFRALSPIETYKYLGMSEALGINAADMKQSLKERFFGRLKKVCNSLLSGGNKVRAFNGWVMPVLMYSFGILKWTQTELDALDRRVRTFLTASRMHHPRSSVMRLYIPRKCGGRGFLNAKTLHNREICSLRDYFLETDVGMHRDVVAVDQGLTPLSLAKENWRKPVVLDTNDRKEVWQSKELHGRFFQALHGPDVDQLASVSWLRFGDLFGETEGFVCAIMDEVIMTNNYRRFIVKDGTVDICRACHRPGESIRHIISGCSRLANEEYLHRHNLVARIIHQQLALKYSLVESEVPYYKYVPDPVLENGSVTLYWDRSIITDRTIVANKPDIVVMDRIERRATIIDVTVPHDGNLVKAEKDKQIKYLDLAREVVDMWDVDSAIVVPIVVSANGLIAKSLDQHLRRLALGSWIKGLIQKAVLLDTARIVRRFLSLEP

SEQ ID NO: 11579 - protein, 1202 aa, Phlogophora meticulosa
MLTRSRARVLNAPKTSSGSSLSSASQLPGPAPDVSPVTPAAAVASSSSDEYYSPPTSPPPVRRCGRGRPPASLGLRGPPASARVPASGGSVQRMRWTQSINENVMRSYYGATEGGTNLTAYRSRMLSLFQVLEPAVNVSAQRLSDQVRVIQRNHMLDDTVLDRLRLNSRSNRVMPASPLVAVQLPSLPIVSPRPDYVGEEDDDAAISVSSQCNVRLRSALEDAFREYRSTPPELRQRLPRLPMHKKNKALMCALDSLLSNSFDNSKDLADTHSILYCAAAAACRVANVKFPNSKKATRPAVPAWQCRIERRIGEARVLIGKLICFREGNTRPRVMRFVRRAFSGTDISSRDYLTRVTERIDFLKQKICAWANRIRRYKRRVERYTQNRTFRSDERWVYRTWERPDQGVTDTFLPDDEAMCLFWRSIWSVPVSHTEGDWTREVERTCEPLPEMGAINISPQDVACAVRPLPNWKSPGPDGLHNFWIKWLKSSHARLASQFQSALESGSLPQFLTTGITHLLHKSGSTAEPKNYRPITCLPTVYKVLTSILRSKINNHIDSTSIMSVSQNGCKNGSRGTKELLLIDMAISQQVRRSRKDLSTCWIDYKKAYDSVPHTWLMRVLELYKIDATLRTFLKSCMGQWRTVLHYPGCRQFQENSEPIRIERGIFQGDSLSPLWFCLALNPLSTLLEGSGLGYRLRRGGQVISHLLYMDDLKLFAHNNLQLMKLLKVTETFSSAIRMDFGVDKCAVMHVKRGGIVESAGTQLSDSIYLRSLSSTETYKYLGMSEALGINTADMKQSLKERFFGRLNKVLNSLLSGGNKVRAFNGWVMPVLMYSFGILKWTQTELDALDRRVRTLLTANRMHHPRSSVMRLYISRKCGGRGFLNAKTLHNREVCSLREYFLETDVGMHRDVVAMDKALTPLSLANENWRKPIVLDTTDRMEIWKSKELHGRFYRVLHGPDVDLSASVSWLRFGDLFGETEGFVCAIMDEVIMTNNYRKYIVKDGTVDICRACHRSGESIRHIISGCSRLANGDYLHRHNLVAKIIHQQLALKYNLVESEVPYYKYVPDPVLENGNITLYWDRSIITDRTIVANKPDIVVIDRLERRTMIVDITVPHDENLVKAEKEKQIKYLNLAREVVDMWDVNTAVIVPIVVTANGIIAKSLDQHLRRLSLGSWIKGLIQKAVLLDTARIVRRFLSQEP

SEQ ID NO: 11580 - protein, 1199 aa, Laspeyria flexula
MLTRARKREALIPPPDSSLSVASQPPDPVPTTPLTAEAGSSSSSDEYFSPPSSPTPVPRRGRGRPPASLGPRGPPAVNRAPAAGGNVQRMRWSSSVNENVMRAYFAATEGGINLTAYRSRMLALFQDLEPTTKVTAQRLSDQVRAIQRCRMLDDTVLDRLRLECLQNNPTVPLQVNNLNNIISNAITIQADHNLEEVDGISSVDTQCNEEVRVALERALREYRFTSLQFRPRLPRLPMHKKNLALVITLDSLLSDYFDNSENLGDTHSILYCAAVAACRLAGVKFLGIEPPSHERPSTPAWQCRIERRIAGARILIGKLISFRAGNTRPRVMRFVNQAFSGTDVSPNEYLSRVTERIDFLKQKVYAWANRIRRFKKRVDRYTVNRLFQRDQRRVYRNWERPTQEVSDERLPNATATNEFWSSIWSEPVLHSEGEWIWDVERACERIPLMESVVISAEDIASAVRPMANWKSPGPDGLHNFWLRWLRSSHGRLASQFQSALESGSLPEFLTTGCTHLLHKSGSVTEPGNYRPITCLPSVYKLLTSVLRAKITKHIDDTRTMSISQNGCRRGSRGTKELLLVDITISQQVRRSRKDLATCWIDYKKAFDSVPHSWLLRVLELYKVDITLRTFLESCMRQWRTVLTYPGCRLICGNGEPVRIKRGIFQGDSLSPLWFCLALNPLSTLLESSGLGYRLRRGGHVISHLLYMDDLKLIAPTDLQLKGLLKATEDFSKSIKMDFGVDKCAIMHVKRGEIVESDGIQLSDSINFRSLLVTDTYKYLGMSQALGIKETDMKQSLQERFFGRLKKVLNSLLSGGNKVRACNGWVMPLLMYSFGILKWTQTELDTLDRRVRTMLTAYRMHHPRSSVMRLYIPRKCGGRGFLNAKTLHNREVYNLREYFMGKVEGMHRDVVAVDSGLTPLSLAKDNWRRPIVLSTDDRRQVWQSKELHGRFYKALHGPDVDRVASVAWLRFGDLFGETEGFACAIADEVIKTNNYRKYILRDGTVDICRACHRPGESLRHIVSGCSRLANGEYLHRHNQVARIIHQQLALRYKLVDVEVPYYRYAPEPVLENSHTTLYWDRSIITDRTVIANKPDIVVLDRSKRLAVIVDITVPHDENLVKAEKDKQTKYLDLAHEIVDMWDVDSAIIVPIVVTVNGLVAKSLDQHLKRLGLGSWLKGLIQKAVLLGTARIVRRFLSLEP

SEQ ID NO: 11581 - protein, 1050 aa, Xestia xanthographa
MLDDTVLNRLRSESRSNLVTPASPMIAVQQQNIPSAPPRSDYNGEEDRDEVISVSTQCNAQLRSALEGAFREYRSTPPELRPRLPRLPMHNKNKALMCALDSQLSNCFDSSKDLADTHSILYCGAVAACRVAHVKFPNNDRATRPKLAVPAWQCRIERRIGEARALIGKLICFREGNTRPRVMRFVRRAFSGTDISFRDYLARVTERIDSLKQKICAWASRIRRYKRRVERYTQNRTFQSDERWVYRAWERPDQGVTDTRLPDDSAMYSFWRNIWSVPVSHTEGDWTREVEQACDPIPEMGAIIISPQDVARAVRPLPNWKSPGPDGLHNFWIKWFQRSHARLASQFQSALESGSLPQFLTTGITHLLHKSGSVAEPKNYRPITCLPTVYKVLTSILRAKINQHIDSNSIMSASQNGCRNGSRGTKELLLIDMAISQQVRRSRKNLSTCWIDYKKAYDSVPHTWLMKVLELYKIDATLRTFLMSCMGHWRTVLRYPGCRQIQGNSEPIRIERGIFQGDSLSPLWFCLALNPLSTLLERSGLGYLLRRDGQVISHLLYMDDLKLFAPNNLQLTKLLKVTETFSSAIRMEFGVDKCAVMHVKRGKIMESMGTQLSDSIHLRSLSSTETYKYLGMSEALGINTADMKQSLRERFFGRLNKVLGSLLSGGNKVRAFNGWVMPVLMYSFGILKWTQTELDALDRRVRTLLTANRMHHPRSSVMRLYIPRKCGGRGFLNAKTLHNREVCSLREYFLEADGEMHRDVVSVDKGLTPLSLANENWRKPKVLDTNDRKVEWQGKELHGRFYRALHGPDVDFLPSVSWLRFGDLFGETEGFICAIMDKVMMTNNYRKYIVKDGTVDICRACHRSGESIRHIISGCSSLANGVYLHRHNLVARIIHQQLALKYNLVESEVPYYKYAPDPVLDNGHITLYWDRPITTDRTVVANRPDIVVIDRLERRTMIVDITIPHDENLVKAEKDKQFKYLDLAREVVDMWDVGTAVIVPIVVSANGLIAKSLDQHLRRLSLGSWIKGLIQKAVLLDTARIVRRFLSQEP

SEQ ID NO: 11582 - protein, 1198 aa, Xestia xanthographa
MLTRSAAARCARLPPPDSSLSSASPPPEPSPIVSAVTPAVAVASSSSDEYFSPPTTPPPARRRGGRRPPDGLGPRGPPASDRVPAPGGSVQRMRWTQSINKNVMRAYYGATEGGNNLTAYRVRMLSLFQVLEPAVNVSAQRLSDQVRVIQRNRMLDDTVLDRLRTEIQSNHVIATPSQTVVPPQSSIIPNCDNDVSNDMVTNVSTQCNVEMRSALEGAIREYRFMQPDLRPRIPRLPMHNKNRALVAVLDSQLSNYFDNCEDLTDVHSILYCAAVAACRVAHVKFPSDRATRPKPAVPAWQYRIERRIGGARALIGKLVCFREGNTRPRVMRFVRQAFSGTDISPRDYMSRVTERIDFLKQKVYAWANRIRRYKRRVYRYTQNRTFQKDERWVYRAWERPDQGVADMHLPDDDAMCSFWRSIWSVPVSHAEGEWTRVIERACDPISEMGAITISPQDVARAVRQLPNWKSPGPDGLHNFWIKWFTRSHARLATLFQSALESGSLPEFLTTGITHLLHKSGSTAEPKNYRPITCLPTVYKVLTSILRTKISKHIDDNSVMSASQNGCRNGSRGTKELLLIDMAISHQVRRSRKDLSTCWIDYKKAYDSVPHTWLMRVLELYKVDATLRTFLMSCMGQWRTVLRYPGCRQIQRNSEPIRIERGIFQGDSLSPLWFCLALNPLSTLLEDSGLGYRLRKDGQVISHLLYMDDLKLFAPNDLRLMELLKVTETFSNAIRMEFGVDKCAVMHIKRGEIVESVGTQLSDSITLQSLSATETYKYLGMSEALGVNVADMKQSLKERFFGRLKKVLNSLLSGGNKVRAFNGWVMPVLMYSFGILKWTQTELDALDKKVRKLLTAYRMHHPRSSVMRLYIPRKCGGRGFLNAKTLHNREICSLREYFLGTDVGMHRDVVTMDKGLTPLSLAKENWRKPPVLDTNDRREVWQSKELHGRFFRALHGPDVDLSASVAWLRSGDLFGETEGFVCAIMDEVMMTNNYRRFIVKDGTVDICRACHRPGESIRHIISGCSRLANGEYLHRHNLVARIIHQQLALKYNLVESEVPYYRYVPDPVLDNGCITLYWDQSIITDRTIVANKPDIVVVDRSERRAMIVDITVPHDENLVKAEKDKQIKYLDLAREIVDMWEVDSAIIAPIVVSAHGLIAKSLDQYLRRLSLGSWIKGLIQKAVLLDTARIVRRFLSLEP

SEQ ID NO: 11583 - protein, 1026 aa, Xestia xanthographa
MIAVQQQNIPSAPPRSDYNGEEDRDEVISVSTQCNAQLRSALEGAFREYRSTPPELRPRLPRLPMHNKNKALMCALDSQLSNCFDSSKDLADTHSILYCGAVAACRVAHVKFPNNDRATRPKLAVPAWQCRIERRIGEARALIGKLICFREGNTRPRVMRFVRRAFSGTDISFRDYLARVTERIDSLKQKICAWASRIRRYKRRVERYTQNRTFQSDERWVYRAWERPDQGVTDTRLPDDSAMYSFWRNIWSVPVSHTEGDWTREVEQACDPIPEMGAIVISPQDVARAVRPLPNWKSPGPDGLHNFWIKWFQRSHARLASQFQSALESGSLPQFLTTGITHLLHKSGSVAEPKNYRPITCLPTVYKVLTSILRAKINQHIDSNSIMSASQNGCRNGSRGTKELLLIDMAISQQVRRSRKNLSTCWIDYKKAYDSVPHTWLMRVLELYKIDATLRTFLMSCMGHWRTVLRYPGCRQIQGNSEPIRIERGIFQGDSLSPLWFCLALNPLSTLLERSGLGYLLRRDGQVISHLLYMDDLKLFAPNNLQLMKLLKVTETFSSAIRMEFGVDKCAVMHVKRGEIMESVGTQLSDSIHLRSLSSTETYKYLGMSEALGINTTDMKQSLRERFFGRLNKVLGSLLSGGNKVRAFNGWVMPVLMYSFGILKWTQTELDALDRRVRTLLTANRMHHPRSSVMRLYIPRKCGGRGFLNAKTLHNREVCSLREYFLEADGEMHRDVVSVDKGLTPLSLANENWRKPKVLDTNDRKVEWQGKELHGRFYRALHGPDVDFLPSVSWLRFGDLFGETEGFICAIMDEVMMTNNYRKYIVKDGTVDICRACHRPGESIRHIISGCSSLANGEYLHRHNLVARIIHQQLALKYNFVESEVPYYKYAPDPVLDNGHITLYWDRPITTDRTVVANRPDIVVIDRLERRTMIVDITIPHDENLVKAEKDKQFKYLDLAREVVDMWDVGTAVIVPIVVSANGLIAKSLDQHLRRLSLGSWIKGLIQKAVLLDTARIVRRFLSQEP

SEQ ID NO: 11584 - protein, 1205 aa, Cosmia trapezina
MLTRSRAQHLRNTHPTSSGSSLSSASQLPEPAPDVSQVIPAAAVASSSSDEYFSPPTTPPPVRRRGRGRPPASLGPRGPPASDRVPAPGGSVQRMRWTQTVNENVMRAYFGATEGGSNLTAYRGRMLSLFQVLEPAVNVSAQRLSDQVRVIQRNHMLDDVVLDRLRLESRNSRVTSDSPMVAVQLQNLPSASPRPDRVGEEDDSGAISVSSQCNVQLRSALEDAFREYRSTPPGLRPRLPRLPMHKKNKALVCALDSQLSNCFDGSKDLADTHSILYCAAVAACRVAHVKFHNNDRVTRPKPAVPTWQCRIERRIGEARTLIGKLICFREGNTRPRVMRFVRRAFSGMDISPRDYLTCVTERIDFLKQKICAWANRIRRYRRRVERYTQNRTFQSDERWVYRAWERPDQGVADTQLPDDDAMCSFWRSIWSVPVSHTEGDWTREVERACDHIPQMGALTISPQDVARAVRPLPNWKSPGPDGLHNFWIKWFQRSHARLASQFQSALQSGSLPQFLTTGITHLLHKSGSTAEPRNYRPITCLPTVYKVLTSILRAKINKHIDTNSIMSASQNGCGNGSRGTKELLLIDMTISQQVRRSRKDLSTCWIDYKKAYDSVPHTWLMRVLELYKIDATLCTFLMSCMGQWRTVLRYPGCRNIQRNSEPIRIERGIFQGDSLSPLWFCLALNPLSTLLEDSGLGYRLRRGGRVISHLLYMDDLKLFAPNNLQLMELLKVTETFSSAIRMEFGVDKCAVMHVKRGEIVESVRTQLSDSIHLRSLSSLETYKYLGMSEALGINAADMKQSLRERFFGRLNKVLNSLLSGGNKVRAFNGWVMPVLMYSFGILKWTQTELDALDRRVRTLLTANRMHHPRSSVMRLYIPRKCGGRGFLNAKTLHNREVCSLREYFLEADVGMHREVVSVDKGLTPLSLANENWRKPIVLDTNDRREVWQSKELHGRFYRVLHGPDVDFLASVSWLRFGDLFGETEGFVFAIMDEVMMTNNYRKYIVKDGTVDICRACHRPGESIRHIISGCSRLANGDYLHRHNLVARIIHQQLALKYSLVESEVPYYRYVPDPVLENGNITLYWDRSIITDRTIVANKPDIVVIDRLERRTVIVDIAVPHDENLVKAEKDKQIKYLDLAREVVDMWDVDTAIIVPIVVTANGIIAKSLDQHLRRLSLGGWIKGLIQKAVLLDTARIVRRFLSQQP

SEQ ID NO: 11585 - protein, 1205 aa, Cosmia trapezina
MLTRSRAQQLRNTQPTSSGSSLSSASQLPEPAPDVSQVIPAAAVASSSSDEYFSPPTTPPPVRRRGRGRPPASLGPRGPSASDRVPAPGGSVQRMRWTQTVNENVMRAYFGATEGGSNLTAYRGRMLSLFQVLEPAVNVSAQRLSDQVRVIQRNHMLDDVVLDRLRLESRNSRVTSVSPMVAVQLQNLPSASPRPDCVGEEDDSGAISVSSQCNVQLRSALEDAFREYRSAPPGLRPRLPRLPMHKKNKALVGALDSQLSNCFDGSKDLADTHSILYCAAVAACRVAHVKFPNSDRVPRPKPAVPAWQCRIERRIGEARALIGKLICFREGNTRPRVMRFVRRAFSGTDISPRDYFACVTERIDFLKQKICAWANRIRRYRRRVERYTQNRTFQNDERWVYRAWERPDQGVADTQLPDDDAMCSFWRSIWSVPVSHTEGDWTREVERACDHIPQMGALTISPQDVARAVRPLPNWKSPGPDGLHNFWIKWFQRSHARLASQFQSALQSGSLPQFLTTGITHLLHKSGSTAEPRNYRPITCLPTVYKVLTSILRAKINKHIDTNSIMSASQNGCGNGSRGTKELLLIDMTINQQVRRSRKDLSTCWIDYKKAYDSVPHTWLMRVLELYKIDATLRTFLMSCMGQWRTVLRYPGCRNIQRNSEPIRIERGIFQGDSLSPLWFCLALNPLSTLLEDSGLGYRLRRGGQVISHLLYMDDLKLFAPNNLQLMELLKVTETFSSAIRMEFGVDKCAVMHVKRGEIVESVRTQLSDSIHLRSLSSLETYKYLGMSEALGINAADMKQSLRERFFGRLNKVLNSLLSGGNKVRAFNGWVMPVLMYSFGILKWTQTELDALDRRVRTLLTANRMHHPRSSVMRLYIPRKCGGRGFLNAKTLHNREVCSLREYFLEADVGMHRDVVSVDKGLTPLSLANENWRKPVVLDTNDRREVWQSKELHGRFYRVLHGPDVDFLASVSWLRFGDLFGETEGFVFAIMDEVMMTNNYRKYIVKDGTVDICRACHRPGESIRHIISGCSRLANGDYLHRHNLVARIIHQQLALKYSLVESEVPYYRYVPDPVLENGNITLYWDRSIITDRTIVANKPDIVVIDRLERRTMIVDIAVPHDENLVKAEKDKQIKYLDLAREVVDMWDVDTAVIVPIVVTANGIIAKSLDQHLRRLSLGGWIKGLIQRAVLLDTARIVRRFLSQQP

SEQ ID NO: 11586 - protein, 1077 aa, Cosmia trapezina
MHSLFQVLEPALNVSAQRLSDQVRVIQRNHMLDDTVLDRLRNEMQSSRVIAPLSQTIVAPPPPQCNTTQADEGSDGTAANVSTQCNEELRSALEGAIQEYRFVSPELRPRLPRLPMHNKNRALVAALDSQLSNYFDDCEDLTDTHSILYCAAVAACRVAHVKFANDSRATRPKPAVPAWQCRIERRIGGARALIGKLICFREGNTRPRVMRFVKRAFSGTDVIPQDYMSRVTERIDFLRQKVYAWANRIRRYKRRVDQYTQNRTFQSDERWVYRGWERPDQGVTDTRLPDDDAMCSFWRSIWSVPVSHTECDWAREVRRACDPIPEMGAITICPQDVARAVRPLPNWKSPGPDGLHNFWIKWFLGSHARLAAQYQSALQSGSLPQFLTTGITHLLHKSGSTTEPKNYRPITCLPTVYKVLTSILRAKINEHIDTNSIMSASQNGSRNGSRGTKELLLIDMAISQQVRRSRRDLSTCWIDYKKAYDSVPHTWLMRVLELYKVDATLRTFLMSCMGQWRTVLRYPGCRNIQRNSEPIRIERGIFQGDSLSPLWFCLALNPLSTLLENSGLGYRLRRGGQVISHLLYMDDLKLFAPSNLQLMELLKVTETFSSAIRMEFGVDKCAVMHVKRGEIVESVGTQLPDSINLRTLSAAETYKYLGMSEALGINVADMKQSLKERFFGRLKKVFNSLLSGGNKVRAFNGWVMPVLMYSFGILKWTQTELDALDRRVRTLLTAYRMHHPRSSVMRLYIPRKCGGRGFLNAKTLHNREICSLREYFLETDVGMHRDVVAVDKGLTPLSLAKENWRKPVVLDANDRMEVWQSKELHGRFFRALHGPDVNLLASVAWLRSGDLFGETEGFVCAIMDEVIMTNNYRRFIVKDGTVDICRACHRPGESIRHIISGCSRLANEEYLHRHNLVARIIHQQLALKYSLVESEVPYYRYVPDPVLENGHITLYWDRSIITDRTIVANKPDIVVVDRTERRAMIVDITVPHDGNLVKAEKDKQIKYIDLAREVIDMWDVDSAVIVPIVVSANGLIAKSLDQHLRRLSLGSWIKGLIQKAVLLDTARIVRRFLSLEP

SEQ ID NO: 11587 - protein, 1199 aa, Cosmia trapezina
MLTRSAARRARLLPPDSSLSSAPPPPVPSPIESAVTPAMAVASSSSDEYFSPPTSPPPVRRRGGRRPPDGLGPRGPPASDRVPAPGGSVQRMKWTQSINENVMRSYYGATEGGNNLTAYRVRMLSLFQVLEPAVNVSAQRLSDQVRIIQRNHMLDDTVLDRLRSEIQSSHVIAPLSQTVVVPPPPQCNTSHADEGSDDRATNVSTQCNEELRSALEGAIQEYRFISPELRPRLPRLPMHNKNRALVAALDSQLSNYFDNCEDLTDTHSILYCAAVAACRVAHVKFSNDSRATRPKPGVPAWQCRIERRIGGARALIGKLICFREGNTRPRVMRFVRRAFSGTDVSPQDYMSRVTERIDFLKQKVYAWANRIRRYKLRVDRYTQNRTFQSDERWVYRSWERPDQGVADTPLPDDDAMCSFWRSIWSVPVNHTEGDWTGRIERTCDQIPQMGALTISPQDVARAVRPLPNWKSPGPDGLHNFWIKWFQRSHARLASQFQSALQSGSLPQFLTTGITHLLHKSGSTAEPKNYRPITCLPTVYKVLTSILRAKINEHVDTNSIMSASQNGCRNGSRGTKELLLIDMAISQQVRRSRKDLSTCWIDYKKAYDSVPHTWLMRVLELYKVDATLRTFLMSCMGQWRTVLRYPGCRNIQRNSEPIRIERGIFQGDSLSPLWFCLALNPLSTLLEDSGLGYRLRRGGQVISHLLYMDDLKLFAPNNLQLMELLKVTETFSSAIRMEFGVDKCAVMHVKRGEIMESVGTQLSDSINLRALSASETYKYLGMSEALGINVTDMKQSLRERFFGRLRKVFNSLLSGGNKVRAFNGWVMPVLMYSFGILKWTQTELDALDRRVRTLLTAYRMHHPRSSVMRLYIPRKCGGRGFLNAKTLHNREICSLREYFLEADVGMHRDVVAVDKGLTPLSLAKENWRKPVVLDTNDRREVWQSKELHGRFFRVLHEPDVDFLASVAWLRSGDLFGETEGFVCAIMDEVMMTNNYRKYIVKDGTVDICRACHRPGESIRHIISGCSRLANEEYLHRHNLVARIIHQQLALKYNLVESEVQYYRYVPDPVLENGNITLYWDRSIITDRTIVANKPDIVVVDRTERRAMIIDITVPHDGNLVKAEKDKQIKYLDLAREVVDMWDVNSAIIVPIVVSANGLIAKSLDQHLRRLLLGSWIKGLIQKAVLLDTARIVRRFLSLEP

SEQ ID NO: 11588 - protein, 1200 aa, Mamestra brassicae
MLTRSRARAQTAQPISSGSSLSSASQPPGPAPAVSPEIPVAAVASSSSDEYFSPPTTPPPARRRGRGRPPTSLGPRGPPASDRVPAIGGSVQRMRWTQTINENVMRSYYGATEGGTNLTAYRGRMLSLFQVLEPAVNVSAQRLSDQVRVILRNRMLDDAVLDRLRLESRSGRVSPASPPAAVQIQSSISPRSNNVGEDDDDGAISVSTQCNERLRSALEDAFREYRSTPPELRPRLPRLPMHNKNRALVCALDSQLTNCFDSSEDLADTHSILYCAAAAACRVAHVKFLNSDRATRPAVPAWQCRIERRIGEARALIGKLICFREGNTRRRVMRFVRRAFSGTDTSPRDYLTRVTERIDFLKQKIYAWANRIRRYKRRVERYTQNRTFQSNERWVYRAWERPDQGVTDTRLPDDDVMCSFWRNIWSVPVSHTEGDWIREVERACDPILEMGATTISPQDVARAVRPLPNWKSPGPDGLHNFWIKWFTGSHARLASQFQSALESGSLPQFLTTGITHLLHKSGSTAEPKNYRPITCLPTVYKVLTSILRAKINHHIESNSIMSASQNGCRNGSRGTKELLLMDIAISQQVRRSRKDLSTCWIDYKKAYDSVPHTWLMRVLELYKVDAVLRTFLMSCMGQWRTVLRYPGCRQIQVNGDPIRIERGIFQGDSLSPLWFCLALNPLSTLLEGSGQGYRLRRGGQVISHLLYMDDLKLFAPNNLQLMELLKVTETFSSAISMEFGVDKCAVMHVKRGEIMESVGTQLSDSIHLRSLSSTETYKYLGMSEALGINANDMKQSLKERFFGRLNKVLNSLLSGGNKVRAFNGWVMPVLMYSFGILKWTQTELDALDRRVRSLLTANRMHHPRSSVMRLYIPRKCGGRGFLNAKTLHNREICSLREFFLEADVGMHRDVVAVDKGLTALSLANENWRKPVVLDTNDRREVWQSKELHGRFYRVLHGPDVDFLASVAWLRFGDLFGETEGFVCAIMDEVMMTNNYRKYIVKDGTVDICRACHRPGESIRHIISGCSSLANGDYLHRHNLVARIIHQQLALKYNLVESEVPYYRYVPDPVLENGNCTLYWDRSIITDRTIVANKPDIVVIDRLERRAMIVDIAVPHDENLVKTEKDKQTKYLDLAREVVDMWDVNTAVIVPIVVTANGIIAKSLDQHLKRLSLGSWIKGLIQKAVLLDTARIVRRFLSQGP

SEQ ID NO: 11589 - protein, 830 aa, Mamestra brassicae
MIVDITVPHDENLVKAEKDKQIKYIDLAREVVDMWDVDSAIIVPIVVSANGLIATSLDQHLRRLSLGSWIKGLIQKAVLLDTARIVRRFLSLYWSKLPNWKSPGPDGLHNFWIKWFKRSHARLASQFQSALESGSLPQFLTTGITHLLHKSGSTAEPKNYRPITCLPTVYKVLTSILRAKINQHIETNSIMSASQNGCRNRSHGTKELLLIDVAISQQVRRSRRDLSTCWIDYKKAYDSVPHTWLIRVLELYKVDAVLRTFLMSCMGQWRTVLRYPGCRQIQANSDPIRIERGIFQGDSLSPLWFCLALNPLSTLLEGSGQGYRLRRGGQVISHLLYMDDLKLFAPNNLQLMKLLKVTETFSSAISMEFGVDKCAVMHVKRGEIMESVGTQLSDSIHLRSLSSTETYKYLGMSEALGINANDVKQSLKERFFGRLNKVLNSLLSGGNKVRAFNGWVMPVLMYSFGILKWTQTELDALDRRVRSLLTANRMHHPRSSVMRLYIPRKCGGRGFLNAKTLHNREICSLREFFLEADVGMHRDVVAVDKGLTALSLANENWRKPVVLDTNDRREVWQSKELHGRFYRVLHGPDVDFLASVAWLRFGDLFGETEGFVCAIMDEVMMTNNYRKYIVKDGTVDICRACHRPGESIRHIISGCSSLANGDYLHRHNLVARIIHHQLALKYNLVESEVPYYRYVPDPVLENGNCTLYWDRSIITDRTIIANKPDIVVIDRLERRAMIVDIAVPHDVNLVKTEKDKQTKYLDLAREVDDMWDVNTAVIVPIVVTANGIIGKSLDQHLKRLSLGSWIKGLIQKAVLLDTARIVRRFLSQGP

SEQ ID NO: 11590 - protein, 1198 aa, Mamestra brassicae
MLTRAAAQRARLPPPASSLSSASPPPEPSPTVSAVIPAVAVASSSSDEYFSPPTSPPPARRRRGRRPPDGLGPRGPPASDRVPAPGGSVQRMRWTQTINENVMRSYYGATEGGTNLTAYRGRMLSLFQVLEPAVNVSAQRLSDQVRVIQRNRMLDDAVLDRLRLESRNGRVSAASPPAAVQIQFSVSPRPNIVGVYDDDGAISVSTQCNERLRSALEDAFREYRSTPPELRPRLPRLPMHNKNRALVCALDSQLANCFDSSEDLADTHSILYCAAAAVCRVAHVKFPNSDRATRPAVPAWQCRIERRIGEARALIGKLICFREGNTRRRVMRFVRRAFSGTDTSPRDYLTRVTERIDFLKQKIYAWANRIRRYKRRVERYTQNGTFQSNERWVYRAWERPDQGVTDTRLPDDDVMCSFWRNIWSVPVSHTEGDWTREVERACDPIPEMGAITISPQDVARAVRPLPNWKSPGPDGLHNFWIKWFKRSHARLASQFQSALESGSLPQFLTTGITHLLHKSGSTAEPKNYRPITCLPTVYKVLTSILRAKINQHIETNSIMSASQNGCRNRSRGTKELLLIDVAISQQVRRSRRDLSTCWIDYKKAYDSVPHTWLMRVLELYKVDAVLRTFLISCMGQWRTVLRYPGCRQIQANSDPIRIERGIFQGDSLSPLWFCLALNPLSTLLEGSGQGYRLRRGGQVISHLLYMDDLKLFAPNNLQLMKLLKVTETFSSAISMEFGVDKCAVMHVKRGEIMESVGTQLSDSIHLRSLSSTETYKYLGMSEALGINANDVKQSLKERFFGRLNKVLNSLLSGGNKVRAFNDWVMPVLMYSFGILKWTQTELDALDRRVRSLLTANRMHHPRSSVMRLYIPRKCGGRGFLNAKTLHNREICSLREFFLEADVGMHRDVVAVDKGLTALSLANENWRKPVVLDTNDRREVWQSKELHGRFYRVLHGPDVDFLASVAWLRFGDLFGETEGFVCAIMDEVMMTNNYRKYIVKDGTVDICRACHRPGESIRHIISGCSSLANGDYLHRHNLVARIIHQQLALKYNLVESEVPYYRYVPDPVLENGNCTLYWDRSIITDRTIIANKPDIVVIDRLERRAMIVDIAVPHDVNLVKTEKDKQTKYLDLAREVVDMWDVNTAVIVPIVVTANGIIAKSLDQHLKRLSLGSWIKGLIQKAVLLDTARIVRRFLSQGP

SEQ ID NO: 11591 - protein, 1198 aa, Noctua fimbriata
MLTRSAARRARLSPPDPSLSSASPPPESSPVVSAVTPAVAVASSSSDEYFSPPTTPPPVRRRGGRRPPDGLGPRGPPASDRVPAPGGSVQRMRWTQSINANVMRAYYGATEGGNNLTAYRVRMLSLFQVLEPAVNVSAQRLSDQVRVIQRNRMLDDTVLDRLRTEMQSSHVIATPPPQAVVPPQSTIIPNRDNDVSNDIVTNVSTQCSEEMRSALEGAIREYRFMQPDLRPRIPRLPMHNKNRALVAVLDSQLSNYFDNCEDLTDAHSILYCAAVAACRVAHVKFSDDRATRPKPAVPPWQYRIEQRIGGARALIGKLICFREGNTRPRVMRFVRRAFSGTDISPRDYMSRITERIDFLKQKVYAWANRIRRYKRRVDRYTQNRTFQRDERWVYRAWERPDQGVADTRLPDDDAMCSFWRSIWSVPVSHTEGEWTQGVERACDLVPEMGAITISPQDVVRAVRPLPNWKSPGPDGLHNFWIKWFTRSHARLAILFQSALESGSLPEFLTTGITHLLHKSGSTAEPKNYRPITCLPTVYKVLTSILRAKINKHIDDNSIMSASQNGCRNGSRGTKELLLIDMAISQQVRRSRSDLSTCWIDYKKAYDSVPHTWLMRVLELYKVDATLRTFLMSCMGQWRTVLRYPGCRQIQRNSEPIRIERGIFQGDSLSPLWFCLALNPLSTLLEDSGLGYRLRRGGQVISHLLYMDDLKLFAPNDLQLMELLKVTETFSSAIRMEFGVDKCAVMHVKRGEIVESVGTQLSDSINLRSLSATETYKYLGMSEALGINVADMKQSLKERFFGRLKKVFNSLLSGGNKVRAFNGWVMPVLMYSFGILKWTQTELDALDRRVRTLLTAYRMHHPRSSVMRLYIPRKCGGRGFLNAKTLHNREICSLREYFLETDVGMHRDVVAVDKGLTPLSLAKENWRKPVVFDTNYRMEVWQSKELHGRFFRALHGPDVDLSASVAWLRSGDLFGETEGFVCAIMDEVMMTNNYRRFIVKDGTVDICRACHRPGESIRHIISGCSRLANGEYLHRHNLVARIIHQQLALKYNLVELEVPYYKYVPDPVLENGSITLYWDQSIITDRTIVANKPDIVVVDRSERRTMIVDITVPHDENLVKAEKDKKIKYLDLAREVVDMWDVDSAIIVPIVVSAHGLIAKSLDQYLRRLSLGSWIKGLIQKAVLLDTARIVRRFLSLEP

SEQ ID NO: 11592 - protein, 868 aa, Noctua fimbriata
MRFVRRAFSGTDISPRDYMSRITERIDFLKQKVYAWASRIRRYKRRVDRYTQNRTFQRDERWVYRTWERPDQGVADTRIPDDDAMCSFWRSIWSVPVSHTEGEWTRRVERACDLVPEMGAITISPQDVVRAVRPLPNWKSPGPDGLHNFWIKWFTRSHARLAILFQSALESGSLPEFLTTGITHLLHKSGSTAEPKNYRPITCLPTVYKVLTSILRTKINKHIDDNSIMSASQNGCRNGSRGTKELLLIDMAISQQVRRSRRDLSTCWIDYKKAYDSVPHTWLMRVLELYKVDATLRTFLMSCMGQWRTVLRYPGCRQIQRNSEPIRIERGIFQGDSLSPLWFCLALNPLSTLLEDSGLGYQLRRGGQVISHLLYMDDLKLFAPNDLQLMELLKVTETFSSAIRMEFGVDKCAVMHVKRGEIVESVGTQLSDSINLRSLSATETYKYLGMSEALGINVADMKQSLKERFFGRLKKVFNSLLSGGNKVRAFNGWVMPVLMYSFGILKWTQTELDALDRRVRTLLTAYRMHHPRSSVMRLYIPRKCGGRGFLNAKTLHNREICSLREYFLETDVGMHRDVVAMDKGLTPLSLAKENWRKPLVLDTNDRMEVWQSKELHGRFFRALHGPDVDLSASVAWLRSGNLFGETEGFVCAIMDEVMMTNNYRRFIVKDGTVDICRACHRPGESIRHIISGCSRLANGEYLHRHNLVARIIHQQLALKYNFVESEVPYYKYVPDPVLENGSITLYWDQSIITDRTIVANKPDIVVVDRSERRTMIVDITVPHDENLVKAEKDKKIKYLDLAREVVDMWDVDSAIIVPIVVSAHGLIAKSLDQYLRRLSLGSWIKGLIQKAVLLDTARIVRRFLSLEP

SEQ ID NO: 11593 - protein, 1197 aa, Noctua fimbriata
MLTRAAAKRARLSPPDPSLSSASPPPESSPVVSAVTPAVAVASSSSDEYFSPPTTPPPVRRRGGRRPSDGLGPRGPPASDRVPAPGGSVQRMRWTQSINENVMRSYYGATEGGNNLTAYRVRMLSLFQVLEPAVNVSAQRLSDQVRVIQRNRMLDDTVLDRLRTETQSSHVITPSAQAVVLPQSSTIPNRDNDVSNDMVTNVSTQCNEEMRSALEGAIREYRFMQPDLRPRIPRLPMHNKNRALVAVLDSQLSNYFDNCEDLTDAHSILYCAAVAACRIAHVKFSDDRATRPKPAVPPWQYRIERRIGGARALIGKLICFREGNTRPRVMRFVRRAFSGTDISPRDYMSRITERIDFLKQKVYAWASRIRRYKRRVDRYTQNRTFQRDERWVYRTWERPNQGVADTRIPDDDAMCLFWRSIWSVPVSYTEGEWTREVERACDLVPEMGAITISPQDVVRAVPPLPNWKSPGPDGLHNFWIKWFTRSHARLAILFQSALESGSLPEFLTTGITHLLHKSGSTAEPKNYRPITCLPTVYKVLTSILRAKINKHIDDNSIMSASQNGCRNGSRGTKELLLIDMAISQQVRRSRRDLSTCWIDYKKAYDSVPHTWLMRVLELYKVDATLRTFLMSCMGQWRTVLRYPRCWQIQRNSEPIRIERGIFQGDSLSPLWFCLALNPLSTLLEDSGLGYQLRRGGQVISHLLYMDDLKLFAPNDLQLMELLKVTETFSSAIRMEFGVDKCAVMHVKRGEIVESVGTQLSDSINLRSLSATETYKYLGMSEALGINVADMKQSLKERFFGRLKKVFNSLLSGGNKVRAFNGWVMPVLMYSFGILKWTQTELDALDRRVRTLLTAYRMHHPRSSVMRLYIPRKCGGRGFLNAKTLHNREICSLREYFLETDVGMHRDVVAMDKGLTPLSLAKENWRKPLVLDTNDRMEVWQSKELHGRFFRALHGPDVDLSASVAWLRSGDLFGETEGFVCAIMDEVMMTNNYRRFIVKDGTVDICRACHRPGESIRHIISGCSRLANGEYLHRHNLVARIIHQQLALKYNLVESEVPYYKYVPDPVLENGSITLYWDQSIITDRTIVANKPDIVVVDRSERRTMIVDITVPHDENLVKAEKDKKIKYLDLAREVVDMWDVDSAIIVPIVVSAHGLIAKSLDQYLRRLSLGSWIKGLIQKAVLLDTARIVRRFLSLEP

SEQ ID NO: 11594 - protein, 1201 aa, Noctua fimbriata
MLTRSAAARRARLLPPDPSLSSASPPPESSPIVSAVTPAVAVASSSSDEYFSPPTTPPPVRRRGGRRPPDGLGPRGPPASDRVPAPGGSVQRMRWTQSINENVMRSYYGATEGGNNLTAYRVRMLSLFQVLEPAVNVSAQRLSDQVRVIQRNRMLDDTVLDRLRTEMQSSHVITPSAQAVVLPQSTTTSTITNRDNDVSNDMVTNVSTQCNEEMRSALEGAIREYRFMQPDLRPRIPRLPMHNKNRALVAVLDSQLSNYFDNCEDLTDAHSVLYCAAVAACRVAHVKFFDDRATRPKPVVPPWQYRIERRIDGARALIGKLICFREGNTRPRVMRFVRRAFSGTDISPRDYMSRITERIDFLKQKVYAWASRIRRYKRRVDRYTQNRTFQRDERWVYRAWERPDQGVADTRIPDDDAMCSFWRSIWSVPVSHTEGEWTREVERACDLVPEMGAITISPQDVVRAVRPLPNWKSPGPDGLHNFWIKWFTRSHARLAILFQSALESGSLPEFLTTGITHLLYKSGSTAEPKNYRPITCLPTVYKVLTSILRAKINKHIDDNSIMSASQNGCRNGSRGTKELLLIDMAISQQVRRSRRDLSTCWIDYKKAYDSVPHTWLMRVLELYKVDATLRTFLMSCMGQWRTVLRYPGCRQIQRNSEPIRIERGIFQGDSLSPLWFCLALNPLSTLLEDSGLGYQLRRGGQVISHLLYMDDLKLFAPNDLQLMELLKVTETFSSAIRMEFGVDKCAVMHVKRGEIVESVGTQLSDSINLRSLSATETYKYLGMSEALGINVADMKQSLKERFFGRLKKVFNSLLSGGNKVRAFNGWVMPVLMYSFGILKWTQTELDALDRRVRTLLTAYRMHHPRSSVMRLYIPRKCGGRGFLNAKTLHNREICSLREYFLETDVGMHRDVVAVDKGLTPLSLAKENWRKPLVLDTNDRMEVWQSKELHGRFFRALHGPDVDLSASVAWLRCGDLFGETEGFVCAIMDEVMMTNNYRRFIVKDGTVDICRACHRPGESIRHIISGCSRLANGEYLHRHNLVARIIHQQLALKYNLVESEVPYYKYVPDPVLENGSITLYWDQSIITDRTIVANKPDIVVVDRSERRTMIVDITVPHDENLVKAEKDKKIKYLDLAREVVDMWDVDSAIIVPIVVSAHGLIAKSLDQYLRRLSLGSWIKGLIQKAVLLDTARIVRRFLSLEP

SEQ ID NO: 11595 - protein, 1207 aa, Atethmia centrago
MLTRSRARRLRQDTHPTSSVPSLSSASQLPEPAPDVSPVIPAAAVASSSSDEYFSPPTTPPPVRPRGRGRPPASLGLRGPPASDRVPAPGGSVQRMRWTQALNENVMRAYFGATEGGSYLTAYRGRMLSLFQVLEPAVNVSAQRLSDQVRVIQRKHMLDDVVLDRLRIESRNSHVSPASPLVAVQMQNLPGGSPRPDHADEEDDDEAISVSSQCNVRLRSALDDAFREYRSTPPGLRPRLPRLPMHKKNKALVCALDSQLSNYFDSSKDLADTHSILYCAAVAACRVAQVKFPNSDRAPRPKSAVPAWQSRIERRIGETRALIGKLICFREGNTRPRVMRFVKRAFAGTDIRSSRDYLTRVTERIDFLKQKICAWANRIRRYRRRSERYTQNRTFQNDERWVYRTWERPDQGVADTRLPDDDAICSFWRNIWSVPVNHTEGDWTKRIERACDLIPEMGALTILPQDVAHAVRPLPNWKSPGPDGLHNFWIKWFQRSHARLASQFQSALESGSLPLFLTTGITHLLHKSGSTAEPKNYRPITCLPTVYKVLTSILRAKINKHIETNLIMSASQNGCKNGSRGTKELLLIDIAISQQVRRSRKDLSTCWIDYKKAYDSVPHTWLMRVLELYKVDATLRTFLMSCMRQWRTVLCYPGCRYIQRNSEPIRIKRGIFQGDSLSPLWFCLALNPLSTLLENSGLGYRLRRGGQVISHLLYMDDLKLFAPNNLQLMELLKVTKTFSSAIRMEFGVDKCAVMHVKRGGIVESVGTQLSDSIHLRSLSSTETYKYLGMSEALGINVTDMKQSLKQRFFGRLNKVLNSLLSGGNKVRAFNGWVMPVLMYSFGILKWTQTELDALDRRVRTLLTANRMHHPRSSVMRLYIPRKCGGRGFLNAKTLHNREICSLREYFLETDVVMHRDVVSVDKGLTPLSLADENWRKPIILDTNDRREVWQSKELHGRFYRVLHGPDVDLLASVSWLRFGDLFGETEGFVFAIMDEVIMTNNYRKYIVKDGTVDICRACHRPGESIRHIISGCSRLANEDYLHRHNLVAKIIHQQLALKYSLVESEVPYYRYAPDPVLENGNITLYWDRSIITDRTIVANKPDIVVIDRLTRRTMIIDIAVPHDENLVKAEKDKQIKYLDLAHEVVDMWDVDTAIIVPIVVTANGIIPKSLDQHLKRLSLGSWIKGLIQRAVLLDTARIVRRFLSQEP

SEQ ID NO: 11596 - protein, 1201 aa, Mesoligia furuncula
MLTRSRAKQLNKTTHPTSSGSSLSSASPLPEPAPDVSPETPAAAVASSSSDEYFSPPTTPPPPVCRRGRGRPPANLGLRGPPASDRVPAPGGSVQRMRWTQTVNENVMRAYFGATEGGSNLTAYRGRMLSLFQVLEPAINVSAQRLSDQVRVILRNHMLDNVALDRLRLESRNSHVTSASSSVAVQLQNLPNVSQRPDRVDVEDGDEAISVSPQCNARLRSALEDAFCEYRSVPPGLRPRLPRLPMHKKNKALVCALDSQLANYFNDSKDLTDTHSILYCAAVAACRVAHVKFPNSDRAPRPKPAVPAWQCRIECRIGEARALIGKLICFREGNTRPRRAFSGTDISSRDYLSRVTERIDFLKQKICAWANRIRRYRRRMERYTQNRTFQSDERWVYRTWERPDHGVTDTRLPDDDAMCSFWRNIWSVPVSHTEGDWTRKIERTCDLLPEMGVLTISPQDVARAVRPLPNWKSPGPDGLHNFWIKWFQGSHARLASQFQSALESGSLPKFLTTGITHLLHKSGSTADPKNYRPITCLPTVYKVLTSILRAKINKHIDTNSIMSVSQNGCGNGSRGTKELLLIDMTISQQVRRFRKDLSTCWIDYKKAYDSVPHTWLMRVLELYKVDTTLRTFLMSCMGQWRTVLRYPGCRNIQRNSEPIRIERGIFQGDSLSPLWFCLALNPLSTLLEDSGLGYRLRRGGQVISHLLYMDDLKLFAPNNLQLMELLKITETFSSAIRMEFGVDKCAVMHVKRGEIVESVGTQLSDSTNLRALSASETYKYLGMSEALGINVTDMKQSLKERFFGRLKKVFNSLLSGGNKVRAFNGWVMPVLMYSFGILKWTQTELDALDRKVRTLLTANRMHHPRSSVMRLYIPRKCGGRGFLNAKTLHNREICSLREYFLETDVGMHRDVVAVDKGLTPLSLGKENWRKPVVLDTNDRMEVWQSKELHGRFFRALHGPDVDVIASVAWLRFGDLFGETEGFVCAIMDEVMMTNNYKRFIVKDGTVDICRACHRPGESIRHIISGCSRLANGEYLHRHNLVARIIHQQLALKYSLVESEVPYYRYVPDPVLENGNITLYWDRSIITDRTIVANKPDIVVVDRSERRAMIVDITVPHDENLVKAEKDKQVKYLDLAREVVDMWDVDSAIIVPIVVTTNGLIAKSLDQHLKRLSLGSWIKGLIQKAVLLDTARIVRRFLSLEP

SEQ ID NO: 11597 - protein, 1111 aa, Mesoligia furuncula
MRWTQTVNENVMRAYFGATEGGSNLTAYRGRMLSLFQVLEPAINVSAQRLSDQVRVILRNHMLDNVVLDRLRLESRNSHVTSASSSVAVQLQNLPNVSQRPDRVEVEDGDEAISVSPQCNARLRSALEDAFCEYRSVPPGLRPRLPRLPMHKKNKALVCALDSQLSNYFNDSKDLTDTHSILYCAAVAACRVAHVKFLNSDRAPRPKPAVPAWQCRIESRIGEARALIGKLICFREGNTRPRVMRFVRRAFSGTDISSRDYLSRVTERIDFLKQKICAWANRIRRYRRRVERYTQNRTFQSDERWVYRTWERPDHGVTDTCLPDDDAMCSFWRNIWSVPVSHTEGDWTRKIERTCDLLPEMGVLTISPQDVARAVRPLPNWKSPGPDGLHNFWIKWFQGSHARLASQFQSALESGSLPKFLTTGITHLLHKSGSTADPKNYRPITCLPTVYKVLTSILRAKINKHIDTNSIMSVSQNGCGNGSRGTKELLLIDMTISQQVRRFRKDLSTCWIDYKKAYDSVPHTWLMRVLELYKVDTTLRTFLMSCMGQWRTVLRYPGCRNIQRNSEPIRIERGIFQGDSLSPLWFCLALNPLSTLLEDSGLGYRLRRGGQVISHLLYMDDLKLLAPNNLQLMELLKITETFSSAIRMEFGVDKCAVMHVKRGEIVESVGTQLSDSTNLRALSASETYKYLGMSEALGINVTDMKQSLKERFFGRLKKVFNSLLSGGNKVRAFNGWVMPVLMYSFGILKWTQTELDALDRKVRTLLTANRMHHPRSSVMRLYIPRKCGGRGFLNAKTLHNREICSLREYFLETDVGMHRDVVAVDKGLTPLSLGKENWRKPVVLDTNDRMEVWQSKELHGRFFRALHGPDVDLIASVAWLRFGDLFGETEGFVCAIMDEVMMTNNYRRFIVKDGTVDICRACHRPGESIRHIISGCSRLANGEYLHRHNLVARIIHQQLALKYSLVESEVPYYRYVPDPVLENGNITLYWDRSIITDRTIVANKPDIVVVDRSERRAMIVDITVPHDENLVKAEKDKQVKYLDLAREVVDMWDVDSAIIVPIVVTANGLIAKSLDQHLKRLSLGSWIKGLIQKAVLLDTARIVRRFLSLEP

SEQ ID NO: 11598 - protein, 880 aa, Spilarctia lutea
MSFRSGNTRPRVMRFVKRAFLGTTISPQEYMSCVTERIDFLKQKVYAWANRIRRYRKRVDRYNQNRMFQRNEKWVYRKWENLSPCMSDGQVPDENATNSFWRNMWSVPVTHTEGDWYRDVERSCESLLPMEPISIDEEDVSCAVRSLPNWKAPGPDGLHNFWLKWFRSSHACLASQFQTALDSGSLPQFLTTGITHLLYKSGDAMDPKNFRPITCLPTLYKLLTSILRLKITTHINHNSILSISQNGCRSGTRGTKELLIIDMTISQQVRRNRKSLATCWIDYKKAFDSVPHTWLLKVLELYKIDTTLCTFLKVCMGQWRTALRYPGCRQSAMNDVLIKIERGIFQGDSLSPLWFCLALNPLSTLLEGSGLGYRLQKDDRVISHLFYMDDLKLLAPTKLQLTALLKVTENFSNSIKMEFGVDKCAVMYVKKGEIVESEGIELSDSTKLRSLSATETYKYLGFSQSLGMPESDMKQTLRERFFSRLKKVLKSLLSGGNKVRACNGWVMPVLMYSFGVLRWTQTELDAIDRRVRTLLTAFRMHHPRSSVMRLYIPRRLGGRGLLNIKTLHNREVYNLREYFLQTDVGVHRSVVTVDTGLTPLALAKENWRKPVVLSTNDRREVWKGKELHGRFYRALHGPDIDFKTSTSWLRYGDLFGETEGFVCAIMDEVIMTNNYRRYILKDGTVDICRACHRPGESIRHIISGCSRLANGEYLHRHNQVARIVHQQLALKYHLVNSEVPYYRYVPDPVLENGRATLYWDRSIITDRTIVANKPDIVVIDRLERRAIIIDIAVPHDENLVKVEKEKQIKYLDLSHEIVDMWNVDSVIIVPIVVSAHGLIAKSLDQHLKRLTLEGWIKGLIQKAVLLDTARIVRRFLSLEP

SEQ ID NO: 11599 - protein, 1199 aa, Spilarctia lutea
MITRARSRALLPPSDSSRSSALPSSEARTEAPTVAEASSSSSSDEFFSPPTSPTPVRRQGRCRPPDSLGPRGPLTSNRAPATGGNVHRMKWTHSINENVMRAYFRATELGTNLTAYRVRLVSLFQELEPAINVSAQRLSDQVRAIQRCHLLDDAALERIRSDIRNSLTVPSSSHVVDVVTNTTPQVPQNEDVSELVDSEIMSVSNQYNDRIRSTLEDAIREYRYVNFNNRPRLSRLPIHKRNLALVSALDSLLPDYFSNSEDLSDAHSILYCAAIAVCRVAGVKFAENTTTTRQENTVPAWQCRIERRIAEARTLIGKLISFRSGNMRPRVMRFVKRAFLGTTISPQEYMSCVTERIDFLKQKVYAWANRIRRYRKRVDRYNQNRMFQRNEKWVYRKWENLRPCLSDGQVPDENATNSFWHSIWSVPVTHTEGDWYRDVERSCESLLPMEPISINEEDVSCAVRSLPNWKAPGPDGLHNFWLKWFRSSHACLASQFQTALDSGSLPQFLTTGITHLLYKSGDAMDPKNFRPITCLPTLYKLLTSILRLKITTHINHNSILSISQNGCRSGTRGTKELLIIDMTISQQVRRNRKSLATCWIDYKKAFDSVPHTWLLRVLELYKTDTTLCTFLKLCMGQWRTALRYPECRQSAMNDVLIKIERGIFQGDSLSPLWFCLALNPLSTLLEGSGLGYRFQKDDRGISHLLYMDDLKLLAPTKLQLTGLLKVTENFSNSIKMEFGVDKCAVMYVKKGEIVESEGIELSDATKLRSLSVTETYKYLGFSQSLGIPEPDMKQTLRERFFSRLKKVLKSLLSGGNKVRACNGWVMPVLMYSFGVLRWTQTELDAIDRRVRTLLTAFRMHHPRSSVMRLYIPRKLGGRGLLNIKTLHNREVYNLREYFLQTDVGVHRSVVTVDTGLTPLALAKENWRKPVVLSTNDRREVWKGKVLHGRFYRALNGPDIDFKASTSWLRYGDLFGETEGFVCAIMDEVIMTSNYRKYILKDGTVDICRACHRPGESIRHIVSGCSRLANGEYLHRHNQVARIVHQQLALKYNLVSSEVPYYRYVPDPVLENGRATLYWDRSIITDRTIVANKPDIVVMDRLERRAMIVDIAVPHDENLVKVEKEKQIKYLDLSHEIVDMWNVDSAIIVPIVVSAHGLIAKSLDQHLKRLTLGGWIKGLIQKAVLLDTARIVRRFLSLEP

SEQ ID NO: 11600 - protein, 1199 aa, Xestia c-nigrum
MLTRAAARRARLPPPDPSLSSASPPPEPSPIVSAVTPAVAVASSSCDEYFSPPTTPPPARRRGGRRPPDGLGPRGPPASDRVPAPGGSVQRMRWTQSNNENVMRAYYGATEGGINLTAYRVKMLSLFQVLEPAVNVSAQRLSDQVRVIQRNRMLDDTVLDRLRTEVQSSRVTATPPSQAVVPPQSTVTTPYCDGDVSSDMVTNVSTQCSEDMRSALEGAIREYRFMTPELRPRLPRLPMHNKNKMLMAVLDSQLSNYFDSCEDLTDIHSILYCAAVAACRVAHVKFSDDRATRPKPAVPAWQCRIEQRIGGARALIGKMICFREGNTRPRVMRFVRRAFSGTDISPRDYMFRVTERIDFLKQKVYAWASRIRRYKRRVDRYTQNRTFQRDERWVYRAWERPDQGVADTRLPDDDAMCSFWRSIWSVPVSHAEGEWTRVVERACDPAPEMGAITISPQDVACAVRPLPNWKSPGPDGLHNFWIKWFTRSHARLATLFQSALESGSLPEFLTTGITHLLHKSGSTAEPKNYRPITCLPTVYKVLTSILRAKITKHIDENSVMSASQNGCRNGSRGSKELLLIDMAISQQVRRSRKDLSTCWIDYKKAYDSVPHTWLRRVLELYKVDATLRTFLMSCMGQWRTVLRYPGCRQIQRNSEPIRIERGIFQGDSLSPLWFCLALNPLSTLLEDSGLGYRLRKDGRVISHLLYMDDLKLFAPNDFQLMELLKVTETFSSAIRMEFGVDKCAVMHVKRGGIVESVGTQLSDSINLRSLSATETYKYLGMSEALGISVADMKQSLKERFFGRLKKVFNSLLSGGNKVRAFNGWVMPVLMYSFGILKWTQTELDALDTKGRKLLTAYRMHHPRSSVMRLYIPRKCGGRGFLNAKTLHNREICSLREYFLAADVGMHRDVVAMDKGLTPLSLAKENWRIPVVFTTDDRRKEWQSKELHGRFYRALHGPDVDFQASVSWLRSGDLFGETEGFVCAIMDEVMMTNNYRRFIVKDGTVDICRACHRPGESIHHIISGCSRLANGEYLHRHNLVARIIHQQLALKYNLVESEVPYYRYVPDPVLVNGSITLYWDQSIITDRTVIANRPDIVVMDRSERRAMIVDITVPHDENLVKAEKDKQIKYLDLAREVVDMWEVDSAIIVPIVVSAHGLIAKSLGQHLRRLSLGSWIKGLIQKAVLLDTARIVRRFLSLEP

SEQ ID NO: 11601 - protein, 1198 aa, Griposia aprilina
MLTRSAARRARPPPPDSSLSSASLPPVSSPTVSAVTTPAAVVASSSSDEYFSPPTTPPPVRRRGGHRPPDGLGPRGPPASDRVPAPGGSVQRMRWTRSINENVMRSYYGATEGRNNLTAYRVRMLSLFQVLEPAVNVSAQRLSDQVRVIQRNHMLDDTVLDRLRNEMQSSHVIAPPSQTVVVLPQSNTSQADEESDDRATNVSTQCNDELRSALEDAIREYRFISPELRPRLPRLPMHNKNRVLVAALDAQLSNYFDDCVDLTDTHSILYCAAVAACRVAHVKFANDSRATRPKPAVPAWQCRIERRIGEARALIGKLICFREGNTRPRVMRFVRRAFAGTNISPQDYMSCVTERIDFLKQKVYAWANRIRRYKRRVERYTQNRTFQCDERWVYRGWERPDQGVADTCLPDDDAMCSFWRNIWSVPVSHTEGDWTREVERACDPIPEMGAITICPQDVTRAVRPLPNWKSPGPDGLHNFWIKWFGRSHARLAAQYQVALESGSLPQFLTTGVTHLLHKSGSTAEPKNYRPIACLPTVYKVLTSILRDKINKHIDTNYIMSPSQNGCRNGSRGTKELLLIDMAISQQVRRSRKDLSTCWIDYKKAYDSVPHTWLMRVLELYKVEATLRTFLMSCMGQWRTVLHYPACRNTQRNSEPIRIERGIFQGDSLSPLWFCLALNPLSTLLEDSGLGYRLRRGGQVISHLLYMDDLKLFAPNNSQLMDLLKVTETFSSAIRMEFGVDKCAVMHVKRGEIVESVGTQLSDSINLRALSASETYKYLGMSEALGINGTEMKQSLKDRFFGRLKKVFNSLLSGGNKVRAFNGWVMPVLMYSFGILKWTQTELDALDRKVRTLLTANRMHHPRSSVMRLYIPRKCGGRGFLNTKTLHNREICSLREYFLEADVGMHRDVVTVDKGLTPLSLAKENWRKPVVLDTNDRIEVWQSKELHGRFFRALHGPDVDQLASVAWLRFGDLFGETEGFVCAIMDEVMMTNNYRRFIVKDGTVDICRACHRPGESIRHIISGCSRLANEEYLHRHNLVARIIHQQLALKYSLVESEVPYYRYVPDPVLENGHITLYWDRSIITDRTIVANKPDIVMVDRLERRAMIVDITVPHDGNLVKAEKDKQIKYLDLAREVVDMWDVDSAIIVPIVVTANGLIAKSLDQHLRRLSLGSWIKGLIQKAVLLDTARIVRRFLSLEP

SEQ ID NO: 11602 - protein, 962 aa, Griposia aprilina
MHNKNRVLVAALDAQLSNYFDDCVDLTDTHSILYCAAVAACRVAHVKFANDSRATRPKPAVPAWQCRIERRIGEARALIGKLICFREGNTRPRVMRFVRRAFAGTNISPQDYISCVTERIDFLKQKVYAWANRIRRYKRRVERYTQNRTFQRDERWVYRGWERPDQGVADTCLPDDDAMCSFWRNIWSVPVSHTEGDWTREVERACDPIPEMGAITICPQDVTRAVRPLPNWKSPGPDGLHNFWIKWFGRSHARLAAQYQVALESGSLPQFLTTGVTHLLHKSGSTAEPKNYRPIACLPTVYKVLTSILRDKINKHIDTNYIMSPSQNGCRNGSRGTKELLLIDMAISQQVRRSRKDLSTCWIDYKKAYDSVPHTWLMRVLELYKVEATLRTFLMSCMGQWRTVLHYPACRNTQRNSEPIRIERGIFQGDSLSPLWFCLALNPLSTLLEDSGLGYRLRRGGQVISHLLYMDDLKLFAPNNSQLMDLLKVTETFSSAIRMEFGVDKCAVMHVKRGEIVESVGTQLSDSINLRALSASETYKYLGMSEALGINGTDMKQSLKDRFFGRLKKVFNSLLSGGNKVRAFNGWVMPVLMYSFGILKWTQTELDALDRKVRTLLTANRMHHPRSSVMRLYIPRKCGGRGFLNAKTLHNREICSLREYFLEADVGMHRDVVTVDKGLTPLSLAKENWRKPVVLDTNDRMEVWQSKELHGRFFRALHGPDVDQLASVAWLRFGDLFGETEGFVCAIMDEVMMTNNYRRFIVKDGTVDICRACHRPGESIRHIISGCSRLANEEYLHRHNLVARIIHQQLARKYSLVESEVPYYRYVPDPVLENGHITLYWDRSIITDRTIVANKPDIVMVDRLERRAMIVDITVPHDGNLVKAEKDKQIKYLDLAREVVDMWDVDSAIIVPIVVTANGLIAKSLDQHLRRLSLGSWIKGLIQKAVLLDTARIVRRFLSLEP

SEQ ID NO: 11603 - protein, 870 aa, Griposia aprilina
MRFVRQAFSGTNISPREYISCVTERIDFLKQKVYAWANRIRRYRRRVDRYTQNSMFQKDERWVYRAWERPISTQGVTDVLPPDNDTVSAFWRSIWSVPVSHTEGDWMRVVEQACDSIPEMEAISISPLDVARAVRPLPNWKSPGPDGLHNFWIKWLQRSHACLASQFQSSLETGSLPLFFTTGVTHLLHKSGSTAEPKNYRPITCLPTVYEVLTSILRAKIAEHIKNNSIMSVSQNGCKNGSRGTKELLLIDMAISQQVRRSRKDLSTCWIDYKKAYDSVPHTWLIRVLELYKIDATLRTFLISCMGQWRTILLYPGCQQIQRTDEPIRIERGIFQGDSLSPLWICLALNPLSTLLEDSGLGYRLRRGGQVISHLLYMDDLKLFAPNNLRLMELLKVTETFSSAIRMEFGVDKCAVMHVKRGGIMESVGTQLSDSIHLRSLSSTETYKYLGMSEALGINAADMKQSLRERFFGRLNKVLNSLLSGGNKVRAFNGWVMPVLMYTFGILKWTQTELDALDRKVRTLLTAYRLHHPRSSVMRLYIPRKCGGRGFLNAKTLHNREICSLREYFLQTDVGMHRDVVAVDKGLTPLSLAKENWRKPAVLDTNDRKELWQGKELHGRFFRALHGPDVDFLASVSWLRFGDLFGETEGFVCAIMDEVIMTNNYRKYIVKDGTVDICRACHRPGESIRHIVSGCSRLANGEYLHRHNLVARIIHQQLALQYNLVESEVPYYRYVPDPVLENGHTTLYWDRSIITDRTIVANKPDIVVIDRRERRAMIVDIAVPHDENLVKAEKDKKIKYLDLAHEVVDMWGVDSAIIVPIIVSVNGLIAESLDQHLRRLSLRSWVKSLIQRAVLLDTARIVRRFLSLDP

SEQ ID NO: 11604 - protein, 1199 aa, Griposia aprilina
MMLTRSAKRRAHPPPPDSSLSSASPPPVSSPTVSAVTTPAAVVASSPSDEYFSPPTTPPPVRRRGGHRPPDGLGPRGPPASDRVPAPGGSVQRMRWTRSINENVMRSYYGATEGGNNLTAYRVRMLSLFQVLEPAVNVSAQRLSDQVRVIQRNHMLDDTVLDRLRNEMQSSHVIAPPSQTVVVLPQSNTSQADEESDDRATNVSTQCNDELRSALEDAIREYRFISPELRPRLPRLPMHNKNRVLVAALDAQLSNYFDDCVDLTDTHSILYCAAVAACRVAHIKFANDSRPTRPKPAVPAWQCRIERRIGGARALIGKLICFREGNTRPRVMRFVRRAFAGTNISPQDYMSCVTERIDFLKQKVYAWANRIRRYKRRVERYTQNRTFQRDERWVYRGWERPDQGVADTCLPDDDAMCSFWRNIWSVPVSHTEGDWGREVERACDPIPEMGAISICPQDVTRAVRPLPKWKSPGPDGLQNFWIKWFGRSHARLAAQYQVAIESGSLPQFLTTGVTHLLHKSGSTAEPKNYRPITCLPTVYKVLTSILRAKINKHIDTNSIMSPSQNGCRNGSRGTKELLLIDMAISQQVRRSRKDLSTCWIDYKKAYDSVPHTWLVRVLELYKVDATLRTFLKSCMGQWRTILHYPGCRNIQRDNEPIRIERGIFQGDSLSPLWFCLALNPLSTLLEDSGLGYRLRRGGQVISHLLYMDDLKLFAPNNLQLMELLKVTETFSSAIRMEFGVDKCAVMHVKRGEIVESVGTQLSYSINLRALSASDTYKYLGISEALGINGTDMKQSLKERFFGRLKKVFNSLLSGGNKVRAFNGWVMPVLMYSFGILKWTQTELDALDRKVRTLLTANRMHHPRSPVMRLYIPRKCGGRGFLNAKTLHNREICSLREYFLEADVGMHTDVVKVDKDLTPLSLAKENWRKPVVLDTNDRMEVWQSKELHGRFFRALHEPDVDQLASVAWLRFGDLFGETEGFVCAIMDEVILTNNYRRHIMKDGTVDVCRACHRPGESIRHIISGCSRLANEEYLHRHNLVARIIHQQLALKYSLVESEVPYYRYVPDPVLENGHITLYWDRSIITDRTIVANKPDIVVVDRLERRAMIVDITVPHDGNLVKAEKDKQIKYLDLAREVVDMWDVDSAIIVPIVVTANGLIAKSLDQHLRRLSLGSWIKGLIQKAVLLDTARIVRRFLSLEP

SEQ ID NO: 11605 - protein, 1106 aa, Griposia aprilina
MRWTRSINENVMRSYYGATEGGNNLTAYRVRMLSLFQVLEPAVNVSAQRLSDQVRVIQRNHMLDDTVLDRLRNEMQSSHVIAPPSQTVVVLPQSNTSQADEESDDRATNVSTQCNDELRSALEDAIREYRFISPELRPRLPRLPMHNKNRVLVAALDAQLSNYFDDCVDLTDTHSILYCAAVAACRVAHVKFANDSRATRPKPAVPAWQCRIERRIGEARALIGKLICFREGNTRPRVMRFVRRTFAGTNISPQDYMSCVTERIDFLKQKVYAWANRIRRYKRRVERYTQNRTFQRDERWVYRGWERPDQGVADTCLPDDDAMCSFWRNIWSVPVSHTEGDWTREVERACDPIPEMGAITICPQDVTRAVRPLPNWKSPGPDGLHNFWIKWFGRSHARLAAQYQVALESGSLPQFLTTGVTHLLHKSGSTAEPKNYRPIACLPTVYKVLTSILRDKINKHIDTNYIMSPSQNGCRNGSRGTKELLLIDMAISQQVRRSRKDLSTCWIDYKKAYDSVPHTWLMRVLELYKVEATLRTFLMSCMGQWRTVLHYPACRNTQRNSEPIRIERGIFQGDSLSPLWFCLALNPLSTLLEDSGLGYRLRRGGQVISHLLYMDDLKLFAPNNSQLMDLLKVTETFSSAIRMEFGVDKCAVMHVKRGEIVESVGTQLSDSINLRALSASETYKYLGMSEALGINGTDMKQSLKDRFFGRLKKVFNSLLSGGNKVRAFNGWVMPVLMYSFGILKWTQTELDALDRKVRTLLTANRMHHPRSSVMRLYIPRKCGGRGFLNAKTLHNREICSLREYFLEADVGMHRDVVTVDKGLTPLSLAKENWRKPVVLDTNDRMEVWQSKELHGRFFRALHGPDVDQLASVAWLRFGDLFGETEGFVCAIMDEVMMTNNYRRFIVKDGTVDICRACHRPGESIRHIISGCSRLANEEYLHRHNLVARIIHQQLALKYSLVESEVPYYRYVPDPVLENGHITLYWDRSIITDRTIVANKPDIVMVDRLERRAMIVDITVPHDGNLVKAEKDKQIKYLDLAREVVDMWDVDSAIIVPIVVTANGLIAKSLDQHLRRLSLGSWIKGLIQKAVLLDTARIVRRFLSLEP

SEQ ID NO: 11606 - protein, 1201 aa, Omphaloscelis lunosa
MLTRLAARRARLPPPDSPLSSASSPPVRSPTVNAVMTPAAAVASSSSDEYFSPSTTPPPARRRGRRRPPDGLGPRGPPASDRVPAPGGSVQRMRWTRSINENVMRSYYGATEGRNNLTAYRVRMLSLFQVLEPAVNVSAQRLSDQVRVIQRNHMLDDTVLDRLRSEMQSSHVIAPPLRSVIIPSQISSVITSQADERIDDRATNVSTQCNEDLRSALEGAIQEYRFMSPELRPRLPRLPMHNKNKALVAVLDSQLSNYFDDCEDLTDTHSILYCAAVAVCRVAHLKFSNDSRATRPKSAAPAWQCRIERRIGGARTLIGKLICFREGNTRPRVMRFVRRAFLGTDISPQDYMTRVTERIDFLKQKVYAWANRIRRYKRRVERYTQNRTFQSDERWVYRAWERPDQGVADTHLPDDDAMCSFWRSIWSVPVSHTEGDWTREVERACDPIPEMGAITICPQDVARAVRPLPNWKSPGPDGLHNFWIKWFVRSHARLAAQYQTALESGSLPQFLTTGVTHLLHKSGSTAEPKNYRPITCLPTVYKVLTSILRAKINKHIDTNSIMSASQNGCRNGSRGTKELLLIDMAISQQVRRSRKDLSTCWIDYKKAYDSVPHTWLMRVLELYKVHTTLRTFLMSCMGQWRTVLRYPGCRNIQRNSEPIRIERGIFQGDSFSPLWFCLALNPLSTLLEDSGLGYRLRRGGQVISHLLYMDDLKLFAPNNLQLMELLKVTETFSSAIRMEFGVDKCAVMHVKRGEIMESVGTQLSDSINLRALSASETYKYLGMSEALGINVTDMKQSLKERFFGRLKKVLNSLLSGGNKVRAFNGWVMPVLMYSFGILKWTQTELDALDRRVRTLLTAYRMHHPRSSVMRLYIPRKCGGRGFLNSKTLHNREICSLREYFLGVDVGMHRDVVVVDKGLTPLSLAKENWRKPVVLDTKDRMEIWQSKELHGRYFRALHGPDVDLPASVTWLRFGDLFGETEGFVCAIMDEVMMTNNYRRFIVKDGTVDICRACHRPGESIRHIISGCSRLANEEYLHRHNLVARIIHQQLALKYSLVESEVPYYRYVPDPVLENGNITLYWDRSIITDRTIAANKPDIVVVDRGERRTMIIDITVPHDENLVKAEKDKQIKYLDLAREVVDMWDVDSAIIVPIVVTANGLIAKSLDQHLRRLSLGSWIKGLIQRAVLLDTARIVRRFLSLEP

SEQ ID NO: 11607 - protein, 1198 aa, Omphaloscelis lunosa
MLTRSAARRARLPPPDSPLSSASSPPVLSPTVNAVMTPAAAVASSSSDEYFSPPTTPPPARRRGRRRPPDGLGPRGPPASDRVPAPGGSVQRMRWTRSINENVMRSYYGATEGGNNLTAYRVRMLSLFQVLEPAVNVSAQRLSDQVRVIQRNHMLDDTVLDRLRSEMQSSHVIAPPVRSVIVPSQIITSQADERIDDRATNVSTQCNEELRSALEGAIHEYRFMSPELRPRLPRLPMHNKNRALVAALDSQLSNYFDDCEDLTDTHSILYCAAVAVCRVAHVKFSNDSRATRPKPAVPAWQCRIERRICGARTLIGKLICFREGNTRPRVMRFVRRAFLGTDISPQDYMTRVTERIDFLKQKVYAWANRIRRYKRRVERYTQNRTFQSDERWVYRAWERPNQGVTDTHLPDEDAMCSFWRSIWSVPVSHTEGDWTREVERACDSIPEMGAITICPQDVARAVRPLPNWKSPGPDGLHNFWIKWFVRSHARLAAQYQTALESGSLPQFLTTGVTHLLHKSGSTAEPKNYRPITCLPTVYKVLTSVLRAKINKHIDTNSIMSASQNGCRNGSRGTKELLLIDMAISQQVRRSRKDLSTCWIDYKKAYDSVPHTWLMRVLELYKVDITLRTFLMSCMGQWRTVLRYPGCRNIQRNSEPIRIERGIFQGDSLSPLWFCLALNPLSTLLEASGLGYRLRRGGQVISHLLYMDDLKLFAPNNLQLMELLKVTETFSSAIRMEFGVDKCAVMHVKRGKIMESVGTQLSDSINLRALSASETYKYLGMSEALGINVTDMKQSLKERFFGRLKKVLNSLLSGGNKVRAFNGWVMPVLMYSFGILKWSQTELDALDRRVRTLLTAYRMHHPRSSVMRLYIPRKCGGRGFLNAKTLHNREICSLREYFLEADVGMHRDVVVVDKGLTPLSLAKENWRKPVVLDTKNRMEIWQSKELHGRYFRALHGPDVDLPASVAWLRCGDLFGETEGFVCAIMDEVMMTNNYRRFIVKDGTVDICRACHRPGESIRHIISGCSRLANEEYLHRHNLVARIIHQQLALKYSLVESEVPYYRYVPDPVLENGNITLYWDRSIITDRTIVANKPDIVVVDRGERSAMIIDITVPHDENLVKAEKDKQIKYLDLAREVVDMWDVDSAIIVPIVVTANGLIAKSLDQHLRRLSLGSWIKGLVQKAVLLDTARIVRRFLSLEP

SEQ ID NO: 11608 - protein, 1201 aa, Omphaloscelis lunosa
MLTRLAARRARLPPPDSPLSSASSPPVRSPTVNAVMTPAAAVASSSSDEYFSPPTTPPPARRRGRRRPPDGLGPRGPPASDRVPAPGGSVQRMRWTRSINENVMRSYYGATEGGNNLTAYRVRMLSLFQVLEPAVNVSAQRLSDQVRVIQRNHMLDDTVLDRLRSEMQSSHVIAPPLRSVIIPSQMSSVITSQADERIDDRATNVSTQCNEDLRSALEGAIQEYRFMSPELRPRLPRLPMHNKNKALVAVLDSQLSNYFDDCEDLTDTHSILYCAAVAVCRVAHLKFSNDSRATRPKPAAPAWQCRIERRISGARTLIGKLICFREGNTRPRVMRFVRRAFLGTDISPQDYMTRVTERIDFLKQKVYAWANRIRRYKRRVERYTQNRTFQSDERWVYRAWERPDQGVADTHLPDDDAMCSFWRSIWSVPVSHTEGDWTREVERACDPIPEMGAITICPQDVARAVRPLPNWKSPGPDGLHNFWIKWFVRSHARLAAQYQTALESGSLPQFLTTGVTHLLHKSGSTAEPKNYRPITCLPTVYKVLTSILRAKINKHIDTNSIMSVSQNGCRNGSRGTKELLLIDMAISQQVRRSRKDLSTCWIDYKKAYDSVPHTWLMRVLELYKVHTTLRTFLMSCMGQWRTVLRYPGCRNIQRNSEPIRIERGIFQGDSLSPLWFCLALNPLSTLLEDSGLGYRLRRGGQVISHLLYMDDLKLFAPNNLQLMELLKVTETFSSAIRMEFGVDKCAVMHVKRGEIMESVGTQLSDSINLRALSASETYKYLGMSEALGINVTDMKQSLKERFFGRLKKVLNSLLSGGNKVRAFNGWVMPVLMYSFGILKWTQTELDALDRRVRTLLTAYRMHHPRSSVMRLYIPRKCGGRGFLNAKTLHNREICSLREYFLGVDVGMHRDVVVVDKGLTPLSLAKENWRKPVVLDTKDRMEIWQSKELHGRYFRALHGPDVDLPASVTWLRFGDLFGETEGFVCAIMDEVMMTNNYRRFIVKDGTVDICRACHRPGESIRHIISGCSRLANEEYLHRHNLVARIIHQQLALKYSLVESEVPYYRYVPDPVLENGNITLYWDRSIITDRTIAANKPDIVVVDRGERRTMIIDITVPHDENLVKAEKDKQIKYLDLAREVVDMWDVDSAIIVPIVVTANGLIAKSLDQHLRRLSLGSWIKGLIQRAVLLDTARIVRRFLSLEP

SEQ ID NO: 11609 - protein, 1197 aa, Sesamia nonagrioides
MLTRSAARRARPPSPDSLLGSASPPPVSSATASAVTTPAAAVVSSSSDEYFSPPTTPPPARRRGGRRPPDCLGPRGPSASDRVPAPGGSVQRMRWTLSINENVMRSYYGATEGGNNLTAYRVRMLSLFQVLEPAVNVSAQRLSDQVRVIQRNHMLDDTVLDRLRNEMQSSRITAHQSQTAEIPPQPTNYADEGSNDRATNVSTQCNEELINALEAAIREYRFTPAELRPRLPRLPMHNRNRALMAALDAQLSDYFDTCEDLTDTHSILYCAAVAACRVAHVKFPSDSRATRPKPVVPAWQHRIERRIGGARALIGKLICFREGNTRPRVMRFVRRAFAGTNISPQNYMARVTERIDFLKQKVYAWANRIRRYKRRVERYTQNRTFQSNERWVYRDWERPEQGVTDTCLPDDDAMCSFWRSIWSVPVSHTEGDWALDVERACDPIPEMGAITICPQDVACAVRPLPNWKSPGPDGLHNFWIKWFPRSHARLASQFQTALVSGSLPQFLTTGITHLLHKSGSTAEPKNYRPITCLPTVYKVLTSILKTKINKHIDSNSIMSASQNGCKSGSRGTKELLLIDMAISQQVRRSRKDLSTCWIDYRKAYDSVPHTWLLRVLELYKVDATLRTFLMSCMRTWRTVLRYPGCRNIQRNSEPIRIERGIFQGDSLSPLWFCLALNPLSTLLEDSGLGYRLRRGGQVISHLLYMDDLKLFAPNNSQLRELLKITETFSSSIRMEFGVDKCAVMHVKRGEIMESVGTQLTDSINLRALSASETYKYLGMSEALGINVTDMKQSLKERFFGRLKKVLNSLLSGGNKVRAFNGWVMPVLMYSFGILKWTQTELGALDQRVRTLLTANRLHHPRSSVMRLYIPRKCGVRGFLNAKTLHNREVCSLRDYFLVTDVGMHRDVVAADKGLTPLSLAKENWRKPVVLDTNDRMEVWKSKELHGRFFRALHGPDVDFQASVAWLRFGDLFGETEGFVFAIMDEVMMTNNYRRFIVKDGTVDICRACHRPGESIRHIISGCSRLANGEYLHRHNLVARIIHQQLALKYNLVESEVPYYRYTPDPVLENGYITLYWDRSIITDRTIVANKPDIVMVDRSERRAMIVDITIPHDENLVKAEKDKQIKYLDLAHEVVDMWEVDSAIIVPIVVTANGLIAKSLDQHLRRLSLGSWIKGLIQKAVLLDTARIVRKFLSLEP

SEQ ID NO: 11610 - protein, 1197 aa, Sesamia nonagrioides
MLTRSAAQRARPPSPDSLLSSASPPLASSATVSAVTTPAAAVASSSSDEYFSPPTTPPPARRWGGRRPPDRLGPRGPSASDRVPAPGGSVQRMRWTQSINENVMRSYYGATEGGNNLTAYRVRMLSLFQVLEPAVNVSAQRLSDQVRVIQRNHMLDDTVLDRLRNEMQSSRIIAHQSQTAEIPPQPTNYADEGSNDRATNVSTQCNEELINALEAAIREYRFTPAELRPRLPRLPMHNRNRALMAALDAQLSDYFDTCEDLTDTHSILYCAAVAACRVAHVKFPSDSRATRPKPVVPAWQHRIERRIGGARALIGKLICFREGNTRPRVMRFVRRAFAGTNISPQNYMARVTERIDFLKQKVYAWANRIRRYKRRVERYTQNRTFQSNERWVYRDWERPEQGVTDTCLPDDDAMCSFWRSIWSVPVSHTEGDWARDVERACDPIPEMGAITICPQDVACAVRPLPNWKSPGPDGLHNFWIKWFPRSHARLASQFQTALVSGSLPQFLTTGITHLLHKSGSTAEPKNYRPITCLPTVYKVLTFILKTKINKHIDSNSIMSASQNGCKSGSRGTKELLLIDMAISQQVRRSRKDLSTCWIDYRKAYDSVPHTWLMRVLELYKVDATLRTFLMSCMKTWRTVLRYPGCRNIQRNSEPIRIERGIFQGDSLSPLWFCLALNPLSTLLEDSGLGYRLRRGGQVISHLLYMDDLKLFAPNNSQLRELLKITETFSSSIRMEFGVDKCAVMHVKRGEIMESVGTQLTDSINLRALSASETYKYLGMSEALGINVTDMKQSLKERFFGRLKKVLNSLLSGGNKVRAFNGWVMPVLMYSFGVLKWIQTELDALDQRVRTLLTANRLHHPRSSVMRLYIPRKCGGRGFLNAKTLHNREVCSLRDYFLVTDVGMHRDVVAADKGLTPLSLAKENWRKPVVLDTNDRMEVWKSKELHGRFFRALHGPDVDFQASVAWLRFGDLFGETEGFVFAIMDEVMMTNNYRRFIVKDGTVDICRACHRPGESIRHIISGCSRLANGEYLHRHNLVARIIHQQLALKYNLVESEVPYYRYTPDPVLENGYITLYWDRSIITDRTIVANKPDIVMVDRSERRAMIVDITIPHDENLVKAEKDKQIKYLDLAHEVVDMWEVDSAIIVPIVVTANGLIAKSLDQHLRRLSLGSWIKGLIQKAVLLDTARIVRKFLSLEP

SEQ ID NO: 11611 - protein, 962 aa, Sesamia nonagrioides
MHKKNKALVCALDSQLSYYLKDSKDLTDTHSILYCGAVAICRVAHVKFPDSDRATRPKSAVPAWQCRIERRIGETRALIGKLTSFREGNTRPRVMRFVRRAFSGTDTSTRDYLFRVTERIDFFKQKIYAWANRIRRYKRRVERYSQNRNFQSDERRVYRAWERSDQGVTDTCLPDDDAMCSFWRNIWSVPVSHTEGSWTRVVERACDPVPEMGAITICPQDVAHAVCPLPNWKSPGPDGLHNFWIKWFSGSHARLASQFQTALESGSLPQFLTTGVTHLLHKSGSTAEPKNYRPITCLPTVYKVLTSILKSKINTHIDSNSIMSASQNGCRSGSRGTKELLLIDMAISQQVRRSRKDLSTCWIDYKKAYDSVPHTWLMRVLELYKVDATLRTFLMTCMRTWRTVLRYPGCRNIQRNSEPIRIERGIFQGDSLSPLWFCLALNPLSTLLEDSGLGYRLRRGGQVISHLLYMDDLKLFAHTDSQLKELLKITETFSSSIRMEFGVDKCAVMHVKRGEIMESVGTQLTSSINLRALSASETYKYLGMSEALGINVTDMKQSLKERFFGRLKKVLNSLLSGGNKVRAFNGWVMPVLMYSFGILKWTQTELDALDQRVRTLLTANRLHHPRSSVMRLYIPRKCGGRGFLNAKTLHNREVCSLREYFLETDVGMHRDVVAADKGLTPLSLAKENWRKPVVLDTNDRLEVWKSKELHGRFFRALHGPDVDFRASVAWLRFGDLFGETEGFVFAIMDEVMMTNNYRRFIVKDGTVDICRACHRPGESIRHIISGCSRLANGEYLHRHNLVARIIHQQLALKYNLVESEVPYYRYMPDPVLENGHITLYWDRSIITDRTIVANKPDIVLVDRSERRAMIVDITIPHDENLVKAEKDKQIKYLDLAHEVVDMWEVDSAIIVPIVVTANGLIAKSLDQHLRRLSLGSWIKGLIQKAVLLDTARIVRKFLSLEP

SEQ ID NO: 11612 - protein, 1197 aa, Sesamia nonagrioides
MLTRSAARRARPPSPDSLLGSASPPPVSSPTVSAVTTPAAAVALSSSDEYFSPPTTPPPVRRRGGRRPPDRLGPRGPSASDRVPAPGGSVQRMRWTQSINENVMRSYYGATEGGNNLTAYRVRMLSLFQVLEPAVNVSAQRLSDQVRVIQRNHMLDNTVLDRLRNEMQSSRVIAHQSQTAEIPPQSTNYADEGSNDRATNVSTQCNEELINALEAAIREYRSTSAELRPRLPRLPMHNRNRALMAALDAQLSNYFDTCEDLTDTHSILYCAAVAACRVAHVKFPSDSRATRPKPVVPAWQHRIERRIGGARALIGKLICFREGNTRPRVMRFVRRAFAGTNISPQNYMARVTERIDFLKQKVYAWANRIRRYKRRVERYTQNRTFQNNERWVYRDWERPEQGVTDTCLPDDDVMCSFWRSIWSVPVSHTEGDWARDVERACDLIPEMGAITICPQDVACAVRPLPNWKSPGPDGLHNFWIKWFPRSHARLASQFQTALVSGSLPQFLTTGITHLLHKSGSTAEPKNYRPITCLPTVYKVLTSILKTKINKHIDSNSIMSASQNGCKSGSRGTKELLLIDMAISQQVRRSRKDLSTCWIDYRKAYDSVPHTWLMRVLELYKVDATLRTFLMSCMRTWRTVLRYPGCRNIQRNSEPIRIERGIFQGDSLSPLWFCLALNPLSTLLEDSGLGYRLRRGGQVISHLLYMDDLKLFAPNNSQLRELLKITETFSSSIRMEFGVDKCAVMHVKRGEIMESVGTQLTGSINLRALSASETYKYLGMSEALGINVTDMKQSLKERFFGRLKKVLNSLLSGGNKVRAFNGWVMPVLMYSFGILKWTQTELDALDQRVRTLLTANRLHHPRSSVMRLYIPRKCGGRGFLNAKTLHNREVCSLREYFLETDVGMHRDVVAADKGLTPLSLAKENWRKPVVLDTNDRLEVWKSKELHGRFFRALHGPDVDFQASVAWLRFGDLFGETEGFVFAIMDEVMMTNNYRRFIVKDGTVDICRACHRPGESIRHIISGCSRLANGEYLHRHNLVARIIHQQLALKYKLVESEVPYYRYMPDPVLENGHITLYWDRSIITDRTIVANKPDIVLVDRSERRAMIVDITIPHDENLVKAEKDKQIKYLDLAHEVVDMWEVDSAIIVPIVVTANGLIAKSLDQHLRRLSLGSWIKGLIQKAVLLDTARIVRKFLSLEP

SEQ ID NO: 11613 - protein, 1200 aa, Sesamia nonagrioides
MLTRSAARRARSPPPDSSPSSASPPPVSSPTVNAVMTPAAAVALSSSDEYFSPPTTPPPVRRRGGRRPPDCLGPRGPPASDRAPATGGNVQRMKWTQSINENVMRAYFGATEGGSNLTAYRGQMLSLFQVLEPAVNVSAQRLSDQVRVIQRNHMLDDVVLDRLRLESRNSHVTPASSLVAVQLNSVPSRPNLVDEEDDDEAISVTPQCNEKVRSALEDAFREYRSTPPELRPRLPRLPMHKKNKALVCALDSQLSSYLKDSKDLADTHSILYCGAVAICRVAHVKFPDSDRATRPKPAVPAWQCRIERRIGETRALIGKLISFREGNTRPRVMRFVRRAFSGTDISTRDYLLRVTERIDFLKQKIYAWANRIRRYRRRVERYSQNRNFQSDESGSIELGSDQTKVSLTRAYRMMMPRVHSGAISGRCLSVTPKVVGLGMLSEPAIQYQKWGLLPSAPQDVARAVRPLPNWKSPGPDGLHNFWIKWFSGSHACLASQFQTALESGSLPQFLTTGITHLLHKSGSTAEPKNYRPITCLPTVYKVLTSILKAKINTHIDSNSIMSASQNGCRNGSRGTKELLLIDMAISQQVRRSRKDLSTCWIDYKKAYDSVPHTWLMRVLELYKVDATLRTFLMTCMSQWRTVLRYPGCRNIQRNSEPIRIERGIFQGDSLSPLWFCLALNPLSTLLEDSGLGYRLRRGGQVISHLLYMDDLKLFAHTNSQLKELLKITETFSSAIRMEFGVDKCAVMHVQRGEIVESVGTQLTGSINLRSLSASETYKYLGMSEALGINVTDMKQSLKERFFGRLKKVLNSLLSGGNKVRAFNGWVMPVLMYSFGILKWTQTELDALDRRVRTLLTANRLHHPRSSVMRLYIPRKCGGRGFLNAKTLHNREICSLRQYFLTTDVGMHRDVVAVDKGLTPLSLAKENWRKPVVLDTNDRMEAWKSRELHGRFFKALHGPDVDLQASVAWLRFGDLFGETEGFVCAITDEVMMTNNYRRFIVKDGTVDICRACHRPGESIRHIISGCSRLANGEYLHRHNLVARIIHQQLALKYNLVESEVPYYRYTPDSVLENDHITLYWDRSIITDRTIVANKPDIVLVDRSERRAMIVDITIPHDENLVKAEKDKQIKYLDLAHEVVDMWEVDSAIIVPIVVTANGLIAKSLDQHLRRLSLGSWIKGLIQKAVLLDTARIVRKFLSLEP

SEQ ID NO: 11614 - protein, 868 aa, Sesamia nonagrioides
MRFVRRAFSGTDTNTRDYLFRVTERIDFFKQKIYAWANRIRRYRRRVERYSQNRNFQSDERRVYRAWERSDQGVTDTCLPDDDATCSFWRNIWSVPVSHTEGSWTRVVERACDPVPEMGAITICPQDVAHAVRPLPNWKSPGPDGLHNYWIKWFTRSHACLASQFQTALESGSLPQFLTTGVTHLLHKSGSTAEPKNYRLITCLPTVYKVLTSILKSKINTHIDSNSIMSASQNGCRSGSRGTKELLLIDMAISQQVRRSRKDLSTCWIDYKKAYDSVPHTWLMRVLELYKVDATLRTFLMTCMRTWRTVLRYPGCRNIQRNSEPIRIERGIFQGDSLSPLWFCLALNPLSTLLEDSGLGYRLRRGGQVISHLLYMDDLKLFAHTDSQLKELLKITETFSSSIRMEFGVDKCAVMHVKRGEIMESVGTQLTSSINLRALSASETYKYLGMSEALGINVTDMKQSLKERFFGRLKKVLNSLLSGGNKVRAFNGWVMPVLMYSFGILKWTQTELDALDRRVRTLLTANRLHHPRSSVMRLYIPRKCGGRGFLNAKTLHNREICSLREYFLTTDVGMHRDVVAVDKGLTPLSLAKENWRKPVVLDTNDRMEVWKSKELHGRFFTALHGPDVDLQASVAWLRFGDLFGETEGFVCAIMDEVMMTNNYRRFIVKDGTVDICRACHRPGESIRHIISGCSRLANGEYLHRHNLVARIIHQQLALKYNLVESEVPYYRYTPDPVLENDLITLYWDRSIITDRTIVANKPDIVLVDRSERRAMIVDITIPHDENLVKAEKDKQIKYLDLAHEVVDMWEVDSAIIVPIVVTANGLIAKSLDQHLRRLSLGSWIKGLIQKAVLLDTARIVRKFLSLEP

SEQ ID NO: 11615 - protein, 1200 aa, Sesamia nonagrioides
MLTRSAARRARSPPPDSSPSSASPPPVSSPTVNAVMTPAAAVALSSSDEYFSPPTTPPPVRRRGGRRPPDCLGPRGPPASDRAPATGGNVQRMKWTQSINENVMRAYFGATEGGSNLTAYRGRMLSLFQVLEPAVNVSAQRLSDQVRVIQRNHMLDDVVLDRLRLESRNSHVTPASSLVAVQLNSVPSRPNLVDEEDDDEAISVTPQCNEKVRSALEDAFREYRSTPPELRPRLPRLPMHKKNKALVCALDSQLSNYLKDSKDLADTHSILYCGAVAICRVAHVKFPDSDRATRPKPAVPAWQCRIERRIGETRALIGKLISFREGNTRPRVMRFVRRAFSGTDVSTRDYLLRVTERIDFLKQKIYAWANRIRRYRRRVERYSQNRNFQSDERWVYRAWERSDQGVTDTCLPDDDATRSFWRNIWSVPVSHTEGGWTRDVERACDPVPEMGAITICPQDVARAVRPLPNWKSPGPDGLHNFWIKWFSGSHACLASQFQTALESGSLPQFLTTGITHLLHKSGSTAEPKNYRPITCLPTVYKVLTSILKAKINTHIDSNSIMSASQNGCRNGSRGTKELLLIDMAISQQVRRSRKDLSTCWIDYKKAYDSVPHTWLMRVLELYKVDATLRTFLMTCMSQWRTVLRYPGCRNIQRNSEPIRIERGIFQGDSLSPLWFCLALNPLSTLLEDSGLGYRLRRGGQVISHLLYMDDLKLFAHTNSQLKELLKITETFSSAIRMEFGVDKCAVMHVQRGEIVESVGTQLTGSINLRSLSASETYKYLGMSEALGINVTDMKQSLKERFFGRLKKVLNSLLSGGNKVRAFNGWVMPVLMYSFGILKWTQTELDALDRRVRTLLTANRLHHPRSSVMRLYIPRKCGGRGFLNAKTLHNREICSLREYFLTTDVGMHRDVVAVDKGLTPLSLAKENWRKPVVLDTNDRMEVWKSKELHGRFFKALHGPDVDLQASVAWLRLGDLFGETEGFVCAITDEVMMTNNYRRFIVKDGTVDICRACHRPGESIRHIISGCSRLANGEYLHRHNLVARIIHQQLALKYNLVESEVPYYRYTPDPVLENDHITLYWDRSIITDRTIIANKPDIVLVDRSERRAMIVDITIPHDENLVKAEKDKQIKYLDLAHEVVDMWEVDSAIIVPIVVTANGLIAKSLDQHLRRLSLGSWIKGLIQKAVLLDTARIVRKFLSLEP

SEQ ID NO: 11616 - protein, 1197 aa, Sesamia nonagrioides
MLTRSAARRARPPSPDSLLGSASPPPVSSTTASAVTTPAAAVVSSSSDEYFSPPTTPPPARRRGGRRPPDCLGPRGPLASDRVPAPGGSVQRMRWTQSINEDVMRSYYGATEGGNNLTAYRVRMLSLFQVLEPAVNVSAQRLSDQVRVIQRNHMLDDTVLDRLRNEMQSSRIIAYQSQTAEIPPQPTNYADEGSNDRATNVSTQCNEELINALEAAIREYRFTPAELRPRLPRLPMHNRNRALMAALDAQLSDYFDTCEDLTDTHSILYCAAVAACRVAHVKFPSDSRATRPKPVVPAWQHRIERRIGGARALIGKLICFREGNTRPRVMRFVRRAFAGTNISPQNYMARVTERIDFLKQKVYAWANRIRRYKRRVERYTQNRTFQSNERWVYRDWERPEQGVTDTCLPDDDAMCSFWRSIWSVPVSHTEGDWARDVERACDPIPEMGAITICPQDVACAVRPLPNWKSPGPDGLHNFWIKWFPRSHARLASQFQTALVSGSLPQFLTTGITHLLHKSGSTAEPKNYRPITCLPTVYKVLTSILKTKINKHIDSNSIMSASQNGCKSGSRGTKELLLIDMAISQQVRRSRKDLSTCWIDYRKAYDSVPHTWLMRVLELYKVDATLRTFLMSCMRTWRTVLRYPGCRNIQRNSEPIRIERGIFQGDSLSPLWFCLALNPLSTLLEDSGLGYRLRRGGQVISHLLYMDDLKLFAPNNSQLRELLKITETFSSSIRMEFGVDKCAVMHVKRGEIMESVGTQLTDSINLRALSASETYKYLGMSEALGINVTDMKQSLKERFFGRLKKVLNSLLSGGNKVRAFNGWVMPVLMYSFGILKWTQTELDALDQRVRTLLTANRLHHPRSSVMRLYIPRKCGGRGFLNAKTLHNREVCSLRDYFLVTDVGMHRDVVAADKGLTPLSLAKENWRKPVVLDTNDRMEVWKSKELHGRFFRALHGPDVDFQASVAWLRFGDLFGETEGFVFAIMDEVMMTNNYRRFIVKDGTVDICRACHRPGESIRHIISGCSRLANGEYLHRHNLVARIIHQQLALKYNLVESEVPYYRYTPDPVLENGYITLYWDRSIITDRTIVANKPDIVMVDRSERRAMIVDITIPHDENLVKAEKDKQIKYLDLAHEVVDMWEVDSAIIVPIVVTANGLIAKSLDQHLRRLSLGSWIKGLIQKAVLLDTARIVRKFLSLEP

SEQ ID NO: 11617 - protein, 888 aa, Apamea monoglypha
MRFVRRAFLGTDISSQDYLSRVTERIDFLKQKVYAWANRIRRYKRRVERYTQNRTFQSDERWVYRGWERPDQSVADTCLPDDDAMCSFWRSIWSAPVSHTEGDWTGKIERACELIPEMGAITICPQDVARAVRPLPNWKSPGPDGLHNFWIKWFQRSHAPLAAQFQSALESGLLPQFITTGITHLLHKSGSTADPKNYRPITCLPTIYKVLTSILRAKINKHIDSNSIMSVSQNGCRNGSRGTKELLLIDMAISQQVRRSRKDLSTCWIDYKKAYDSVPHTWLMRVLELYKVDTTLRTFLMTCMGQWRTVLRYPGCRNIQRNSEPIRIERGIFQGDSLSPLWFCLALNPLSTLLDDSGLGYRLRRGGQVISHLLYMDDLKLFAPNNLQLMKLLKITETFSSAIRMEFGVDKCAVMHVKRGEIVESVGTQLSDFTNLRALSAAETYKYLGMSEALGINVTDMKQSLKERFFGRLKKVFNSLLSGGNKVRAFNSWVMPVLMYSFGILKWTQTELEALDRRVRTLLTANRMHHPRSSVMRLYIPRKCGGRGFLNAKTLHNREICSLREYFLETDVGMHRDVVAVDKGLTPLSLAKENWRKPVVLDTNDRMEVWQSKELHGRFYRALHGPDVDLLASVAWLRFGDLFGETEGFVCAIMDEVMMTNNYRRYIVKDGTVDICRACHRPGESIRHIISGCSRLANGEYLHRHNLVARIIHQQLALKYSLVESEVPYYRYVPDPVLENGNITLYWDRSIITDRTIVANKPDIVVVDRSERRAMIVDITVPHDENLVKAEKDKQIKYLDLAHEVVDMWDVDSAIIVPIVVSANGLIAKSLDQHLRRLSLGSWIKGLIQKAVLLDTARIVRRFLSLEPCPPVAWTLFPIPVGYYFLYF

SEQ ID NO: 11618 - protein, 1198 aa, Apamea monoglypha
MLTRSAARRARLPSPDSSLSSASPSPVPSPTVSAVTTPAAVVASSSSDEYFSPPTTPPPARRRGGRRPPDGLGPRGPLASDRVPAPGGSVQRMRWTRSINENVMRSYYGATEGGNNLTAYRVRMLSLFQVLEPAVNVSAQRLSDQVRVIQRNHMLDDTVLDRLRSEMQSSHVIAPQSQTAAVLPQSNTSHADEGSNDRATNVSIQCNEELRNALEGAIREYRFMSPELRPRLPRLPMHNKNRALVAVLDAQLSSHFDACEDLTDTHSILYCAAVAACRVAHVKFDSDSRATRPKPAIPAWQCRIERRIGGARALIGKLICFREGNTRPRVMRFVRRAFLGTDISSQDYLSRVTERIDFLKQKVYAWANRIRRYKRRVERYTQNRTFQSDERWVYRDWERPDQDVADTCLPDDDAMCSFWRSIWSAPVSHTEGVWALEVERACDPIPEMEAITICPQDVARAVRPLPNWKSPGPDGLHNFWIKWFTRSHARLASQFQTALESGSLPQFLTTGVTHLLHKSGSTAEPKNYRPITCLPTVYKVLTSILRAKINKHIDTNSIMSASQNGCKNGSRGTKELLLIDMAISQQVRRSRKDLSTCWIDYKKAYDSVPHTWLMRVLDLYKVDATLRTFLMSCMGQWRTVLRYPGCRNIQRNSEPIRIERGIFQGDSLSPLWFCLALNPLSTLLEDSGLGYRLRRGGQVISHLLYMDDLKLFAPNNLQLMELLKVTETFSSAIRMEFGVDKCAVMHVKRGEIVESVGTQLSDSTNLRALSVSETYKYLGMSEALGINVTDMKQSLKKRFFGRLQKVLNSLLSGGNKVRAFNSWVMPVLMYSFGILKWTQTELDALDRRVRTLLTANRMHHPRSSVMRLYIPRKCGGRGFLNAKTLHNREICSLREYFLETDVGMHRDVVAVDKGLTPLSLAKENWRKPVVLDTNDRMEVWQSKELHGRFYRALHGPDVDLLASVAWLRFGDLFGETEGFVCAIMDEVMMTNNYRRFIVKDGTVDICRACHRPGESIRHIISGCSRLANGEYLHRHNLVARIIHQQLALKYSLVESEVPYYRYVPDPVLENGNITLYWDRSIITDRTIVANKPDIVVVDRSERRAMIVDITVPHDENLVKAEKDKQIKYLDLAREVVDMWDVDSAIIVPIVVTANGLIAKSLDQHLRRLSLGSWIKGLIQKAVLLDTARIVRRFLSLEP

SEQ ID NO: 11619 - protein, 1045 aa, Apamea monoglypha
MLDDTVLDRLRSEMQSSHVIAHQSQTAAVLPQSNTSHADEGSNDMATNVSIQCNEELRNALEGAIREYRFMSPELRPRLPRLPMHNKNRALVAVLDAQLSSHFDVCEDLTDTHSILYCAAVAACRVAHVKFASDSEATRPKPAIPAWQCRIERRIGGARALIGKLICFREGNTRPRVMRFVRRAFLGTDISSQDYLSRVTERIDFLKQKVYAWANRIRRYKRRVERYTQNRTFQSDERWVYRGWERPDQSVADTCLPDDDAMCSFWRSIWSAPVSHTEGDWTGKIERACELIPEMGAITICPQDVARAVRPLPNWKSPGPDGLHNFWIKWFQRSHAPLAAQFQSALESGLLPQFITTGITHLLHKSGSTADPKNYRPITCLPTIYKVLTSILRAKINKHIDSNSIMSVSQNGCRNGSRGTKELLLIDMAISQQVRRSRKDLSTCWIDYKKAYDSVPHTWLMRVLELYKVDTTLRTFLMTCMGQWRTVLRYPGCRNIQRNSEPIRIERGIFQGDSLSPLWFCLALNPLSTLLDDSGLGYRLRRGGQVISHLLYMDDLKLFAPNNLQLMKLLKITETFSSAIRMEFGVDKCAVMHVKRGEIVESVGTQLSDFTNLRALSAAETYKYLGMSEALGINVTDMKQSLKERFFGRLKKVFNSLLSGGNKVRAFNSWVMPVLMYSFGILKWTQTELEALDRRVRTLLTANRMHHPRSSVMRLYIPRKCGGRGFLNAKTLHNREICSLREYFLETDVGMHRDVVAVDKGLTPLSLAKENWRKPVVLDTNDRMEVWQSKELHGRFYRALHGPDVDLLASVAWLRFGDLFGETEGFVCAIMDEVMMTNNYRRYIVKDGTVDICRACHRPGESIRHIISGCSRLANGEYLHRHNLVARIIHQQLALKYSLVESEVPYYRYVPDPVLENGNITLYWDRSIITDRTIVANKPDIVVVDRSERRAMIVDITVPHDENLVKAEKDKQIKYLDLAREVVDMWHVDSAVIVPIVVTANGLIAKSLDQHLRRLSLGSWIKGLIQKAVLLDTARIVRRFLSLQP

SEQ ID NO: 11620 - protein, 1196 aa, Furcula furcula
MLTRNRAHPRPPDSSPRSASQPLGPSADGLLAAVASSGSDEYFSPPTSPPPVRRRRGRPPRVLGSLEQPAPNRVLAPGGVVRRMRWTSSINENVMRAYYEATERGTNLTAYRLRMLSLFQALEPAVNVSAQRLSDQVRAIQRGHMLDDAVLDRLRSEVQGSRVAPCIPSSQAVAPAVNIVPAPRPATNSDDDRDDMTTDVSTNLNTQLRSTLEDVVREYRTMPLNLRPRLPRLPMHKRNRALVCALDSLLSSYFDSSEDLADAHSLLYCAAMTACRVARVKFPSTDAATRPRPAVPAWQFRIECRIGEARVLIGKLNCFREGNTRPRVMRFVRRAFSGTGIDPREYLSRVTERIDFLKQKVCAWANRIRRYKARVDRYSQNNMFQRDQRWVYRSWERSSQIEGDGRRPDDSAMTTFWRNIWSVPVTHSEGDWMRDVEQICEPLPEMGAITIRPQDVADAVRPMPNWKAPGPDGLHNFWLKWIRSSHICLASLFQSALESGSLPEFMTMGITHLLHKTSSTTDPKNYRPITCLPTVYKTLTSILRAKIYRHVEDNSIMSASQNGCRSGARGTKELLLIDMAICQQARRNRKDLSTCWIDYKKAYDSVPHTWLMRVLELYKVNPTLRTFLASCMRQWRTVLLYPGSRQILGNGDPIRIERGIFQGDSLSPLWFCLALNPLSTLLRGSGLGCRLRRGGQVISHLLYMDDLKLFAPTELQLMGLLKVTETFSNSISMEFGVDKCAVMHVKRGRMVESRSVQLLDTTDLRTLSATETYKYLGMSQALGINETDMKQSLRERFLGRLRKVLKSLLSGGNRVRAYNGWVMPVLMYSFGILKWTQTELDTLDRTVRTLLTTYRMHHPRSSVMRLYIPRKCGGRGFLNAKTLHNREICNLREYFLHCGGVMHTDVVAVDNGLTPLSLAKGNWRKPVVLTTGNREAVWQSKELHGRFYRALHGPDVDFSASVAWLRFGDLFGETEGFVCAIMDEVVMTNNYRKYILRDGTIDICRACHRPGESLRHIISGCSRLANGEYLHRHNQVARIIHQQLALKYRLVMSEVPYYRYVPEPVLEDGHITLYWDRSIITDRTIVANKPDIVLIDRNERRAMIVDVTVPHDENLVKAEKDKECKYLDLAHEVVDMWDIDRAIIVPIVVSAHGLMAKSLDKHLKRLTLGGWIKGQMQKAVLLETARIVRRFLSLEP

SEQ ID NO: 11621 - protein, 1037 aa, Spodoptera exigua
MGSRASASSSRTVVPATLPLTSHGIVSAVADEESTDTVAHVSTQCIDELRSALEYAIREYRYISPELRPRLPRLPMHNKNKALVAALDSQLSNYLDDCEDLGDTHSIMYCAAVAACRVAHVKFPTNDVTTRPKPAVPAWQRRIECRIAGARALIGKLICFREGNTRPRVMRSVRRAFSGTDISPRDYMSRVTERIDFLKQKVYAWANRIRRYRRRVERYTQNRTFRSNERWVYRTWERPDHGVTDRRLPDDDAACSFWRSIWSVPVSHTEGDWIRDVERACDPIPQMGTINISPQDVARAVRPLPNWKSPGPDGLHNFWIKWFTRAHARLASQFQSAVESGSLPKFLTTGVTHLLHKSGSTAEPKNYRPITCLPTVYKVLTSILRSKINSHIDKNKIMSTAQNGCKNGSRGTKELLLIDMAISQQVRRARKDLSTCWIDYKKAYDSIPHTWLMRVLELYKIDTILRTFLMSCMRQWSTVLRYPGCRHTQRNSEPVRIERGIFQGDSLSPLWFCLALNPLSTLLENSGLGYRLKRGGQVISHLLYMDDLKLFAPNKLQLMELLKLTETFSSAIRMEFGVDKCAIMHVKRGEVVESVGTQLTDSINLRSLSPTETYKYLGMSEALGINVTDMKQSLKERFFGRLKKVFNSFLSGGNKVRAFNGWVMPVLMYSFGVLKWSQTELDALDRQVRTMLTAYRMHHPRSSVMRLYIPRKCGGRGFLNAKTLHNREVCSLREYFLAADVDMHRDVVAVDKGLTPLSLAIENWRKPVVLDTNARREVWQSKELHGRFFRALHGPDVDQVASVAWLRFGDLFGETEGFVCAIMDEVIMTNNYRRFIVKDGTVDICRACHRPGESIRHIISGCSRLANGEYLHRHNLVARIIHQQLALKYSLVESEVPYYRYEPDPVLDNGHITLYWDRSIITDRTIVANKPDIVVVDRKERRAMIVDIAVPHDENLVKAEKDKLIKYIDLAREVVDMWEVDSAIIVPIVVSANGLIAKSLDQHLRRLSLGGWIKGLIQKVVLLDTARIVRRFLSLEP

SEQ ID NO: 11622 - protein, 1202 aa, Spodoptera exigua
MLTRAAARRARPPPPASSLSSASPPPESSPTVSDVTPAVAAASSSSDEYYSPPTTPPPTRRRGGRRPPARLGPRGPPASDRVPAVGGSVQRMRWTQSINENVMRAYYGATEGGNNLTAYRVRMLSLFQVLEPAVNVSAQRLSDQVRVIQRNRMLDDTVLDRLQTEMGSRASASSSRTVVPATLPLTSHGIVSAVADEESTDTVAHVSTQCIDELRSALEYAIREYRYISPELRPRLPRLPMHNKNKALVAALDSQLSNYLDDCEDLGDTHSIMYCAAVAACRVAHVKFPTNDVTTRPKPAVPAWQRRIECRIAGARALIGKLICFREGNTRPRVMRSVRRAFSGTDISPRDYMSRVTERIDFLKQKVYAWANRIRRYRRRVERYTQNRTFRSNERWVYRTWERPDHGVTDRRLPDDDAMCSFWRSIWSEPVSHTEGDWIRDVERACDPIPQMGTINISPQDVARAVRPLPNWKSPGPDGLHNFWIKWFTRAHARLASQFQSAVESGSLPKFLTTGVTHLLHKSGSTAEPKNYRPITCLPTVYKVLTSILRSKINSHIDKNKIMSTAQNGCKNGSRGTKELLLIDMTISQQVRRARKDLSTCWIDYKKAYDSIPHTWLMRVLELYKIDTILRTFLMSCMRQWSTVLRYPGCRHTQRNSEPVRIERGIFQGDSLSPLWFCLALNPLSTLLENSGLGYRLKRGGQVISHLLYMDDLKLFAPNKLQLMELLKLTETFSSAIRMEFGVDKCAIMHVKRGEVVESVGTQLTDSINLRSLSPTETYKYLGMSEALGINVTDMKQSLKERFFGRLKKVFNSFLSGGNKVRAFNGWVMPVLMYSFGVLKWSQTELDALDRQVRTMLTAYRMHHPRSSVMRLYIPRKCGGRGFLNAKILHNREVCSLREYFLAADVDMHRDVVAVDKGLTPLSLAIENWRKPVVLDTNARREVWQSKELHGRFFRALHGPDVDQVASVAWLRFGDLFGETEGFVCAIMDEVIMTNNYRRFIVKDGTVDICRACHRPGESIRHIISGCSRLANGEYLHRHNLVARIIHQQLALKYSLVESEVPYYRYEPDPVLDSGHITLYWDRSIITDRTIVANKPDIVVVDRKERRAMIVDIAVPHDENLVKAEKDKLIKYIDLAREVVDMWEVDSAIIVPIVVSANGLIAQSLDQHLRRLSLGGWIKGLIQKVVLLDTARIVRRFLSLEP

SEQ ID NO: 11623 - protein, 1112 aa, Arctia plantaginis
MKWTNSINENVMRAYYRATEMGTNLTAYRVRLVSLFQELEPAVNVSAQRLSDQVRAIQRCHLLDDAVLERIRSDIRNSLIIPSSSHTVNLVANSTPQLVSHTNDVDELVEGEVISVSTQYNDRIRSALEDAILEYRDVNWNNRPRLSRLPIHNRNLVLVGALDSLLPDYLDNSEDLGDTHSILYCAAVAVCRVAGVNIVENVTTTRPKSTVPAWQCRIERRIAETRVLIGKLISFRSGNTRPRVMRFVKQAFLGTTIGPQQYMSCVTERIDFLKQKIYAWANRIRRYKKRIDRYNQNRMFQRNEKWVYRKWEEPDPCVSHGHLPDENVTHTFWRNIWSVPVTHIEGDWLRDVRRSCESITPMEPVIIDKDDVSCAVRSLPNWKSPGLDGLHNFWLKWFRSSHACLASQFQAALNSGSLPQFLTTGITHLLYKSGSVMDPKNFRPITCLPTMYKLLTSILRIKITLHINNNSIMSVSQNGCRSGSRGTKDLLIIDRAISQQVRRNRKSLATCWIDYKKAYDSVPHTWLLRVLELYKIDTTLCTFLKSCMGQWRTALRYPGCQQTTVIDAPIKIERGIFQGDSLSPLWFCLALNPLSTLLEGSGLGYRLQKDDQVISHLLYMDDLKLLAPTKLQLSALLKVTENFSNSIKMEFGVDKCAVMYVKKGEIVESEGIELSDSTKLRSLSATETYKYLGISQSLGIPESDMKQTLQERFFARLKKVLKSLLSGGNKVRACNGWVMPILMYSFGILKWTQTELDALDRRVRTLLTAFRMHHPRSSVMRLYIPRKLGGRGLLNIKTLHNREICNLREYFLHTDVGMYRNVVAVDIGFTPLALAKENWRKPVVFSTNDRREVWKGKELHGRFYRALNGSDIDFKASTTWLRYGDLFGETEGFVFAIMDEVIMTNNYRKYILKDGTVDICQACHRPGESIRHIISGCSRLANGEYLHRHNQVARIVHQQLALKYHLVNLEVPYYRYVPDPVLENGRATLYWDRSIITDRTIVANKPDIVVIDRLERRAMIVDIAVPHDENLVKVEKEKQIKYLDLSHEIVDMWNVDSVIIVPIVVSAHGLIAKSLDHHLKRLTLDGWIKGLIQKVVLLDTARIVRRFLSLQS

SEQ ID NO: 11624 - protein, 1101 aa, Mamestra configurata
MRSYYRATEGGTNLTAYRGRMLSLFQVLEPAVNVSAQRLSDQVRVIQRNRMLDDAVLDRLRLESRNSRVSAASPPAAVQIQSSVSPRPNNVGEDDDDGAISVSTQCNERLRSALEDAFREYRSTPPELRPRLPRLPMHNKNRALVCALDSQLANCFDSSEDLADTHSILYCAAAAACRVAHVKFPNSDRATRPAVPAWQCRIERRIGEARALIGKLICFREGNTRRRVMRFVRRAFSGTDTSPRDYLTRVTERIDFLKQKIYAWANRIRRYKRRVERYTQNRTFQSNERWVYRAWERPDQGVTDTRLPDDDVMCSFWRNIWSVPVSHTEGDWTREVERACDPIPEMGAITISPQDVARAVRPLPNWKSPGPDGLHNFWIKWFKRSHARLASQFQSALESGSLPQFLTTGITHLLHKSGSTAEPKNYRPITCLPTVYKVLTSILRAKINQHIETNSIMSASQNGCRNRSRGTKELLLIDVAISQQVRRSRRDLSTCWIDYKKAYDSVPHTWLMRVLELYKVDAVLRTFLMSCMGQWRTVLRYPGCRQIQANSDPIRIERGIFQGDSLSPLWFCLALNPLSTLLEGSGQGYRLRRGGQVISHLLYMDDLKLFAPNNLQLMKLLKVTETFSSAISMEFGVDKCAVMHVKRGEIMESVGTQLSDSIHLRSLSSTETYKYLGMSEALGINANDVKQSLKERFFGRLNKVLNSLLSGGNKVRAFNGWVMPVLMYSFGILKWTQTELDALDRRVRSLLTANRMHHPRSSVMRLYIPRKCGGRGFLNAKTLHNREICSLREFFLEADVGMHRDVVAVDKGLTALSLANENWRKPVVLDTNDRREVWQSKELHGRFYRVLHGPDVDFLASVAWLRFGDLFGETEGFVCAIMDEVMMTNNYRKYIVKDGTVDICRACHRPGESIRHIISGCSSLANGDYLHRHNLVARIIHQQLALKYNLVESESVESEVPYYRYVPDPVLENGNCTLYWDRSIITDRTIVANKPDIVVIDRLERRAMIVDIAVPHDVNLVKTEKDKQTKYLDLAREVVDMWDVNTAVIVPIVVTANGIIAKSLDQHLKRLSLGSWIKGLIQKAVLLDTARIVRRFLSQGP

SEQ ID NO: 11625 - protein, 1193 aa, Heliothis virescens
MLTRARLRARLPAPDSSLSSASPPPDPGSPVSPAAAAASSSSDEYFSPPTSPPPVRRRGGHRPPDGMGSRGPQASDRVSAPGGRASRIRWTQGINESVMRAYYGATEGETNLTAYRSRMLSLFQALEPAVNVSAQRLADQVRVIRRDHRLDNAVLDRLRSEMRSSSVISEPPHPEAPAPVVPPRTNDTVEHGADEATSAGTQCNDLLRSTLEAAIAEYRTMPHAQRPRLPHLPMHRKNQALMGSLDSLLSIFFESSENLADTHSILYCGAVAACRIANVKFPNVTTTRHKAAPAWQCRIQRRIDEARVLIGKLTCFREGNTRPRVMRFVRRAFTGIDVNPSEYLARVTERIDFLKQNICAWAGRIRRYKRRMERYNLNRAFQRDQRWVYRAWERPDCGGDDGCLPDNNAMNAFWRDIWSVPVVHAEGDWMVEVQRACEHIQEMEPVNITTEDVSCAVHPMPNWKSPGPDGLHNYWIKWFRSSHARLASQFQAALESGSLPEFLTTGITHLLYKSGSATEPKNYRPITCLPTVYKILTSILRAKMYHHVETQSIMSASQNGCRNGSRGTKELLLIDMTINQQVRRSRKNLSTCWIDYKKAYDSVPHAWLLRVLELYKIDATLRAFLKSCMGQWKTALNYPGCGQICGNGELIRIERGIFQGDSLSPLWFCLALNPLSTLLEGSGLGFKLRRGGQVISHLLYMDDLKLFAHNRLQLMELLKITKVFSEAIRMEFGVDKCAVMYVERGEIVESLGTQLTDSINFRSLSSTETYKYLGMSEALGINVTDMKQSLKERFFGRLKKVFNSLLSGGNKVRAFNGWVMPVLMYSFGILKWTQTELDALDRKVRTLLTAYRMHHPRSSVMRLYIPRKCGGRGFLNAKTLHNREVCNLREFFLKVNVAMHRDVVAVDKGLTPLSLQAENWRKPVIMDTNDRKRVWQSKVLHGRFYQALHGPDIDFKASVTWLPTGDLFGETEGFVCAIMDEVMMTNNYRKYVVKDGTVDICRACRRPGESIRHIISGCSHLANGEYLHRHNLVARIIHQQLALKYKLAELEVPYYRYVPDPVLENGHVTLYWDRPIITDRTVMANRPDIVVIDRLKRRAMIVDISVPHDENLVKAEKDKQLKYLDLAHEVVDIWHVDSAVIVPIVVSANGLIAKSLDLHLRKLSLDGWVKRLMQKAVLLDTARIVRRFLSMEP

SEQ ID NO: 11626 - protein, 1205 aa, Amphipyra berbera
MLTRSRAKALTETTRPRSSAPSLSSASQPPDSSIVSDVTPAAAVASSSSDEYFSPPTSPPPARRRGRGRPPDSLRPRGPLASDRVPAAGGSVQRMRWTPTMNENCMRAYFGATEGGTNLTAYRGRMLSLFQVLEPTVNVSAQRLSDQVRVIQRDHRLTDAALDRLRSEVQSNAIISLQSQTAAQPRTPTVVPPLPTHANEESDDRVTNVSTQCNEQLRSALELAIREYRFTPPNIRPRIPRLPMHRKNRALMCALDSLLSSYFDNSENLEDTHSILYCAAIAACRVAHAKFDNNDKATRPKPAVPAWQCRIERRINEARALIGKLICFREGNTRPRVMRFVRRAFSGTDINPRDYMSRVTERIDFLKQKVYAWANRIRRYKRRVERYTQNRMFHSDERWVYRTWERPDHDVSDAHPPDNDVMNTFWRNIWSMPVTHTEGDWMQEVQRACEPIKEMGDITIVPQDVTSAVRPMANWKSPGPDGLHNFWIKWLRSSHARLASQFQSSLESGSLPEFLTTGVTHLLHKSGSTAEPKNYRPITCLPTVYKLLTSILRAKINSHILYNSIMSVSQNGCKNGSRGTKELLLIDMAISQQVRRSRKDLSTCWIDYKKAYDSVPHTWLMRVLELYKVNTTLCAFLTSCMGQWRTVLHYPGCRQIQGRGEPIRIERGIFQGDSLSPLWFCLALNPLSTLLEGSGLGYRLRRGGQVISHLLYMDDLKLFAPNNLQLMKLLKVTETFSNSIRMEFGVDKCAVMHVKRGGIMESVGTQLSDSIHLRSLSSTETYKYLGMSEALGINETDMKQSLRERFYGRLKKVLKSLLSGGNKVRAFNGWVMPVLMYSFGILKWTQTELDALDRRVRTLLTAYRMHHPRSSVMRLYIPRKCGGRGFLNAKTLHNREVCSLREYFLQADVGMHRDVVAVDKGFTPLSLAKENWRKPVVLDTNGRREVWQSKELHGRFYRALHGPDVDFLASVAWLRFGDLFGETEGFVCAIMDEVMMTNNYRKYIVKDGTVDICRACHCPGESIRHIISGCSRLANGEYLHRHNLVARIIHQQLALKYNLVDAEVPYYKYVPDPVLENGHITLYWDRSIITDRTIVANKPDIVVIDRSERLAMIVDITVPHDENLVKAEKDKEIKYQDLAHEVVDMWEVDSAVIVPIVVTANGLIAKSLDQHLTRLALGSWIKGLMQKAVLLDTARIVRKFLSLRP

SEQ ID NO: 11627 - protein, 962 aa, Amphipyra berbera
MHRKNRALMCALDSLLSSYFDNSENLEDTHSILYCAAVAACRVAHAKFDNNDKATRPKPAVPAWQCRIERRINEARALIGKLICFREGNTRPRVMRFVKRAFSGTDINPRDYMSRVTERIDFLKQKVYAWANRIRRYKRRVERYTQNRMFHSDERWVYRTWERPDHDVSDTHLPDNDVMNTFWRNIWSMPVTHTEGDWMQEVQRACEPIEKMGDITIVPQDVTSAVRPMANWKSPGPDGLHNFWIKWLRSSHARLASQFQSSLESGSLPEFLTTGVTHLLHKSGSTAEPKNYRPITCLPTVYKLLTSILRAKINSHIINNSIMSVSQNGCKNGSRGTKELLLIDMAISQQVRRSRKDLSTCWIDYKKAYDSVPHTWLMRVLELYKVNTTLCAFLTSCMGQWRTVLHYPGCRQIQGRGEPIRIERGIFQGDSLSPLWFCLALNPLSTLLEGSGLGYRLRRGGQVISHLLYMDDLKLFAPNDLQLMKLLKVTETFSNSIRMEFGVDKCAVMHVKRGGIMESVGTQLSDSIHLRSLSSTETYKYLGMSEALGINETDMKQSLRERFYGRLKKVLKSLLSGGNKVRAFNGWVMPVLMYSFGILKWIQTELDALDRRVRTLLTAYRMHHPRSSVMRLYIPRKCGGRGFLNAKTLHNREVCSLREYFLQADVGMHRDVVTVDKRFTPLSLAKENWHKPVVLDTNGRREVWQSKELHGRFYRALHGPDVDFLASVAWLRFGDLFGEIEGFVCAIMDEVMMTNNYRKYIVKDGTVDICRACHCPGESIRHIISGCSRLANGEYLHRHNLVARIIHQQLALKYNLVDAEVPYYKYVPDPVLENGHITLYWDRSIITDRTIVANKPDIVVIDRSERLTMIVDITVPHDENLVKAEKDKEIKYQDLAHEVVDMWEIDSAVIVPIVVTANGLIAKSLDQHLKRLSLGSWVKGLIQKAVLLDTARIVRRFLSLRP

SEQ ID NO: 11628 - protein, 1203 aa, Amphipyra berbera
MLTRARARKQTAHPRSPDSSLSSASQPPESSPPVSAVTPAAAVASSSSDEYYSPPSSPPPVRRRGGARPPACLGPRGQPATNRVPAAGGNVSRMRWTQSINENVMRAYYGATEGGINLTAYRERMLFLFQVLEPAINVSAQRLSDQVRVVQRNRRLDDTVLERLRSEARNSQTVTFPVQAAVQMQPIAVPPRPIHVDGEGVGEAINVSNQCSEELRSALDDAILEFRTTPPEIRPRLPRLPMHGKNRALMCALDSLLSNYFDGSEDLADTHSILYCAAIAACRVAHVKFTENERATRPKPAVPAWQSRIERRIGGARVLIGKLICFREGNNRPRVMRFVRRAFSGTDISPRDYMSRVTERIDFLKQKVYAWANRIRRYKRRVERYTQNRIFQSDQRRVYRAWERPDPGGGDVRLPDDDALSSFWRSIWSVPIAHTEDGWMRDIEQVCEPIAEMEPITITPQDVADAARPLPNWKSPGPDGLHNFWLKWLRSSHARLASQFQSSLESGSLPQFLTTGVTHLLYKSGSTAEPKNYRPITCLPTVYKLLTSILRVKITTHIDNNCIMSASQNGCRKGSRGTKELLLIDMAISQQVRRSQKDLSTCWIDYKKAYDSVPHSWLMRVLELYKINTTLRTFLMSCMRHWRTVLRYPGCRRIRGSGEQIRIERGIFQGDSLSPLWFCLALNPLSTLLEGTGLGYQLRRGGQVISHLLYMDDLKLFAPTDLQLMELLKVTENFSNSIRMEFGVDKCAVMHVKRGRIAESEGIQLPNSVQLRSLSPTETYKYLGMSEALGISETDMRQSLRERFFGRLNKLLKSLLSGGNKVRAFNGWVMPVLMYSFGTLKWTQADLDALDRRVRALLTAHRMHHPRSSVMRLYIPRKCGGRGFLNAKTLHNREVYSLREYFLQAEGVMHRDVVAVDKGFTPLALARENWRKPAVLSTNDREVVWQSKELHGRYYRALHGPDVDFSASVSWLRSGNLFGETEGFVCAIMDEVMMTNNYRKYIVKDGTVDICRACHRPGESIRHIVSGCSRLANGEYLHRHNLVARIIHQQLALKYNLVESEVPYYRYVPDPVLENGHATLYWDRSIITDRTIVANKPDIVVIDRSERRTMIVDITVPHDENLVKAEKDKQIKYLDLAHEVVGMWDVDSAVIVPIVVTANGIIAKSLDIHLMRLSLGGWIKGLIQRAVLLDTARIVRRFLSLEP

SEQ ID NO: 11629 - protein, 1212 aa, Amphipyra berbera
MLTRSRTKTQDTRTRPRPSASSLSSASQPPDSSIVSDVTPAAAVASSSSDEFYSPPTSPPPPPPPPPRRGRRGRGRPPACMGPRGPPASDRVPAPGGSVQRMRWTLTMNENCMRAYFGATEGGTNLTAYRGRMLSLFQVLEPTVNVSAQRLSDQVRVIQRDHRLTDAALDRLRSEVQSNRIISLQSQTAAQPQTPTVVPPLPIHADEESDDRVTNVSTQCNEQLRSALELAIREYRFTPPNIRPRIPRLPMHRKNRALMCALDSLLSSYFDNSENLEDTHSILYCAAVAACRVAHAKFDNNDRATRPKPAVPAWQCRIERRINEARALIGKLICFREGNTRPRVIRFVRRAFSGTDINPRDYLSRVIERIDFLKQKVYAWANRIRRYKRRVERYTQNRMFHSDERWVYRTWERPDHDVSDTHLPDNDVMNTFWRNIWSMPVTHTEGDWMQEVQRACEPIEEMGDITIVPQDVTSAVRPMANWKSPGPDGLHNFWLKWLRSSHARLASQFQSSLESGSLPEFLTTGVTHLLHKSGSTAEPKNYRPITCLPTVYKLLASILRAKINSHIINNSIMSVSQNGCKNGSRGTKELLLIDMAISQQVRRSRKDLSTCWIDYKKAYDSVPHTWLMRVLELYKVNTTLCAFLTSCMGQWRTVLHYPGCRQIQGRGEPIRIERGIFQGDSLSPLWFCLALNPLSTLLEGSGLGYRLRRGGQVISHLLYMDDLKLFAPNNLQLMKLLKVTETFSNSIRMEFGVDKCAVMHVKRGGIMESVGTQLSDSIHLRPLSSTETYKYLGMSEALGINETDMKQSLRERFYGRLKKVLKSLLSGGNKVRAFNGWVMPVLMYSFGILKWTQTELDALDRRVRTLLTAYRMHHPRSSVMRLYIPRKCGGRGFLNAKTLHNREVCSLREYFLQADVGMHRDVVAVDKGFTPLSLAKENWRKPVVLDTNGRREVWQSKELHGRFYRALYGPDVDFLASVAWLRFGDLFGETEGFVCAIMDEVMMTNNYRKYIVKDGTVDICRACHCPGESIRHIISGCSRLANGEYLHRHNLVARIIHQQLALKYNLVDAEVPYYKYVPDPVLENGHITLYWDRSIITDRTIVANKPDIVVIDRSERLTMIVDITVPHDENLVKAEKDKEIKYQDLAHEVVDMWEVDSAVIVPIVVTANGLIAKSLDQHLTRLALGSWVKGLIQKAVLLDTARIVRKFLSLRP

SEQ ID NO: 11630 - protein, 1202 aa, Amphipyra berbera
MLTRSRTRTTEQRSARPPPPDSPLSSASQPPELGLPVTPAAAASSSSSDEYFSPPTSPRPVRRQGRGRPPNSLGPRGPPAPSRVLAAGGYVQRMKWTQSINENVMRAYYGSTEGGTNLTAYRVRMLTLFQELEPAINVSAQRLSDQVRVIQRNHRLDDAALDRLRLEVQNSRAIPVPSQTAVHQLINVAPPRSDRVDGDEDDGAVTVSSQYNDRLRSALEDAIRECRANPESRPRLPRLPMHNKNRALVCALDSLLANYFESSEDLGDTHSILYCAAVAACRVANVKFNNSERATRPKLAVPAWQCRIERRIDETRALIGKLICFREGNTRPRVMRFVRRAFSGTGISPREYTSRATERIDFLKQKVCAWASRIRRYKRRVERYTQNRMFQCDQRWVYRAWERPDQSVSGGRLPDDDAMSSFWRSIWSVPVIHTEGDWMRDIERTCESIEEMGEIVISPQDVAGAVRPLPNWKSPGPDGLHNFWIKWLRSSHARLASQFQSSLESGSLPQFLTTGVTHLLHKSGSTAEPKNYRPITCLPTVYKLLTSILRSKINTHIGNNSVLSSSQNGCRNGSRGTKELLLIDTAISQQVRRSQKSLSTCWIDYKKAYDSVPHTWLMRVLELYKINTTLRTFLRSCMGQWRTVLRYPGCQPIRGSGEPIRIERGIFQGDSLSPLWFCLALNPLSTLLEGSGLGYPLRRGGQVVSHLLYMDDLKLFAPTKLQLVDLLKVTETFSNSIRMEFGVDKCAVMHVRRGRIMESEGLQLSDSIHLSPLSANDTYKYLGMSEGLGISEADMKQSLRERFFGRLKKVLKSLLSGGNKVRAFNGWVMPVLMYSFGILKWTQTELDALDRRVRTLLTANRMHHPRSSVMRLYIPRKCGGRGLLNAKTLHNREVCSLREFFLHADAGMHRDVVAVDKGLTPLSLARENWRKPVVLSTNDRREIWQSKELHGRFYRALHGPDVDFLASVSWLRFGDLFGETEGFVCAIMDEVIMTNNYRKYIVKDGTVDICRACHCPGESLRHIISGCSRLANGEYLHRHNQVARIIHQQLALKYNLVESEVPYYRYVPDPVLENGRITLYWDRSIITDRTIVANKPDIVVIDRSERRTMIVDVTIPHDGNLVKAEKDKQIKYLDLAHEVVNMWDVESATIVPIVVTANGLMAKSLDKHLMRLSLGGWIKGLIQKAVLLDTARIVRRFLSLEP

SEQ ID NO: 11631 - protein, 1197 aa, Noctua janthe
MLTRSATRRARLSPPDPSLSSASPPPESSPIVSAVTPAVAVASSSSDEYFSPPTTPPPVRRRGGRRPPDGLGPRGPPTSDRVPAPGGSVPRMRWTQSINANVMRAYYGATEGGNNLTAYRVRMLSLFQVLEPAVNVSAQRLSDQVRVIQRNGMLDDTVLDRLRTEMQSSHVIATPPQTVVPPQSTIIPTHDNNVSNDMVTNVSTQCNEEMRCALEGAIREYRFMQPDLRPRVPRLPMHNKNKVLVAVLDSQLSNYFDNCENLTDAHSVLYCAAVAACRVAHVKFSDDRATRPNPAVPSWQYRIERRIGEARALIGKLICFREGNTRPRVMRFVRRAFSGTDISARDYMSRVTERIDFLKQKVYAWANRIRRYKRRVDRYTQNRIFQRDERWVYRAWERPDQGVADTHLPDDDAMCSFWRSIWSVPVSHTEGEWAREVERACDLVPEMGAITISPQDVVRAVRPLPNWKSPGPDGLHNFWIKWFTRSHARLAILFQSALESGSLPEFLTTGITHLLHKSGSTAEPKNYRPIACLPTVYKVLTSILRAKINKHIDDNSVMSASQNGCRNGSRGTKELLLIDMAISQQVRRSRRDLSTCWIDYKKAYDSVPHTWLMRVLELYKVDSTLRIFLMSCMGQWRTVLRYPGCRQIQRNSEPIRIERGIFQGDSLSPLWFCLALNPLSTLLEDSGLGYRLRRGGQVISHLLYMDDLKLFAPNDLQLMELLKVTETFSSAIRMEFGVDKCAVMHVKRGEIVESVGTQLSDSINLRSLSATETYKYLGMSEALGINVADMKQSLKERFFGRLKKVFNSLLSGGNKVRAFNGWVMPVLMYSFGILKWTQTELDALDRRVRTLLTTYRMHHPRSSVMRLYIPRRCGGRGFLNAKTLHNREIYSLREYFLETDVGMHRDVVAVDKGLTPLSLAKENWRKPVVLDTNDRMEVWQSKELHGRFFRALHGPDVDLPASVAWLRSGDLFGETEGFVCAIMDEVMMTNNYRRFIVKDGTVDICRACHRPGESIRHIISGCSRLANGEYLHRHNLVARIIHQQLALKYNLVESEVPYYKYVPDPVLENGNITLYWDRSIVTDRTIVANKPDIVVVDRSERRAMIVDITVPHDGNLVKAEKDKQIKYLDLAHEVVDMWDVDSAIIVPIVVSAHGLIAKSLDQYLRRLSLGSWIKGLIQKAVLLDTARIVRRFLSLEP

SEQ ID NO: 11632 - protein, 1197 aa, Noctua janthe
MLTRSAARRARLSPPDPSLSSASPPPESRPVVSAVTPAVAVASSSSDEYFSPPTTPPPVRRRGGRRPPDGLGPRGPPASDRVPAPGGSVPRMRWTQSINANVMRAYYGATEGGNNLTAYRVRMLSLFQVLEPAVNVSAQRLSDQVRVIQRNGMLDDTVLDRLRTEMQSSHVIATPPQTVVPPQSTIIPTHDNNVSNDMVTNVSTQCNDEMRCALEGAIREYRFMQPDLRPRVPRLPIHNKNRVLVAVLDSQLSNYFDNCEDLTDAHSVLYCAAVAACRVAHVKFSDDRATRSKPAVPSWQYRIERSIGEARALIGKLICFREGNTRPRVMRFVRRAFSGTDISARDYMSRVTERIDFLKQKVYAWANRIRRYKRRVDRYTQNRTFQRDERWVYRAWERPDQGVADTRLPDDDAMSSFWRSIWSVPVSHTESEWTREVERACDLVPEMGAITISPQDVVRAVRPLPNWKSPGPDGLHNFWIKWFTRSHARLAILFQSALESGSLPEFLTTGITHLLHKSGSTTEPKNYRPITCLPTVYKVLTSILRAKINKHIDDNSVMSASQNGCRNGSRGTKELLLIDMAISQQVRRSRRDLSTCWIDYKKAYDSVPHTWLMRVLELYKVDSTLRIFLMSCMGQWRTVLRYPGCRQIQRNSEPIRIERGIFQGDSLSPLWFCLALNPLSTLLEDSGLGYRLRRGGQVISHLLYMDDLKLFAPNDLQLMELLKVTETFSSAIRMEFGVDKCAVMHVKRGEIVESVGTQLSDSINLRSLSATETYKYLGMSEALGINVADMKQSLKERFFGRLKKVFNSLLSGGNKVRAFNGWVMPVLMYSFGILKWTQTELDALDRRVRTLLTAYRMHHPRSSVMRLYIPRRCGGRGFLNAKTLHNREICSLREYFLETDVGMHRDVVAVDKGLTPLSLAKENWRKPVVLDTNDRMEVWQSKELHGRFFRALHGPDVDLPASVAWLRSGDLFGETEGFVCAIMDEVMMTNNYRRFIVKDGTVDICRACHRPGESIRHIISGCSRLANGEYLHRHNLVARIIHQQLALKYNLVESEVPYYKYVPDPVLENGSITLYWDRSIVTDRTIVANKPDIVVVDRSERRAMIVDITVPHDGNLVKAEKDKQIKYLDLAHEVVDMWDVDSAIIVPIVVSAHGLIAKSLDQYLRRLSLGSWIKGLIQKAVLLDTARIVSRFLSLEP

SEQ ID NO: 11633 - protein, 1197 aa, Noctua janthe
MLTRSATRRARLSPPDPSLSSASPPPESSPIVSAVTPAVAVASSSSDEYFSPPTTPPPVRRRGGRRPPDGLGPRGPPASDRVPAPGGSVPRMRWTQSINANVMRAYYGATEGGNNLTAYRVRMLSLFQVLEPAVNVSAQRLSDQVRVIQRNGMLDDTVLDRLRTEMQSSHVIATPPQTVVPPQSTIIPTHDNNVSNDMVTNVSTQCNEEMRCALEGAIREYRFMQPDLRPRVPRLPMHNKNKVLVAVLDSQLSNYFDNCENLTDAHSVLYCAAVAACRVAHVKFSDDRATRAKPAVPSWQYRIERRIGEARALIGKLICFREGNTRPRVMRFVRRAFSGTDISVRDYMSRVTERIDFLKQKVYAWANRIRRYKRRVDRYTQNRTFQRDERWVYRAWERPDQGVADTHLPDDDAMCSFWRSIWSVPVSHTEGEWTREVERACDLVPEMGAITISPQDVVRAVRPLPNWKSPGPDGLHNFWIKWFTRSHARLAILFQSALESGSLPEFLTTGITHLLHKSGSTAEPKNYRPIACLPTVYKVLTSILRAKINKHIDDNSVMSASQNGCRNGSRGTKELLLIDMAISQQVRRSRRDLSTCWIDYKKAYDSVPHTWLMRVLELYKVDSTLRIFLMSCMGQWRTVLRYPGCRQIQRNSEPIRIERGIFQGDSLSPLWFCLALNPLSTLLEDSGLGYRLRRGGQVISHLLYMDDLKLFAPNDLQLMELLKVTETFSSAIRMEFGVDKCAVMHVKRGEIVESVGTQLSDSINLRSLSATETYKYLGMSEALGINVADMKQSLKERFFGRLKKVFNSLLSGGNKVRAFNGWVMPVLMYSFGILKWTQTELDALDRRVRTLLTTYRMHHPRSSVMRLYIPRRCGGRGFLNAKTLHNREIYSLREYFLETDVGMHRDVVAVDKGLTPLSLAKENWRKPVVLDTNDRMEVWQSKELHGRFFRALHGPDVDLPASVAWLRSGDLFGETEGFVCAIMDEVMMTNNYRRFIVKDGTVDICRACHRPGESIRHIISGCSRLANGEYLHRHNLVARIIHQQLALKYNLVESEVPYYKYVPDPVLENGNITLYWDRSIVTDRTIVANKPDIVVVDRSERRAMIVDITVPHDGNLVKAEKDKQIKYLDLAHEVVDMWDVDSAIIVPIVVSAHGLIAKSLDQYLRRLSLGSWIKGLIQKAVLLDTARIVRRFLSLEP

SEQ ID NO: 11634 - protein, 1046 aa, Noctua janthe
MVCWMTPYLIACGLKCRVAMSLPRRRRLWFHQSTIIPTHDNNVSNDMVTNVSTQCNEEMRCALEGAIREYRFMQPDFRPRVPRLPMHNKNKVLVAVLDSQLSNYFDNCENLTDAHSVLYCAAVAACRVAHVKFSDDRATRPKPAVPSWQYRIERRIGEARALIGKLICFREGNTRPRVMRFVRRAFSGTDISARDYMSRVTERIDFLKQKVYAWANRIRRYKRRVDRYTQNRTFQRDERWVYRAWERPDQGVADTHLPDDDAMCSFWRSIWSVPVSHTEGEWTREVERACDLVPEMGAITISPQDVVRAVRPLPNWKSPGPDGLHNFWIKWFTRSHARLAILFQSALESGSLPEFLTTGITHLLHKSGSTAEPKNYRPIACLPTVYKVLTSILRAKINKHIDDNSVMSASQNGCRNGSRGTKELLLIDMAISQQVRRSRRDLSTCWIDYKKAYDSVPHTWLMRVLELYKVDSTLRIFLMSCMGQWRTVLRYSGCRQIQRNSEPIRIERGIFQGDSLSPLWFCLALNPLSTLLEDSGLGYRLRRGGQVISHLLYMDDLKLFAPNDLQLMELLKVTETFSSAIRMEFGVDKCAVMHVKRGEIVESVGTQLSDSINLRSLSATETYKYLGMSEALGINVADMKQSLKERFFGRLKKVFNSLLSGGNKVRAFNGWVMPVLMYSFGILKWTQTELDALDRRVRTLLTTYRMHHPRSSVMRLYIPRRCGGRGFLNAKTLHNREICSLREYFLETDVGMHRDVVAVDKGLTPLSLAKENWRKPVVLDTNDRMEVWQSKELHGRFFRALHGPDVDLPASVAWLRSGDLFGETEGFVCAIMDEVMMTNNYRRFIVKDGTVDICRACHRPGESIRHIISGCSRLANGEYLHRHNLVARIIHQQLALKYNLVESEVPYYKYVPDPVLVNGNITLYWDRSIITDRTIVANKPDIVVVDRSERRAMIVDITVPHDGNLVKAEKDKQIKYLDLAHEVVDMWDVDSAIIVPIVVSAHGLIAKSLDQYLRRLSLGSWIKGLIQKAVLLDTARIVRRFLSLEP

SEQ ID NO: 11635 - protein, 1085 aa, Noctua janthe
MLTRSAARRARLSPPDPSLSSASPPPESRNVVSAVTPAVAVASSSSDEYFSPPTTPPPVRRRGGRRPPDGLGPRGPPASDRVPAPGGSVPRMRWTQSINANVMRAYYGATEGGNNLTAYRVRMLSLFQVLEPAVNVSAQRLSDQVRVIQRNGMLDDTVLDRLRTEMQSSHVIATPPQTVVPPQSTIIPTHDNNVSNDMVTNVSTQCNEEMRCALEGAIREYRFMQPDLRPRVPRLPMHNKNKVLVAVLDSQLSNYFDNCENLTDAHSVLYCAAVAACRVAHVKFSDDRATRPKPAVPSWQYRIERRIGEARALIGKLICFREGNTRPRVMRFVRRAFSGTDISARDYMSRVTERWKSPGPDGLHSFWIKWFTRSHARLAILFQSALESGSLPEFLTTGITHLLHKSGSTAEPKNYRPITCLPTVYKVLTSILRAKINKHIDDNSVMSASQNGCRNGSRGTKELLLIDMAISQQVRRSRKDLSTCWIDYKKAYDSVPHTWLMRVLELYKIDATLRTFLMSCMGQWRTVLRYPGCRQIQRNSEPIRIERGIFQGDSLSPLWFCLALNPLSTLLEDSGLGYRLRRGGQVISHLLYMDDLKLFAPNDLQLMELLKVTETFSSAIRMEFGVDKCAVMHVKRGEIVESVGTQLSDSINLRSLSATETYKYLGMSEALGINVADMKQSLKERFFGRLKKVFNSLLSGGNKVCAFNGWVMPVLMYSFGILKWTQTELDALDRRVRTLLTAYRMHHPRSSVMRLYIPRRCGGRGFLNAKTLHNREICSLREYFLETDVGMHRDVVAVDKGLTPLSLAKENWRKPVVLDTNDRMEVWQSKELHGRFFWALHGPDVDLSASVAWLRSGDLFGETEGFVCAIMDEVMMTNNYRRFIVKDGTVDICRACHRPGESIRHIISGCSRLANGEYLHRHNLVARIIHQQLALKYNLVESEVPYYKYVPDPVLENGSITLYWDRSIITDRTIVANKPDIVVVDRSERRAMIVDITVPHDENLVKAEKDKQIKYLDLAREVVDMWDVDSAIIVPIVVSAHGLIAKSLDQYLRRLSLGSWIKGLIQKAVLLDTARIVRRFLSLEP

SEQ ID NO: 11636 - protein, 1197 aa, Noctua janthe
MLTRSATRRARLSPPDPSLSSASPPPESSPIVSAVTPAVAVASSSSDEYFSPPTTPPPVRRRGGRRPPDGLGPRGPPASDRVPAPGGSVPRMRWTQSINANVMRAYYGATEGGNNLTAYRVRMLSLFQVLEPAVNVSAQRLSDQVRVIQRNGMLDDTVLDRLRTEMQSSHVIATPPQTVVPPQSTIIPTHHNNVSNDMVTNVSTQCNEEMRCALEGAIREYRFMQPDLRPRVPRLPMHNKNKVLVAVLDSQLSNYFDNCENLTDAHSVLYCAAVAACRVAHVKFSDDRATRPKPAVPSWQYRIERRIGEARALIGKLICFREGNTRPRVMRFVRRAFSGTDISARDYMSRVTERIDFLKQKVYAWANRIRRYKRRVDRYTQNRTFQRDERWVYRAWERPDQGVADTRLPDDDAMCSFWRSIWSVPVSHTEGEWTREVERACDLVPEMGAITISPQDVVRAVRPLPNWKSPGPDGLHNFWIKWFTRSHARLAILFQSALESGSLPEFLTTGITHLLHKSGSTAEPKNYRPIACLPTVYKVLTSILRAKINKHIDDNSVMSASQNGCRNGSRGTKELLLIDMAISQQVRRSRRDLSTCWIDYKKAYDSVPHTWLMRVLELYKVDSTLRIFLMSCMGQWRTVLRYPGCRQIQRNSEPIRIERGIFQGDSLSPLWFCLALNPLSTLLEDSGLGYRLRRGGQVISHLLYMDDLKLFAPNDLQLMELLKVTETFSSAIRMEFGVDKCAVMHVKRGEIVESVGTQLSDSINLRSLSATETYKYLGMSEALGINVADMKQSLKERFFGRLKKVFNSLLSGGNKVRAFNGWVMPVLMYSFGILKWTQTELDALDRRVRTLLTTYRMHHPRSSVMRLYIPRRCGGRGFLNAKTLHNREICSLREYFLETDVGMHRDVVAVDKGLTPLSLAKENWRKPVVLDTNDRMEVWQSKELHGRFFRALHGPDVDLPASVAWLRSGDLFGETEGFVCAIMDEVMMTNNYRRFIVKDGTVDICRACHRPGESIRHIISGCSRLANGEYLHRHNLVARIIHQQLALKYNLVESEVPYYKYVPDPVLENGNITLYWDRSIVTDRTIVANKPDIVVVDRSERRAMIVDITVPHDGNLVKAEKDKQIKYLDLAHEVVDMWDVDSTIIVPIVVSAHGLIAKSLDQYLRRLSLGSWIKGLIQKAVLLDTARIVRRFLSLEP

SEQ ID NO: 11637 - protein, 1000 aa, Noctua janthe
MVTNVSTQCNEEMRCALEGAIREYRFMQPDLRPRVSRLPMHNKNKVLVAVLDSQLSNYFDNCENLTDAHSVLYCAAVAACRVAHVKFSDDRATRPKPAVPSWQYRIERRIGEARALIGKLICFREGNTRPRVMRFVRRAFSGTDISARDYMSRVTERIDFLKQKVYAWANRIRRYKRRVDRYTQNRTFQRDERWVYRAWERPDQGVADTHLPDDDAMCSFWRSIWSVPVSHTEGEWTREVERACDLVPEMGAITISPQDVVRAVRPLPNWKSPGPDGLHNFWIKWFTRSHARLAILFQSALESGSLPEFLTTGITHLLHKSGSTAEPKNYRPIACLPTVYKVLTSILRAKINKHIDDNSVMSASQNGCRNGSRGTKELLLIDMAISQQVRRSRRDLSTCWIDYKKAYDSVPHTWLMRVLELYKVDSTLRIFLMSCMGQWRTVLRYPGCRQIQRNSEPIRIERGIFQGDSLSPLWFCLALNPLSTLLEDSGLGYRLRRGGQVISHLLYMDDLKLFAPNDLQLMELLKVTETFSSAIRMEFGVDKCAVMHVKRGEIVESVGTQLSDSINLRSLSATETYKYLGMSEALGINVADMKQSLKERFFGRLKKVFNSLLSGGNKVRAFNGWVMPVLMYSFGILKWTQTELDALDRRVRTLLTTYRMHHPRSSVMRLYIPRRCGGRGFLNAKTLHNREICSLREYFLETDVGMHRDVVAVDKGLTPLSLAKENWRKPVVLDTNDRMEVWQSKELHGRFFRALHGPDVDLPASVAWLRSGDLFGETEGFVCAIMDEVMMTNNYRRFIVKDGTVDICRACHRPGESIRHIISGCSRLANGEYLHRHNLVARIIHQQLALKYNLVESEVPYYKYVPDPVLENGNITLYWDRSIVTDRTIVANKPDIVVVDRSERRAMIVDITVPHDGNLVKAEKDKQIKYLDLAHEVVDMWDVDLAIIVPIVVSAHGLIAKSLDQYLRRLSLGSWIKGLIQKAVLLDTARIVRRFLSLEP

SEQ ID NO: 11638 - protein, 1198 aa, Noctua janthe
MLTRSATRRARLSPPDPSLSSASPPPESSPIVSAVTPAVAVASSSSDEYFSPPTTPPPVRRRGGRRPPDGLGPRGPPASDRVPAPGGSVPRMRWTQSINANVMRAYYGATEGGNNLTAYRVRMLSLFQVLEPAVNVSAQRRLSDQVRVIQRNGMLDDTVLDRLRTEMQSSHVIATPPQTVVPPQSTIIPTHDNNVSNDMVTNVSTQCNEEMRCALEGAIREYRFMQPDLRPRVPRLPMHNKNKVLVAVLDSQLSNYFDNCENLTDAHSVLYCAAVAACRVAHVKFSDDRATRPKPAVPSWQYRIERRIGEARALIGKLICFREGNTRPRVMRFVRRAFSGTDISARDYMSRVTERIDFLKQKVYAWANRIRRYKRRVDRYTQNRTFQRDERWVYRAWERPDQGVADTHLPDDDAMCSFWRSIWSVPVSHTEGEWTREVERACDLVPEMGAITISPQDVVRAVRPLPNWKSPGPDGLHNFWIKWFTRSHARLAILFQSALESGSLPEFLTTGITHLLHKSGSTAEPKNYRPIACLPTVYKVLTSILRAKINKHIDDNSVMSASQNGCRNGSRGTKELLLIDMAISQQVRRSRRDLSTCWIDYKKAYDSVPHTWLMRVLELYKVDSTLRIFLMSCMGQWRTVLRYPGCRQIQRNSEPIRIERGIFQGDSLSPLWFCLALNPLSTLLEDSGLGYRLRRGGQVISHLLYMDDLKLFAPNDLQLMELLKVTETFSSAIRMEFGVDKCAVMHVKRGEIVESVGTQLSDSINLRSLSATETYKYLGMSEALGINVADMKQSLKERFFGRLKKVFNSLLSGGNKVRAFNGWVMPVLMYSFGILKWTQTELDALDRRVRTLLTTYRMHHPRSSVMRLYIPRRCGGRGFLNAKTLHNREICSLREYFLETDVGMHRDVVAVDKGLTPLSLAKENWRKPVVLDTNDRMEVWQSKELHGRFFRALHGPDVDLPASVAWLRSGDLFGETEGFVCAIMDEVMMTNNYRRFIVKDGTVDICRACHRPGESIRHIISGCSRLANGEYLHRHNLVARIIHQQLALKYNLVESEVPYYKYVPDPVLENGNITLYWDRSIVTDRTIVANKPDIVVVDRSERRAMIVDITVPHDGNLVKAEEDKQIKYLDLAHEVVDMWDVDSAIIVPIVVSAHGLIAKSLDQYLRRLSLGSWIKGLIQKAVLLDTARIVRRFLSLEP

SEQ ID NO: 11639 - protein, 1096 aa, Mythimna ferrago
MRSYFGATEGGTNLTAYRGRMLSLFQVLEPAVNVSAQRLSDQMRVIQRNRMLDDAVLDRLRLESRNGRVSPISPPAAVQRQPSVSPRPDHVGEDDDDEAISVSTQCNARLRSALEDAFREYRSIPPELRPRLPRLPMHRKNRTLMCALDSQLSNCFDSSEDLSDTHSILYCAAAAACHVAHVKIPNNDRATRPAKPAWQCRIERRIGEARALIGKLICFREGNTRPRVMRFVRRAFSGTDISPRDYLPRITERIDFLKQKVYAWANRIRRYKRRVERYTQNHTFQSNERWVYRAWERPDQSVIDTRLPDDDAMYSFWRSIWSVPVNHTEGDWTREIERECELIPEMGAINISPQDVACAVRPLPNWKSPGPDGLHNFWLKWFQSSHARLASQFQSALESGSLPQFLTTGITHLLHKSDSTAEPKNYRPITCLPTVYKVLTSILRAKINNHIETNSIMSASQNGCRNGSRGTKELLLIDVAISQQVRRYRRDLSTCWIDYKKAYDSVPHTWLMRVLELYKVDATLRAFLMSCMGQRRTVLHYPGCRRVSENSEPLRIERGIFQGDSLSPLWFCLALNPLSTLLEGSGLGYRLRREGQVISHLLYMDDLKLFASNNLQLMELLKVTETFSSAIRMEFGLDKCAVMHVKRGEIMESVGTQLSDSIHLRSLCSTETYKYLGMSEALGINAADVKQSLRERFFGRLNKVLNSLLSGGNKVRAFNGWVMPVLMYSFGILKWTQTELDALDRRVRTLLTANRMHHPRSSVMRLYIPWKCGGRGFLNAKTLHNREVCSLREYFLETDVGMHRDVVAVDKGLTPLSLASENWRKPIVMDTNERKEVWKGKELHGRFYRALHGPDVDLLASVSWLRFGNLFGETEGFVFAIMDEVMMTNNYRKYIVKDGTVDICRACHRPGESIRHIISRCSHLANGDYLHRHNLVARIIHQQLALKYNLVESEVPYYRYVPDPVLENGSVTLYWDRSIITDRTIVANKPDIVVIDRLERRTMIVDIAVPHDENLVKAEKDKQTKYLDLAREVVDMWEVDRAIIVPIVVTANGLIAKSLDQHLRRLSLGSWIKGLIQKAVLLDTARIVRRFLSQEP

SEQ ID NO: 11640 - protein, 1076 aa, Mythimna ferrago
MLSLFQVLEPAVNVSAQRLSDQVRVIQRNHMLDDTVLDRLRTEMGSHAVTSSSQTMVPPQVSNHLSINADEEITDMVTHVSTQCNNELRSALECAIRECRNIPPELRPRIPRLPMCNKNRALVAALDSQLSNYFDDCEDLTDTHSIMYCAAVAACRVAHVKFPNTDVATRPKPAVPAWQCRIERRIGGARALIGKLICFREGNTRPRVMRFVRRAFSGTDISPRDYMSRVTERIDFLKQKVYAWANRIRRYKRRVERYIQNSTFRSNERWVYRTWERPDQGVTDTHLPDDDAMCSFWRNIWSVPVSHTEGGWTREVERACESITEMGAITISPQDVARAVRPLPNWKSPGPDGLHNFWIKWLQRSHARLASQYQTALESGSLPEFLTTGVTHLLHKSGSTAEPKNYRPITCLPTVYKVLTSILRAKINNYVDNNAIMSASQNGCRNGSRGTKELLLSDMAISQQVRRSRKDLSTCWIDYKKAYDSVPHTWLMRVLELYKVDATLCTFLMSCMRQWRTVLRYPGCRNIQRNSEPVRIERGIFQGDSLSPLWFCLALNPLSTLLENSGLGYRLKRGGQVISHLLYMDDLKLFAPNNLQLMELLKVTETFSSAIRMEFGVDKCAVMHIKRGEIVESVGTQLSDSIHLRSLSPTETYKYLGMSEALGINATDMKQSLKERFFGRLKKVLNSLLSGGNKVRAFNGWVMPVLMYAFGVLKWTQTELDALDRKVRTLLTAYRMHHPRSSVMRLYIPRKCGGRGFLNAKTLHNREVCSLREYFLAADVGMHRDVVAVDKGLTPLSLANENWRKPVVLDTNVRKEVWQSKELHGRFFRALHGPDVDQLASVAWLRVGDLFGETEGFVCAIMDEVIMTNNYRRFIVKDGTVDICRACHRPGESIRHIISGCSRLANGEYLHRHNLVARIIHQQLALKYSLVESEVPYYRYVPDPVLDSGDITLYWDRSIITDRTIVANKPDIVVVDRSERRAMIVDISVPHDENLVKAEKDKQIKYIDLAREVVDMWEVDSAIIVPIVVSANGLIAKSLDQHLRRLSLGDWIKGLIQKAVLLDTARIGRRFLSLEP

SEQ ID NO: 11641 - protein, 1200 aa, Mythimna ferrago
MLTRAAARRARPPPPASSLSSASPPPEPSLNASAVTPAATVASSSSDEFYSPPTSPPPARRRRGRRPPSSLGPRGPPASDRVPAPGGSVQRMRWTQSINENVMRSYYGATEGGNNLTAYRVRMLSLFQVLEPAVNVSAQRLSDQVRVILRNHMLDDSVLDRLRTEMSDRVITPPSQPVVPVVVPPSSHISFHTDEVSTDMVTNVSTQCNNELRSALECAIREYRNIPPELRPRIPRLPMCNKNRALVAALDSQLSNYFDDCEDLTETHSIMYCAAVAACRVAHVKFPDSDEATRPKSAVPAWQCRIERRIGGARALIGKLICFREGNTRPRVMRFVRRAFSGTNISPRDYMSRVTERIDFLKQKVYAWANRIRRYKRRVERYTQNRTFRSNERWVYRAWERPDQGVTDARLPEDDAMCSFWRSIWSVPVSHTEGDWTREVERACDPIPQMGAITISPQDVARAVRPLPNWKSPGPDGLHNFWIKWFTRSHARLAYQFQSALESGSLPQFLTTGITHLLHKSGSTAEPKNYRPITCLPTVYKVLTSILRSKINSHIDENSIMSPSQNGCRNGSRGTKELLLIDMTISQQVRRSRKDLSTCWIDYKKAYDSVPHTWLMRVLELYKIDTTLRTFLMSCMRQWSTVLRYPGCRNIQRNSEPVRIERGIFQGDSLSPLWFCLALNPLSTLLENSGLGYRLKRGGQVISHLLYMDDLKLFAPNNLQLMELLKVTETFSSAIRMEFGVDKCAVMHVKRGEVVESVGVQLTDSINLRSLSPTETYKYLGMSEALGISTIDMKQSLKERFFGRLKKVFNSLLSGGNKVRAFNGWVMPVLMYSFGVLKWTQTELDALDRRVRTLLTAYRMHHPRSSVMRLYISRKSGGRGFLNAKTLHNREVCSLREYFLAADVGMHRDVVALDKGLTPLSLANENWRKPIVLDTDDRREVWQSKELHGRFFRALHGPDVDQLASVAWLRFGDLFGETEGFVCAIMDEVIMTNNYRRFIVKDGTVDICRACHRPGESIRHIISGCSRLANGEYLHRHNLVARIIHQQLALKYSLVESEVPYYRYEPDPVLDNGHITLYWDRPIITDRTIVANKPDIVVVDQSERRAMIVDISVPHDESLVKAEKDKQIKYIDLAREVVDMWEVDSAIIVPIVVSANGLIAKSLDQHLRRLSLGDWIKGLIQKAVLLDTARIVRRFLSLEP

SEQ ID NO: 11642 - protein, 1200 aa, Mythimna ferrago
MLTRSRAQQLNTHLTTSGSSLSSASQPPGPAPAVSPEIPVAAVASSSSDEYFSPPTTPPPTRRRGRGRPPACLGPRGPPASDRVPAAGGSVQRMRWTQSINENVMRSYFGATEGGTNLTAYRGRMLSLFQVLEPAVNVSAQRLSDQVRVIQRNRMLDDAVLDRLRLESRNGRVSPVSPPAAVQRQLSVSPRPDHVGEDDDDGAISVSTQCNARLRSALEDAFREYRSIPPELRPRLPRLPMHRKNRALVCALDSQLSNCFDSSEDLTDTHSILYCAAAAACRVAHVKIPNSDRATRPAKPAWQCRIERRIGEARALIGKLICFREGNTRPRVMRFVRRAFSGTDISPRDYLPRITERIDFLRQKVYAWANRIRRYKRRVERYTQNRAFQSNERWVYRAWERPDQSVIDTHLPDDDAMYSFWRSIWSVPVNHTEGDWTREVERECELIPEMGAITISPQDVARAVRPLPNWKSPGPEGLHNFWLKWFKSSHARLASQFQSALESGSLPQFLTTGITHLLYKSGSTAEPKNYRPITCLPTVYKVLTSILRAKINSHIETNSIMSASQNGCRNGSRGTKELLLIDVAISQQVRRSRRDLSICWIDYKKAYDSVPHTWLMRVLELYKIDVTLRTFLMSCMGQWRTVLHYPGCRRVSENSEPLRIERGIFQGDSLSPLWFCLALNPLSTLLEGSGLGYRLRREGQVISHLLYMDDLKLFASNNLQLMELLKVTETFSSAIRMEFGLDKCAVMHVKRGEIMESVGTQLSDSIHLRSLCSTETYKYLGMSEALGINAADVKQSLRERFFGRLNKVLKSLLSGGNKVRAFNDWVMPVLMYSFGILKWTQTELDALDRRVRTLLTANRMHHPRSSVMRLYIPRKCGGRGFLNAKTLHNREVCSLREYFLETDVGMHRDVVAVDKGLTPLSLANENWRKPIVMDTNERKEVWKGKELHGRFYRALHGPDVDLLASVSWLRFGDLFGETEGFVFAIMDEVMMTNNYRKYIVKDGTVDICRACHRPGESIRHIISGCSHLANGDYLHRHNLVARIIHQQLALKYNLVESEVPYYRYVPDPVLENGSVTLYWDRSIITDRTIVANKPDIVVIDRLERRTMIVDIAVPHDENLVKAEKDKQTKYLDLAREVVDMWEVDRAIIVPIVVTANGLIAKSLDQHLRRLSLGSWIKGLIQKAVLLDTARIVRRFLSQEP

SEQ ID NO: 11643 - protein, 1200 aa, Mythimna ferrago
MLTRAAARRARPPPPASSLSSASPPPEPSPIVSAVTPAVAAASSSSDEYYSPPTTPPPTRRRGGRRPPDCLGPRGPPASDRVPAPGGSVQRMRWTQSINENVMRSYYGATEGGNNLTAYRVRMLSLFQVLEPAVNVSAQRLSDQVRVILRNHMLDDTVLDRLRTEMSDRVITPPSQPVVPAVVPPSSYISFHTDEVSSDTVTNVSNQCNSELRSALECAIREYRNIPPELRPRIPRLPMCNKNRALVAALDSQLSNYFDDCEDLTDAHSIMYCAAVAACRVAHVKFPNSDVATRPKPAVPAWQCRIERRIGGARALIGKLICFREGNTRPRVMRFVRRAFSGTDISPRDYMSRVTERIDFLKQKVYAWANRIRRYKRRVERYTQNRTSRSNERWVYRAWERPDQGVTDARLPDDDAMSSFWRSIWSVPVSHTEGDWTREVERACDPIPQMGAIDISPQDVARAVRPLPNWKSPGPDGLHNFWIKWFTRSHARLAYQFQSALESGSLPQFLTTGITHLLHKSGSTAEPKNYRPITCLPTVYKVLTSILRSKINSHIDENSIMSPSQNGCRNGSRGTKELLLIDMTISQQVRRSRKDLSTCWIDYRKAYDSVPHTWLMRVLELYKIDTTLRTFLMSCMRQWSTVLRYPGCRNIQRNSEPVRIERGIFQGDSLSPLWFCLALNPLSTLLENSGLGYRLKRGGQVISHLLYMDDLKLFAPNNLQLMELLKVTEIFSSAIRMEFGVDKCAVMHVKRGEVVESVSTQLTDSINLRSLSPTETYKYLGMSEALGISITGMKQSLRERFFGRLKKVFNSLLSGGNKVRAFNGWVMPVLMYSFGVLKWTQTELDALDRRVRTLLTAYRMHHPRSSVMRLYIPRKCGGRGFLNAKTLHNREVCSLREYFLAADVGMHRDVVAVDKGLTPLSLANENWRKPIVLDTNDRREVWQSKELHGRFFRALHGPDVDQLASVAWLRFGDLFGETEGFVCAIMDEVIMTNNYRRFIVKDGTVDICRACHRPGESIRHIISGCSRLANGEYLHRHNLVARIIHQQLALKYSLVESEVPYYRYEPDPVLDNGHITLYWDRPIITDRTIVANKPDIVVVDRSERRAMIVDISVPHDENLVKAEKDKQIKYIDLAREVVDMWEVDSAVIVPIVVSANGLIAKSLDQHLRRLSLGDWIKGLIQKAVLLDTARIVRRFLSLEP

SEQ ID NO: 11644 - protein, 1200 aa, Mythimna ferrago
MLTRSRARSQIAQPTSSGSSLSSASQPPGPAPAVSPEIPVAAVASSSSDEYFSPPTTPPPARRRGRGRPPACLGPRGPPASDRVLAAGGSVQRMRWTQSINENVMRSYFGATEGGTNLTAYRGRMLSLFQVLEPAVNVSAQRLSDQVWVIQRNRMLDDAVLDRLRLESRNGRVSPISPPAAVQRQPSVSPRPDHVGEDDDDEAISVSTQCNARLRSALEDAFREYRSIPPELRPRLPRLPMHRKNRALVCALDSQLSNCFDSSEDLSDTHSILYCAAAAACRVAHVKIPNNDRATRPAKPAWQCRIERRIGETRALIGKLICFREGNTRPRVMRFVRRAFSGTDISPRDYLPRITERIDFLKQKVYAWANRIRRYKRRVERYTQNHTFQSNERWVYRAWERPDQSVIDTRLPDDDAMYSFWRSIWSVPVNHTEGDWTREIERECELIPEMGAINISPQDVACAVRPLPNWKSPGPDGLHNFWLKWFQSSHARLASQFQSALESGSLPQFLTTGITHLLHKSGSTAEPKNYRPITCLPTVYKVLTSILRAKINNHIETNSIMSASQNGCRNGSRGTKELLLIDVAISQQVRRSRRDLSTCWIDYKKAYDSVPHTWLMRVLELYKVDATLRAFLMSCMGQWRTVLHYPGCRRVSENSEPLRIERGIFQGDSLSPLWFCLALNPLSTLLEGSGLGYRLRREGQVISHLLYMDDLKLFASNNLQLMELLKVTETFSSAIRMEFGLDKCAVMHVKRGEIMESVGTQLSDSIHLRSLCSTETYKYLGMSEALGINAADVKQSLRERFFGRLNKVLNSLLSGGNKVRAFNGWVMPVLMYSFGILKWTQTELDALDRRIRTLLTANRMHHPRSSVMRLYIPRKCGGRGFLNAKTLHNREVCSLREYFLETDVGMHRDVVAVDKGLTPLSLASENWRKPIVMDTNERKEVWKGKELHGRFYRALHGPDVDLLASVSWLRFGNLFGETEGFVFAIMDEVMMTNNYRKYIVKDGTVDICRACHRPGESIRHIISGCSHLANGDYLHRHNLVARIIHQQLALKYNLVESEVPYYKYVPDPVLENGSVTLYWDRSIITDRTIVANKPDIVVIDRLERRTMIVDIAVPHDENLVKAEKDKQTKYLDLAREVVDMWEVDRAIIVPIVVTANGLIAKSLDQHLRRLSLGSWIKGLIQKAVLLDTARIVRRFLSQEP

SEQ ID NO: 11645 - protein, 1200 aa, Mythimna ferrago
MLTRSRAQQLNTHLTTSGSSLSSASQPPGPAPAVSPEIPVAAVASSSSDEYFSPPTTPPPTRRRGRGRPPACLGPRGPPASDRVPAAGGSVQRMRWTQSINENVMRSYFGATEGGTNLTAYRGRMLSLFQVLEPAVNVSAQRLSDQVRVIQRNRMLDDAVLDRLRLESRNGRVSPVSPPAAVQRQLSVSPRPDHVGEDDDDGAISVSTQCNARLRSALEDAFREYRSIPPELRPRLPRLPMHRKNRALVCALDSQLSNCFDSSEDLTDTHSILYCAAAAACRVAHVKIPNSDRATRPAKPAWQCRIERRIGEARALIGKLICFREGNTRPRVMRFVRRAFSGTDISPRDYLPRITERIDFLRQKVYAWANRIRRYKRRVERYTQNRAFQSNERWVYRAWERPYQSVIDTHLPDDDAMYSFWRSIWSVPVNHTEGDWTREVERECELIPEMGAITISPQDVARAVRPLPNWKSPGPEGLHNFWLKWFKSSHARLASQFQSALESGSLPQFLTTGITHLLYKSGSTAEPKNYRPITCLPTVYKVLTSILRAKINSHIETNSIMSASQNGCRNGSRGTKELLLIDVAISQQVRRSRRDLSTCWIDYKKAYDSVPHTWLMRVLELYKIDVTLRTFLMSCMGQWRTVLHYPGCRRVSENSEPLRIERGIFQGDSLSPLWFCLALNPLSTLLEGSGLGYRLRREGQVISHLLYMDDLKLFASNNLQLMELLKVTETFSSAIRMEFGLDKCAVMHVKRGEIMESVGTQLSDSIHLRSLCSTETYKYLGMSEALGINAADVKQSLRERFFGRLNKVLKSLLSGGNKVRAFNGWVMPVLMYSFGILKWTQTELDALDRRVRTLLTANRMHHPRSSVMRLYIPRKCGGRGFLNAKTLHNREVCSLREYFLETDVGMHRDVVAVDKGLTPLSLANENWRKPIVMDTNERKEVWKGKELHGRFYRALHGPDVDLLASVSWLRFGDLFGETEGFVFAIMDEVMMTNNYRKYIVKDGTVDICRACHRPGESIRHIISGCSHLANGDYLHRHNLVARIIHQQLALKYNLVESEVPYYRYVPDPVLENGSVTLYWDRSIITDRTIVANKPDIVVIDRLERRTMIVDIAVPHDENLVKAEKDKQTKYLDLAREVVDMWEVDRAIIVPIVVTANGLIAKSLDQHLRRLSLGSWIKGLIQKAVLLDTARIVRRFLSQEP

SEQ ID NO: 11646 - protein, 1200 aa, Mythimna ferrago
MLTRAAARRARPPPPASSLSSASPPPDPSPTVSAVTPAVAAASSSSDEYYSPPTTPPPARRRGGRRPPACFGPQGPPASDRVPATGGSVPRMRWTQSTNENVMRAYYGATRGGNNLTAYRVRMLSLFQVLEPAVNVSAQRLSDQVRVIQRNHMLDDTVLDRLRTEMSNHVIAPSSQPVVPVMVPPSNHVANPADVESTDMVIQVSTQCTNELRSALECAIREYRNMPSVLRPRLPRLPMHNKNKALVAALDMQLSNYFDNCKDLTDAHSIMYCAAVAACRVAHVKFPNSDVATRPKPAVPAWQCRIERRIGGARALIGKLICFREGNTRPRVMRFVRRAFSGTDICPRDYMLRITERIDFLKQKVYAWANRIRRYKRRVERYTQNRAFQSNERWVYRAWERPDQGVTDTRLPDDDAMCSFWRNIWSVPVSHTEGGWTREVEQACEPITEMGAITISPQDVARAVRPLPNWKSPGPDGLHNFWIKWLQRSHACLASQYQAALESSSLPEFLTTGVTHLLHKSGSTAEPKNYRPITCLPTVYKVLTSILRDKINNHIDNNSIMSASQNGCRKGSRGTKELLLIDMAISQQVRRSRKDLSTCWIDYKKAYDSVPHTWLMRVLELYKIDATLRTFLMSCMRQWRTVLRYPGCRNIQRSSEPVRIERGIFQGDSLSPLWFCLALNPLSTLLENSGLGYQLRRGGQVTSHLLYMDDLKLFAPNKLQLMELLKVTETFSSAIRMEFGVDKCAVMHVKRGEIVESVSTQLSDSISLRSLSATETYKYLGMSEALGINATDMKQSLRERFFGRLKKVFNSLLSGGNKVRAFNGWVMPVLMYSFGVLKWTQTELDALDRRVRSLLTANRMHHPRSSVMRLYIPRKCGGRGFLNAKTLHNREVCSLREYFLAADVGMHRDVVAVDKGLTPLSFANENWRKPVMLDTNDRKEVWQSKELHGRFFRALHGPDVDQLASVAWLRVGDLFGETEGFVCAIMDEVIMTKNYRRFIVKDGTVDICRACHRPGESIRHIISGCSRLANGEYLHRHNLVARIIHQQLALKYSLVESEVPYYRYVPDPVLDNGDITMYWDRSIITDRTIVANKPDIVVVDRSERRAMIVDISVPHDENLVKAEKDKQIKYIDLAREVVDMWDVDSAIIVPIVVSGNGLIAKSLDQHLRRLALGSWIKGLIQKAVLLDTARIVRRFLSLEP

SEQ ID NO: 11647 - protein, 1200 aa, Mythimna ferrago
MLTRAAARRARPPPPASSLSSASPPSEPSLTESAVTPAVAAASSSSDEYYSPPTTPPPTRRRGGRRPPACLGPRGPPASDRVPAAGGSVPRMRWTQSTNENVMRAYYGATEGGNNLTAYRVRMLSLFQVLEPAVNVSAQRLSDQVRVIQRNHMLDDTVLDRLRTEMSDRVITAPSQPVVPVVAPPPSHISFHTDEVSTDTVTNVSTQCNNELRSALECAIREYRNMPLEFRPRLPRLPMRNKNKALVAALDSQLSNYFDDCEDLTDTHSIMYCAAVAACRVAHVKFPNSDVATRPKPAVPAWQCRIERRIGGARALIGKLICFREGNTRPRVMRFVRRAFSGTDINPRDYMSRVTERIDFLKQKVYAWANRIQRYKRRVERYTQNSTFRSNERWVYRAWERPDQGVTDTRLPDDDAMCLFWRNIWSVPVSHTEGGWTREVERACESITEMGAITISPQDVARAVRPLPNWKSPGPDGLHNFWIKWLQRSHARLASQYQAALESGSLPEFLTTGVTHLLHKSGSTAEPKNYRPITCLPTVYKVLTSILRAKINHHVDNNAIMSASQNGCRNGSRGTKELLLIDMAISQQVRRSRKDLSTCWIDYKKAYDSVPHTWLMRVLELYKVDATLRTFLMSCMRQWRTVLRYPGCRNIQRNSEPVRIERGIFQGDSLSPLWFCLALNLLSTLLENSGLGYRLKRGGQAISHLLYMDDLKLFAPNNLQLMELLKVTETFSSAIRMEFGVDKCAVMHIKRGEIVESVGIQLSDSIHLRSLSPTETYKYLGMSEALGINATDMKQSLKERFFGRLKKVLNSLLSGGNKVRAFNGWVMPVLMYAFGVLKWTQTELDALDRRVRTLLTAYRMHHPRSSVMRLYIPRKCGGRGFLNAKTLHNREVCSLREYFLAADGGMHRAVVAVDKGLTPLSLANENWRKPVVLDTNVRKEVWQSKELHGRFFRALHGPDVDQLASVAWLRVGDLFGETEGFVCAIMDEVIMTNNYRRFIVKDGTVDICRACHRPGESIRHIISGCSRLANGEYLHRHNLVARIIHQQLALKYSLVESEVPYYRYVPDPVLDSGDITLYWDRSIITDRTIVANKPDIVVVDRRERRAMIVDISVPHDENLVKAEKDKQIKYIDLAREVVDMWNVDSAIIVPIVVSANGLIAKSLDQHLRRLSLSGWIKGLIQKVVLLDTARIVRRFLSLEP

SEQ ID NO: 11648 - protein, 1200 aa, Mythimna ferrago
MLTRSRAQQLNTHLTTSGSSLSSASQPPGPAPAVSPEIPVAAVASSSSDEYFSPPTTPPPTRRRGRGRPPACLGPRGPPASDRVPAAGGSVQRMRWTQSINKNVMRSYFGATEGGTNLTAYRGRMLSLFQVLEPAVNVSAQRLSDQVRVIQRNRMLDDAVLDRLRLESRNGRVSPVSPPAAVQRQLSVSPRPDHVGEDDDDGAISVSTQCNARLRSALEDAFREYRSIPPELRPRLPRLPMHRKNRALVCALDSQLSNCFDSSEDLTDTHSILYCAAAAACRVAHVKIPNSDRATRPAKPAWQCRIERRIGEARALIGKLICFREGNTRPRVMRFVRRAFSGTDISPRDYLPRITERIDFLRQKVYAWANRIRRYKRRVERYTQNRAFQSNERWVYRAWERPDQSVIDTHLPDDDAMYSFWRSIWSVPVNHTEGDWTREVERECELIPEMGAITISPQDVARAVRPLPNWKSPGPEGLHNFWLKWFKSSHARLASQFQSALESGSLPQFLTTGITHLLYKSGNTAEPKNYRPITCLPTVYKVLTSILRAKINSHIETNSIMSASQNGCRNGSRGTKELLLIDVAISQQVRRSRRDLSTCWIDYKKAYDSVPHTWLMRVLELYKIDVTLRTFLMSCMGQWRTVLHYPGCRRVSENSEPLRIERGIFQGDSLSPLWFCLALNPLSTLLEGSGLGYRLRREGQVISHLLYMDDLKLFASNNLQLMELLKVTETFSSAIRMEFGLDKCAVMHVKRGEIMESVGTQLSDSIHLRSLCSTETYKYLGMSEALGINAADVKQSLRERFFGRLNKVLKSLLSGGNKVRAFNGWVMPVLMYSFGILKWTQTELDALDRRVRTLLTANRMHHPRSSVMRLYIPRKCGGRGFLNAKTLHNREVCSLREYFLETDVGMHRDVVAVDKGLTPLSLANENWRKPIVMDTNERKEVWKGKELHGRFYRALHGPDVDLLASVSWLRFGDLFGETEGFVFAIMDEVMMTNNYRKYIVKDGTVDICRACHRPGESIRHIISGCSHLANGDYLHRHNLVARIIHQQLALKYNLVESEVPYYRYVPDPVLENGSVTLYWDRSIITDRTIVANKPDIVVIDRLERRTMIVDIAVPHDENLVKAEKDKQTKYLDLAREVVDMWEVDRAIIVPIVVTANGLIAKSLDQHLRRLSLGSWIKGLIQKAVLLDTARIVRRFLSQEP

SEQ ID NO: 11649 - protein, 1200 aa, Mythimna ferrago
MLTRSRARSQIAQPTSSGSSLSSASQPPGPTPAVSPEIPAAAVASSSSDEYFSPPTTPPPARRRGRGRPPACLGLRGPPASDRVPAAGGSVQRMRWTESINENVMRSYFGATEGGTNLTAYRGRMLSLFQVLEPAVNVSAQRLSDQVRVIQRNRMLDDAVLDRLRLESRNGRVTPISPPAAVQRQPSVSPRPDHVGEDDDDGAISVSTQCNARLRSALEDAFREYRSIPPELRPRLPRLPMHRKNRALVCALDSQLSNCFDSSKDLTDTHSILYCAAAAACRVAHVKIPNSDRATRPAKPAWQCRIERRIGEARALIGKLICFREGNTRPRVMRFVRRAFSGTDISPRDYLPRITERIDFLRQKVYAWANRIRRYKRRVERYTQNRAFQSNERWVYRAWERPDQSVIDTRLPDDDAMYSFWRSIWSVPVSHTEGDWTREVERECELIPEMGAITISPQDVARAVRPLPNWKSPGPDGLHNFWLKWFKSSHARLASQFQSALESGSLPQFLTTGITHLLHKSGSTAEPKNYRPITCLPTVYKVLTSILRAKINSHIETNSIMSASQNGCRNGSRGTKELLLIDVAISQQVRRSRRDLSTCWIDYKKAYDSVPHTWLMRVLELYKIDVTLRAFLMSCMGQWRTVLHYPGCRRVSENSEPLRIERGIFQGDSLSPLWFCLALNPLSTLLEGSGLGYRLRREGQVISHLLYMDDLKLFASNNLQLMELLKVTETFSSAIRMEFGLDKCAVMHVKRGEIMESVGTQLSDSIHLRSLSSTETYKYLGMSEALGINAADVKQSLRERFFGRLNKVLKSLLSGGNKVRAFNGWVMPVLMYSFGILKWTQTELDALDRRVRTLLTANRMHHPRSSVMRLYIPRKCGGRGFLNAKTLHNREVCSLREYFLETDVGMHRDVVAVDKGLTPLSLANENWRKPIVMDTNERKEVWKGKELHGRFYRALHGPDVDLLASVSWLRFGDLFGETEGFVFAIMDEVMMTNNYRKYIVKDGTVDICRACHRPGESIRHIISGCSHLANGDYLHRHNLVARIIHQQLALKYNLVESEVPYYRYVPDPVLENGSVTLYWDRSIITDRTIVANKPDIVVIDRLERRTMIVDIAVPHDENLVKAEKDKQAKYLDLAREVVDMWEVDRAIIVPIVVTANGLIAKSLDQHLRRLSLGSWIKGLIQKAVLLDTARIVRRFLSQEP

SEQ ID NO: 11650 - protein, 1103 aa, Mythimna ferrago
MRWTQSINENVMRSYYGATEGGNNLTAYRVRMLSLFQVLEPAVNVSAQRLSDQVRVILRNHMLDDSVLDRLRTEMSDRVITPPSQPVVPVVVPPSSHISFHTDEVSTDMVTNVSTQCNNELRSALECAIREYLNIPPELRPRIPRLPMCNKNRALVAALDSQLSNYFDDCEDLTETHSIMYCAAVAACRVAHVKFPDSDEATRPKSAVPAWQCRIERRIGGARALIGKLICFREGNTRPRVMRFVRRAFSGTNISPRDYMSRVTERIDFLKQKVYAWANRIRRYKRRVERYTQNRTFRSNERWVYRAWERPDQGVTGARLPEDDAMCSFWRSIWSVPVSHTEGDWTREVERACDPIPQMGAIDISPQDVARAVRPLPNWKSPGLWIKWFTRSHARLAYQFQSALESGSLPQFLTTGITHLLHKSGSTAEPKNYRPITCLPTVYKVLTSILRSKINSHIDENSIMSPSQNGCRNGSRGTKELLLIDMTISQQVRRSRKDLSTCWIDYKKAYDSVPHTWLMRVLELYKVDATLCTFLMSCMRQWRTVLRYPGCRNIQRNSEPVRIERGIFQGDSLSPLWFCLALNPLSTLLENSGLGYRLKRGGQVISHLLYMDDLKLFAPNNLQLMELLKVTETFSSAIRMEFGVDKCAVMHIKRGEIVESVGTQLSDSIHLRSLSPTETYKYLGMSEALGINATDMKQSLRERFFGRLKKVLNSLLSGGNKVRAFNGWVMPVLMYAFGVLKWTQTELDALDRKVRTLLTAYRMHHPRSSVMRLYIPRKCGGRGFLNAKTLHNREVCSLREYFLAADVGMHRDVVAVDKGLTPLSLANENWRKPVVLDTNVRKEVWQSKELHGRFFRALHGPDVDQLASVAWLRVGDLFGETEGFVCAIMDEVIMTNNYRRFIVKDGTVDICRACHRPGESIRHIISGCSRLANGEYLHRHNLVARIIHQQLALKYSLVESEVPYYRYVPDPVLDSGDITLYWDRSIITDRTIVANKPDIVVVDRSERRAMIVDISVPHDENLVKAEKDKQIKYIDLAREVVDMWEVDSAIIVPIVVSANGLIAKSLDQHLRRLSLGDWIKGLIQKAVLLDTARIVRRFLSLEP

SEQ ID NO: 11651 - protein, 1193 aa, Eilema sororculum
MLTRAQANRNKSAPITSPDSSLSSAAQPPAVEPAASSSSSSDEFFSPPTSPTPVRRPGRGRPPTCLGPRGPPASNRAPATGGNVRRMRWTSSMNENVMRAYFAATEGGTNLTAYRVRMLPLFQVLEPGVNVSAQRLSDQVRVIQRNQLLDGDALERLRLECLRSNPVISPTPALLQSESTQVLNSVNVVGDDRVITVVTECNEEVKVALECAIREYRSMPINIRPRLPRLPMHKKNLMLMSALDSLLPVYFDSSESLSDTHSILYCAAVAACRLARVKFSAHAPAPRQKPAVPAWQRRIEERIAEARVLIGKLTCFRSGNARPRVMRFVNRAFSGTGISPPEYIARVTERIDLLKQKIYAWANRVRRYKKRVDRFSVNRTFQRDQRWVYRSWDRPNKDVSSGCLPSADETNMFWRSIWSAPVAHVEGDWTRDVERACAGIPGMEFVNIDDSDVASAVRPLSNWKSPGPDGLHNFWIKWLRSSHARLASQFQAAIESGSLPIFMTTGVTHLLHKTGSTSNPSNYRPITCLPSVYKLLTSILRDKITKHISTNTVMSASQNGCRSGARGTKELLLIDMAISQQVRRSRKNLSICWIDYKKAFDSVPHTWLLRVLELYKVDTTLCIFLASCMRQWRTVLSYPGCREVCSNGEPINIERGIFQGDSLSPLWFCLALNPLSTLLGNSGLGYRLRGGGQIISHLLYMDDLKLFATSSSQLVDLLKITKSFSDSIKMEFGVDKCAVMHVKRGRTVESEGIQLSDAIHLKSLLVTDTYKYLGMSQALGINEADMKQSLRERFFGRLKKVLNSLLSGGNKVRAYNGWVLPLLIYSFGILKWTQTELDAIDRRVRTLLTTYRMHHPRSSVMRLYIPRKCGGRGFLNAKNLHNREVYNLREYFLRVNEDMHRDVVAVDVSLTPLKLAKENWCKPVVLSISDRQEVWQSKELHGRFYRALHGPDVDLLASVAWLRFGDLFGETEGFACAIADEVIMTKNYRKYILRDGTVDICRACHQPGESLRHIVSGCSRLANSEYLHRHNQVARIIHQQLALLYQLVDAEVPYYRYVAEPVLENGHITLYWDRSIITDRTVVANKPDIVVIDRSERRAMIVDVTIPHDENLVKAEKDKQIKYLDLAREIVDMWEVDSAIIVPIVITVNGLVAKSLDQHLKRLALGSWIKGLIQKAVLLDTARIVRKFLSLEP

SEQ ID NO: 11652 - protein, 1068 aa, Eilema sororculum
MRWTNSINENVMRAYFAATEGGTNLSAYRTRMLPLFQALEPSINVSAQRLSDQVRVIQRNRLLNETVLETLRLECLRNICVTPAPAPAPASTVEINDDTCVAPDDTPIPVSIQYNEEIKEALECALREYRSMPVHVRPRLPRLPIHRRNIALVSALDSLLPRYLENSENLGDTHSILYCTAVAACRMAGANFPKKDPAIRLKSAIPAWQCRIERRVDYTSRVTERIDFLKQKVYAWANRIRRYKKRVDRYTVNRMFQRDQRWVYRSWERTEESVDDVRRPDAETTNAFWRSIWSVPVNHTEGDWMREVERACETIPEMEKINIDAIDVDCAVRSLSNWKSPGPDGLHNFWLKWLRSSHVVLASQFQSAVESGTLPAFMTTGVTHLLHKTGSTLEPNNYRPITCLPTVYKLLTSILRAKINNHINNNSIMCASQNGCRNGARGTKELLLIDMAISQQARRNRKDLTACWIDYKKAFDSVPHTWLLRVLELYKVNTTLCTFLRSCMGQWRTVLFYPGCRQALGSGEPITIERGIFQGDSLSPLWFCLALNPLSTLLVNSGLGYRLRREGQMVSHLFYMDDLKLFAHTNPQLIALLKVTETFSNSIKMAFGVDKCAVIHVKRGRVVESEGIQLSDSTNLRSLLVTETYKYLGMSQALCINEVDMKQMLQERFFGRLKKVLNSLLSGGNKVRACNSWVMPLLMYSFGILKWTQTELDTIDRKVRTQLTAFRMHHPRSSVMRLYIPRKCGGRGFLNAKTLHNREVCNLRDYFLKSNVDMHRDVVNVDTGLTPLGLAKENWRRPTIVGTDSRREVWQSKELHGRFYRALHRPEVDLLASVSWLRFSDLFGETEGFVCAIADEVIKTNNYRKYIMRDGTIDICRACHQPGESLRHITSGCSRLANGEYLHRHNQVARIIHQRLALKYNLVEVEVPYYRYFPEPVLENSHITLYWDRSIITDRTVVANKPDIVVIDRSERRALIVDVTIPHDENLVKAEKDKQVKYLDLAHEVVDMWNVDSAIIVPIVVSVNGLIAKSLDQHLKRLGLDGWVKGQMQKAVLLDTARIVRKFLSLEP

SEQ ID NO: 11653 - protein, 1057 aa, Eilema sororculum
MLTRAQAKRNRSAPITSPDSSLSSAAQPPAVEPAASSSSSSDEFFSPPTSPTPVRRPGRGRPPTCLGPRRPPASNGAPATGGYVHRMRWTNSINENVMRAYFAATEGGTNLSAYLENSENLGDTHSILYCTAVAACRMAGAKFPIKDPAIRPKSAIPAWQCRIERRVTEARVLIGKLICFRSGNTRPRVMRYVTRAFAGTDISPQDYTSRVTERIDFLKQKVYAWANRIRRYKKRVDRYTVNRMFQRDQRWVYRSWERTEESMDDVRRPDAEVTNAFWRSIWSVPVSHTEGDWMHEVERACETIPEMEEINIDAIDVDCAVRSLSNWKSPGPDGLHNFWLKWLRSSHVVLASQFQSAVESGTLPAFMTTGVTHLLHKTGSTLEPNNYRPITCLPTVYKLLTSILRAKINNHINNNSIMCASQNGCRNGARGTKELLLIDMAISQQARRNRKDLTACWIDYKKAFDSVPHTWLLRVLELYKVNTTLCTFLRSCMGQWRTVLFYPGCRQALDGGVPITIERGIFQGDSLSPLWFCLALNPLSTLLVNSGLGYRLRREGQMVSHLFYMDDLKLFAHTNPQLIALLKITETFSNSIKMAFGVDKCAVIHVKRGRVVESEGIQLSDSTNLRSLLVTETYKYLGMSQALCINEVDMKQMLQERFFGRLKKVLNSLLSGGNKVRACNSWVIPLLMYSFGILKWTQTELDTIDRKVRTQLTAFRMHHPRSSVMRLYIPRKCGGRGFLNAKTLHNREVCNLRDYFLKSNVDMHRDVVNVDTGLTPLGLAKENWRRPTIVSTDSRREVWQSKELHGRFYRALHRPEVDLLASVSWIRFSDLFGETEGFVCAIADEVIKTNNYRKYIMRDGTIDICRACHQPGESLRHITSGCSRLANGEYLHRHNQVARIIHQRLALKYNLVEFEVPYYRYVPEPVLENTHITLYWDRSIITDRTVVANKPDIVVIDRSERRALIVDVTIPHDENLVKAEKDKQVKYLDLAHEVVDMWNVDSAIIVPIVVSVNGLIAKSLDQHLKRLGLDGWVKGQMQKAVLLDTARIVRKFLSLEP

SEQ ID NO: 11654 - protein, 868 aa, Eilema sororculum
MRYVTRAFAGTDISPLDYTSRVTERIDFLKQKVYAWANRIRRYKKRVDRYTLNCMFQRDQRWVYRSWERTEESVDDVRRPDAEATNAFWRSIWSLPVSHTEGDWMREVERACETIPEMEEINIDAIDVDCAVRPLSNWKSPGPDGLHNFWLKWLRSSHVVLASQFQSAVESGTLPAFMTTGVTHLLHKTGSTLEPNNYRPITCLPTVYKLLTSILRAKINNHINNNSIMCASQNGCRNGARGTKELLLIDMTISQQARRNRKDLAACWIDYKKAFDSVPHTWLLRVLELYKVNTTLCTFLRSCMGQWRTVLFYPGCRQALGSGEPITIERGIFQGDSLSPLWFCLALNPLSTLLVNSGLGYRLRREGQMVSHLFYMDDLKLFAHTNPQLIALLKVTETFSHSIKMAFAVDKCAVIHVKRGRVVESEGIQLSDSTNLRSLLVTETYKYLGMSQTLCINEADMKQMLQDRFFGRLKKVLNSLLSGGNKVRACNSWVMPLLMYSFGILKWTQTELDTIDRKVRAQLTAFRMHHPRSSVMRLYIPRKCGGRGFLNAKTLHNREVCNLRDYFLKSNVDMHRDVVNVDTGLTPLGLAKENWRRPTIVSTDSRREVWQSKELHGRFYRALHRPEVDLLASVSWLRFSDLFGETEGFVCTIADEVIKTNNYRKYIMRDGTIDICRACHQPGESLRHITSGCSRLANGEYLHRHNQVARIIHQRLALKYNLVEVEVPYYRYVPEPVLENSHITLYWDRSIITDRTVVANKPDIVVIDRSERRALIVDVTIPHDENLVKAEKDKQVKYLDLAHEVVDMWNVDSAIIVPIVVSVNGLIAKSLDQHLKRLGFDGWVKGQMQKAVLLDTARIVRKFLSLEP

SEQ ID NO: 11655 - protein, 1192 aa, Eilema sororculum
MLTRAQAKRNRSAPITSPDSSLSSAAQPPAVEPAASSSSSSDEFFSPPTSPTPVRRPGRGRPPTCLGPRRPPASNGAPATGGDVHRMRWTNSINENVMRAYFAATEGGTNLSAYRTRMLPLFQALEPSINVSAQRLSDQVRVIQRNRMLNETVLETLRLECLRNICVTPAPVPVPASTVELNDDTCVAPDDTPIPVSIQYNEEIKEALECALREYRSMPVHVRPRLPRLPIHRRNIALVSALDSLLPRYLENSENLGDTHSILYCTAVAACRMAGAKFPIKDPAIRPKSAIPAWQCRIERRVTEARVLIGKLICFRSGNTRRRVMRYVTRAFAGTDISPQDYTSRVTERIDFLKQKVYAWANRIRRYKKRVDRYTVNRMFQRDQRWVYRSWERTEESVDDVRRPDAEVTNAFWRSIWSVPVSHTEGDWMHEVERACETIPEMEEINIDAIDVDCAVRSLSNWKSPGPDGLHNFWLKWLRSSHVVLASQFQSAVESGTLPAFMTTGVTHLLHKTGSTLEPNNYRPITCLPTVYKLLTSILRAKINNHINTNSIMCASQNGCRNGARGTKELLLIDMAISQQARRNRKDLTACWIDYKKAFDSVPHTWLLRVLELYKVNTTLCTFLRSCMGQWRTVLFYPGCRQALGGGVPITIERGIFQGDSLSPLWFCLALNPLSTLLVNSGLGYRLRREGQMVSHLFYMDDLKLFAHTNPQLITLLKITETFSNSIKMAFGVDKCAVIHVKRGRVVESEGIQLSDSTNLRSLLVTETYKYLGMSQALCINEVDMKQMLQERFFGRLKKVLNSLLSGGNKVRACNSWVMPLLMYSFGILKWTQTELDTIDRKVRTQLTAFRMHHPRSSVMRLYIPRKCGGRGFLNAKTLHNREVCNLRDYFLKSNVDMHRDVVNVDTGLTPLGLAKENWRRPTIVSTDSRKEVWQSKELHGRFYRALHRPEVDLLASVSWLRFSDLFGETEGFVCAIADEVIKTNNYRKYIMRDGTIDICRACHQPGESLRHITSGCSRLANGEYLHRHNQVARIIHQRLALKYNLVEFEVPYYRYVPEPVLENTHITLYWDRSIITDRTVVANKPDIVVIDRSERRALIVDVTIPHDENLVKAEKDKQVKYLDLAHEVVDMWNVDSAIIVPIVVSVNGLIAKSLDQHLKRLGLDGWVKGQMQKAVLLDTARIVRKFLSLEP

SEQ ID NO: 11656 - protein, 1193 aa, Eilema depressum
MLTRAQARRNASAPATPPDSSLSSAAQPPPTEPAASSSSSSDEFFSPPTSPTPVRRPGRGRPPICLGPRRPPASNRAPTAGGDVHRMRWTPSINENVMRAYFAATEGGTNLSAYRTRMLPLFQALEPSVNTSSQRLSDQVRVIQRNRMLNETVLETLRQECLRNICVTPAPAPASTPAPVPVSHMNEETGDDTLIPVSIQYNEQIKEALECALREYRSMPLNDRPRLPRLPIHRRNMALVGALDSLLPGYLDNSENLGDTHSILYCTAVAACRMAGVKFPNKDPAIRPKSTIPAWQCRIERRVAEARVLISKLICFRSGNTRPRVMRYVTRAFAGTGISPQEYTSRITERIDFLKQKVCAWANRIRRYRKRVDRFTVNRMFRRDQRWVYRSWEQPDESVDDVRRPEAAATNTFWRSIWSVPVSHIEGDWMCEVERACESIPEMEDIYIDAIDVDCAVRPLSNWKSPGPDGLHNFWLKWLRSSHALLASQFQSAVESGTLPAFMTTGVTHLLHKTGSTLEPNNYRPITCLPTVYKLLTSILRVKINNHINNNSIMCASQNGCRNGARGTKELLLIDMAISQQARRRTKDLAACWIDYKKAFDSVPHTWLLRVLELYKVNATLCTFLRSCMRQWRTVLFYPGCCQALGDGEPITIERGIFQGDSLSPLWFCLALNPLSTLLVNSGLGYRLRREGQMVSHLLYMDDLKLFAHTNPQLIALLKITENFSNSIKMGFGVEKCAVIHVKRGRVVESQGIQLSDSTSLRSLLVTETYKYLGMSQALCINEAGMKQMLQERFFGRLKKVLNSLLSGGNKVRACNSWVMPLLMYSFGILKWTQTELDTIDRRVRTQLTAFRMHHPRSSVMRLYIPRKCGGRGFLNAKTLHNREVCNLRDYFLKSNVDMHRDVVSVDTGLTPLGLAKENWRRPIVVGTDSRREVWQSKELHGRFYRALHRPEVDLLASVSWLRFGDLFGETEGFVCAIADEVVKTNNYRKYIMRDGTIDICRACHQPGESLRHITSGCSRLANGEYLHRHNQVARIIHQRLALKYNLVELEVPYYRYVPEPVLENSHITLYWDRSIITDRTVVANKPDIVVIDRSERRALIVDVTIPHDENLVKAEKDKQVKYLDLAHEIVDMWNVDSAIIVPIVVTVNGLIAKSLDQHLKRLGLDGWVKGQMQKAVLLDTARIVRKFLSLEP

SEQ ID NO: 11657 - protein, 1113 aa, Ptilodon capucinus
MRWTSSINENVMRAYYEATEGGTNLTAYRNRMLPLFQSLEPAVNVSAQRLSDQVRVIQRGNMLADTVLDRLRSEMQSRRVVPVASSQPAAQPVAIATVTSRLAADSDVDRDNAPIDVSNQYNDLLRSTLEDVVRVYRSMPNHLRPRIPRLPMHKGNRAIVGALDSLLSIYFDSSDNLADTHSILYCAAITVCRVARVKVFNTDTATRPKPAVPAWQCRIERRISEARALIGKLSCFREGNTRPRVMRFVRRAFAGTDVSPREYISRVTERIDFLKQKIYAWANRIRRYKVRVDRYSQNSMFQRDQRWVYRSWERPNEPVSELQRPDDNAMTTFWRDIWSVPVTHYEGDWIGDVERMCEPIKEMEAISIGPLDVANAVRSLPNWKAPGPDGLHNFWLKWLRSSHVRLASQFQSALQSGSLPEFITTGVTHLLHKSGSTTDPKNYRPITCLPTIYKTLTSILRAKIARHVEDNSIMSASQNGCRSGSRGTKELLLIDMTICQQARRNRKDLSTCWIDYKKAYDSVPHTWLVRVLELYKIDTTLRTFLESCMRQWKTVLLCPGSRQILGNGEPIRIERGIFQGDSLSPLWFCLALNPLSTLLEESGFGFRLRRGGQVISHLLYMDDLKLFAPTALQLTGLLKVTETFSNSIRMEFGVDKCAVMHAKQGRLVESEGIQLSDSIQVRSLAATETYKYLGMSQGLGISETDMKQLLRDRFLGRLKKVLKSLLSGGNKVRAYNGWVMPVLMYSFGILKWTQTELDTLDRTVRTTLTAYRMHHPRSSVMRLYIPRKCGGRGFLNVKTLHNREICSLREYFLRADGEMHADVVAVDNGLTPLSLAKENWRKPVVLTTDDRRLVWQGKELHGRYYRALHGPDVDLAASVAWLRFGDLFGETEGFVCAIMDEVVTTNNYRKYILRDGTIDICRACHRPGESLRHIISGCSRLANGQYLHRHNQVARIIHQQLALKYRLVTSEVPYYRYEPQPVLEEGHISLYWDRSIITDRTIVANKPDIVLIDRQERRAMIVDITVPHDENLVKAEKDKESKYLDLAHEVVDMWDIDAAIIVPIVVSAHGLLAKSLDKHLKRLALGGWIKGQIQKAVLLETARIVRKFLSLEP

SEQ ID NO: 11658 - protein, 974 aa, Ptilodon capucinus
MDEYIFLKLRLRYSVFILIIIIITHSLLSIYFDSSDDLVDTHSILYCAAITVCRVARVKVFNTDTTTRPKPAVPAWQCRIERRISEARALIGKLSCFREGNTRPRVMRFVKRAFAGTDVSPREYISRVTERIDFLKQKIYAWANRIRRYKVRVDRYSQNSMFQRDQRWVYRSWERSNEPVSELQRPDDNAMTTFWRDIWSVPVTHYEGDWIGDVERMCEPIKEMEAISIGPLDVANAVRSLPNWKAPGPDGLHNFWLKWLRSSHVRLASQFQSALQSGSLPEFITTGVTHLLHKSGSTTDPKNYRPITCLPTIYKTLTSILRAKIARHVEDNSIMSASQNGCRSGSRGTKELLLIDMTICQQARRNRKDLSTCWIDYKKAYDSVPHTWLVRVLELYKIDTTLRTFLESCMRQWKTVLLCPGSRQILGNGEPIRIERGIFQGDSLSPLWFCLALNPLSTLLEESGFGFRLRRGGQVISHLLYMDDLKLFAPTALQLTGLLKVTETFSNSIRMEFGVDKCAVMHAKQGRLVESEGIQLSDSIQLRSLAATETYKYLGMSQGLGISETDMKQLLRDRFLGRLKKVLKSLLSGGNKVRAYNGWVMPVLIYSFGILKWTQTELDALDRTVRTTLTAYRMHHPRSSVMRLYIPRKCGGRGFLNVKTLHNREICSLREYFLRADGEMHVDVVAVDNGLTPLSLAKENWRKPVVLTTDDRRVVWQGKELHGRYYRALHGPDVDLAASVAWLRFGDLFGETEGFVCAIMDEVVMTNNYRRYILRDGTIDICRACHRPGESLRHIISGCSRLANGQYLHRHNQVARIVHQQLALKYRLVTSEVPYYRYEPQPVLEEGHITLYWDRSIITDRTIVANKPDIVLIDRQERRAMIIDITVPHDENLVKAEKDKESKYLDLAHEVVDMWDIDAAIIVPIVVSAHGLLAKSLDKHLKRLALGSWIKGQIQKAVLLETARIVRKFLSLEP

SEQ ID NO: 11659 - protein, 1198 aa, Agrochola circellaris
MLTRSATRRARLLPPDSSLSSASPPPVPSPTVSAGTTPAAAVASSSSDEYFSPPTTPPPARRRGGHRPPVGLGPRGPPASDRVPAPGGSVQRMRWTQSINENVMRSYYGATEGGNNLTAYRVRMLSLFQVLEPAVNVSAQRLSDQVRVILRNHMLDDTVLDRLRSEMRNSHATAPPSQTVMVAPQFTINQVDEGIDDMATNVSTQYNEELRSALERAIREYRSMSPELRPRLPRLPMHNKNRALVAALDSQLSNYFDDCEDLTDTHSILYCAAVAACRVAHVKFANDSRATRPKPAVPAWQCRIERRIGGARALIGKLICFREGNTRPRVMRFVRRAFSGTDISPEDYVSRATERIDFLKQKVYAWANRIRRYKRRVERYTQNRTFQSDERRVYRAWEQPDQGVADARLPDDDAMCSFWRSIWSAPVSHTEGDWTREVERACDPIPEMGAITICPQDVARAVRPLPNWKSPGPDGLHNFWIKWFKRSHARLAAQYQTALESGSLPQFLTTGVTHLLHKSGSTADPKNYRPITCLPTVYKVLTSILRAKINKHIDTNSIMSASQNGCRNGSRGTKELLLIDMTISQQVRRSRKDLSTCWIDYKKAYDSVPHTWLMRVLELYKVDATLRTFLLSCMGQWRTVLRYPGCRNIQRNSEPIRIERGIFQGDSLSPLWFCLALNPLSTLLEGSDLGYRLRRGGQVISHLLYMDDLKLFAPNNFQLMELLKVTETFSRAIRMEFGVDKCAVMHVKRGEIVESVGTQLTDSINFRALSASETYKYLGMSETLGINVTDMKQSLKERFFGRLKKVFNSFLSGGNKLRAFNGWVMPVLMYSFGILKWTQTELDALDRRVRTLLTGYRMHHPRSSVMRLYIPRKCGGRGFLNAKTLHNREICSLREYFLEADVGMHRDVVAVDKGLTPLSLAKENWRKPAVLDTNDRKEVWQNKELHGRYFRALHGPDVDLLASVAWLRFGDLFGETEGFVCAIMDEVMMTNNYRRFIVKDGTVDICRACHRPGESIRHIISGCSRLANEEYLHRHNLVARIIHQQLALKYSLVESEVPYYRYVPDPVLESGHITLYWDRSIITDRSIVANKPDIVVVDRAERRTMIIDITVPHDGNLVKAEKDKQIKYLDLAREVVDMWDVDSAIIVPIVVSANGLIAKSLDQHLRRLSLGGWIKGLIQKAVLLDTARIVRRFLSLEP

SEQ ID NO: 11660 - protein, 868 aa, Hydraecia micacea
MRFVRRAFLGTDISPQDYTSCVTERIDFLKQKVYAWANRIRRYKRRVERYTQNRTFQSDERWVYRDWERPDQSVADTCLPDDDAMCSFWRSIWSVPVSHTEGDWARDVERACDPIPEMEAITICPQDVARAVRPLPNWKSPGPDGLHNFWIKWFSRSHARLASQFQTALESGSLPQFLTTGITHLLHKSGSTAEPKNYRPITCLPTVYKVLTSILRAKINKHIDTNFIMSASQNGCRNGSRGTKELLLIDMTISQQVRRFRKDLSTCWIDYKKAYDSVPHTWLMRVLELYKVDTTLRTFLMSCMGQWRTVLRYPGCRNIQRNSEPIRIERGIFQGDSLSPLWFCLALNPLSTLLEDSGLGYRLRRGGQVISHLLYMDDLKLFAPNNLQLMELLKVTQTFSNAIRMEFGVDKCAVMHVKRGEIVESVGNQLSDSTNLRALSASETYKYLGMSEALGINVTDMKQSLKERFFGRLKKVLNSLLSGGNKVRAFNGWVMPVLMYSFGILKWTQTELDALDRRVRTLLTANRMHHPRSSVMRLYIPRKCGGRGFLNSKTLHNREICSLREYFLETDVGMHRDVVMVDKGLTPLSLAKENWRKPVVLDTNDRMEVWQSKELHGRFFRALHGPDVDLLASVAWLRFGDLFGETEGFVCAIMDEVMMTNNYRRFIVKDGTVDICRACHRPGESIRHIISGCSRLANGEYLHRHNLVARIIHQQLALKYSLVESEVPYYRYVPDPVLENGNITLYWDRSIITDRTIVANKPDIVVVDRSERRAMIVDITVPHDENLVKAEKDKQIKYLDLAREVVDMWDVDSAIIVPIVVTANGLIAKSLDQHLRRLSLASWIKGLIQKAVLLDTARIVRRFLSLEP

SEQ ID NO: 11661 - protein, 1109 aa, Hydraecia micacea
MRWTQTVNENVMRAYFGATEGGSNLTAYRGRMLSLFQVLEPAVNVSAQRLSDQVRVIQRNHMLDNVVLDRLRLESRNSHVTPASSLVAVQLQPSVPLRPDCVDIEDDDEAISVSSQCNARLRSALEDAFREYRSIPPGLRPRLPRLPMHKKNKALVCALDSQLSNCFNDSKDLADTHSILYCAAVAACRVAHVKFPNSDRAPRPKPAVPAWQCRIECRIGEARALIGKLICFREGNTRPRVMRFVRRAFSGTDISSRDYLSRVTERIDFLKQKICAWANRIRRYRRRVERYTQNRRFQSDERWVYRAWERPDQGVTDTRLPDDDAMCSFWRNIWSVPVSHTEGDWTGKIERACDLIPEMEALIISPQDVARAVRPLPNWKSPGPDGLHNFWIKWFKRSHDRLASQFQSALESGSLPQFLTTGITHLLYKSGSTADPKNYRPITCLPTVYKVLTSILRTKINKHIDTNSIMSVSQNGCKNGSRGTKELLLIDMTINQQVRRSRKDLSTCWIDYKKAYDSVPHTWLMRVLELYKVDTTLCTFLMSCMGQWRTVLRYPGCRNIQRNSEPIRIERGIFQGDSLSPLWFCLTLNPLSTLLEDSGLGYRLRRGGQVISHLLYMDDLKLFAPNNLQLMELLKITETFSSAIRMEFGVDKCAVMHVKRGEIVESVGNQLSDSTNLRALSASDTYKYLGMSEALGINVTDMKQSLKERFFGRLKKVFNSLLSGGNKVRAFNDWVMPVLMYSFGILKWTQTELDALDRKVRTLLTANRMHHPRSSVMRLYIPRKCGGRGFLNAKTLHNREICSLREYFLETDVGMHRDVVVVDNGLTPLSLGKENWRKPVVLDTNDRMEVWQSKELHGRFFRALHGPDVDLLASVAWLRFGDLFGETEGFVCAIMDEVMMTNNYRRFIVKDGTVDICRACHRPGESIRHIISGCSRLANGEYLHRHNLVARIIHQQLALKYSLVESEVPYYRYVPDPVLENGNITLYWDRSIITDRTIVANKPDIVVMDRLERRAMIVDITIPHDENLVKAEKDKQIKYLDLAREVVDMWDVDSAIIVPIVVTANGLIAKSLDQHLRRLSLASWIKGLIQKAVLLDTARIVRRFLSLEP

SEQ ID NO: 11662 - protein, 1201 aa, Hydraecia micacea
MLTRSAAARRARLPPPDSSLSSASPPAPLVSSPTVSAVMTPAAAVASSSSDEYFSPPTTPPPARRRGGRRPPDSLGPRGPPASDRVPAPGGSVQRMRWTRSINENVMRSYYGATEGGSNLTAYRVRMLSLFQVLEPAVNVSAQRLSDQVRVIQRNHMLDDTVLDRLRNEIQSSHAIAPQSQTAVILPQSNTSHADEGSNDRATNVSTQCNEELRSALEDAIQEYRFMSPELRPRLPRLPMHNKNRALVAVLNSQLSKYFDDCEDLTDTHSILYCAAVAACRVAHVKFTNDSRATRPKPAVPAWQCRIERRIGGARALIGKLICFREGNTRPRVMRFVRRAFLGTDISPQDYTSCVTERIDFLKQKVYAWANRIRRYKRRVERYTQNRTFQSDERWVYRDWERPDQSVADTCLPDDDAMCSFWRSIWSVPVSHTEGDWARDVERACDPIPEMEAITICPQDVARAVRPLPNWKSPGPDGLHNFWIKWFSRSHARLASQFQTALESGSLPQFLTTGITHLLHKSGSTAEPKNYRPITCLPTVYKVLTSILRAKINKHIDTNFIMSASQNGCRNGSRGTKELLLIDMTISQQVRRFRKDLSTCWIDYKKAYDSVPHTWLMRVLELYKVDTTLRTFLMSCMGQWRTVLRYPGCRNIQRNSEPIRIERGIFQGDSLSPLWFCLALNPLSTLLEDSGLGYRLRRGGQVISHLLYMDDLKLFAPNNLQLMELLKVTQTFSNAIRMEFGVDKCAVMHVKRGEIVESVGNQLSDSTNLRALSASETYKYLGMSEALGINVTDMKQSLKERFFGRLKKVLNSLLSGGNKVRAFNGWVMPVLMYSFGILKWTQTELDALDRRVRTLLTANRMHHPRSSVMRLYIPRKCGGRGFLNSKTLHNREICSLREYFLETDVGMHRDVVMVDKGLTPLSLAKENWRKPVVLDTNDRMEVWQSKELHGRFFRALHGPDVDLLASVAWLRFGDLFGETEGFVCAIMDEVMMTNNYRRFIVKDGTVDICRACHRPGESIRHIISGCSRLANGEYLHRHNLVARIIHQQLALKYSLVESEVPYYRYVPDPVLENGNITLYWDRSIITDRTIVANKPDIVVVDRSERRAMIVDITVPHDENLVKAEKDKQIKYLDLAREVVDMWDVDSAIIVPIVVTANGLIAKSLDQHLRRLSLASWIKGLIQKAVLLDTARIVRRFLSLEP

SEQ ID NO: 11663 - protein, 868 aa, Eupsilia transversa
MRCVRRAFSGTDISPQDYMARVTERIDFLKQKVYAWANRIRRYKRRVDRYTQNRTFQSDERWVYRAWEQPDQGVTDTHLPDDNAMCSFWRSIWSVPVSHTEGDWTREVERACDPIPEMGAITICPQDVARAVRPLPNWKSPGPDGLHNFWIKWFQRSHARLAAQYQAALESGSLPQFLTTGVTHLLHKSGSTAEPKNYRPITCLPTVYKVLTSILRAKINKHIDTNSIMSVAQNGCKNGSRGTKELLLIDMAISQQVRRSRKDLSICWIDYKKAYDSVPHTWLMRVLELYKVDATLRTFLMACMGQWRTVLRYPGCRNIQRNSEPIRIERGIFQGDSLSPLWFCLALNPLSTLLEDSGLGYRLRRGGQVISHLLYMDDLKLFAPNNLQLMELLKVTETFSSAIRMEFGVDKCAVMHVKRGKIVESVGAQLSDSINLRALSATETYKYLGMSEALGINVTDMKQSLKERFFGRLKKVFNSLLSGGNKVRAFNGWVMPVLMYSFGILKWTQTELDALDRRVRTLLTAYRMHHPRSSVMRLYIPRRCGGRGFLNAKTLHNREICSLREYFLETDVGMHRDVVAVDKGLTPLSLAKENWRKPVVLDINDRSEVWQSKELHGRFFRALHGPDVDLLASVAWLRFGDLFGETEGFVCAIMDEVIMTNNYRRFIVKDGTVDICRACHRPGESIRHIISGCSRLANEEYLHRHNLVARIIHQQLALKYSLVESEVPYYRYVPDPVLENGNITLYWDRSIITDRTIVANKPDIVVVDRIERRTMIIDITVPHDGNLVKAEKDKQIKYLDLAREVVDMWDVDSAIVVPIVVTANGLIAKSLDQHLRRLSLGSWIKGLIQKAVLLDTARIVRRFLSLEP

SEQ ID NO: 11664 - protein, 1203 aa, Amphipyra tragopoginis
MLTRSRAKAQNTRPPSSASSLSSASQPPEPASIVSDVTPAAAVASSSSDEYFSPATSPSPPPARRRGRGRPPTCLGPRGPPASDRVPAPGGSVQRMRWTQSMNENCMRAYFGATEGGTNLTAYRGRMLSLFRALEPAVNVSAQRLSDQVRVIQRDHRLDDAALDRLRAEMQNSHAAPLPSQIRTQTLVPPAVPLVSNYADEEGEDRAISAGTQYSEIMRSALEDALREFRSTPPELRPRLPMHNKNRALVCALDSLLPNVFESSEDLGDTQSILYCAAVAACRVAHVKFPNDNRATRPKSAVPAWQCRIERRIDEARVLIGKLTCFREGNRRPRVMRFVRRAFSGTNIGPGEYASRVTERIDFLKQKVYAWANRIRRYRRRVDRYTQNRIFQSDQRWVYRTWERLDQGVSDTHLPDNDVMNAFWRNIWSVPVTHTEGDWMQEVQRACEPIQEMGAVTIGPQDVTSAVRPMPNWKSPGPDGLHNFWIKWLRSSHARLASQFQSSLESGSLPAFLTTGITHLLFKSGSTAEPKNYRPITCLPTVYKLLTSILRAKLNHHIDSNAIMCATQNGCRNGSRGTKELLLIDMAISQQVRRARKDLSTCWIDYKKAYDSVPHTWLMRVLELYKINATLRTFLMSCMGQWRTVLHYPGCRQIQGNGELIRIERGIFQGDSLSPLWFCLALNPLSTLLEGSGLGYRLRRGGQVISHLLYMDDLKLFAPNNLQLVELLKVTETFSNSIRMEFGVDKCAVMHVKRGRIMESVGTQLSDSIHLRSLSSTETYKYLGMSEALGINEADMKQSLRERFFGRLIKVLKSLLSGGNKVRAFNGWVMPVLMYSFGILRWTQTELDALDRRVRTLLTSYRMHHPRSSVMRLYIPRKCGGRGFLNAKTLHNREVCSLREYFSQADVGTHRDVVAVDKGLTPLSLAKENWRKPVVLDAKGRMEVWRSKELHGRFYRALHGPDVDFLASVAWLRFGDLFGETEGFVCAIMDEVMMTNNYRKYIVRDGTVDICRACHCPGESIRHIVSGCSRLANGEYLHRHNLVARIIHQQLALKYNLVDTEVPYYRYVPDPVLENGHVTLYWDRSIITDRTIVANKPDIVVIDRLERRTMIVDITVPHDENLVKAENDKKIKYLDLAHEVVDMWDVDSAVIVPIVVTANGLIAKSLDQHLMRLSLGSWIKGLIQKAVLLDTARIVRKFLSLEP

SEQ ID NO: 11665 - protein, 868 aa, Amphipyra tragopoginis
MRFVRRAFSGTDTNPRDYMSRVTERIDFLKQKVYAWANRIRRYRRRVERYTQNRMFQRDQRWVYRAWERSDQGVGDAHLPDDDAMNSFWRSIWSVPVSHTEGGWIRDVERVCEPILDMGAISISPQDVASAVRPLPNWKSPGPDGLHNFWLKWLRSSHARLASQFQSSLETGTLPQFLTTGVTHLLHKSGSTAEPKNYRPITCLPTVYKLLTSILRGRISSHIENNSIMSASQNGCRNGSRGTKELLLIDMAISQQVRRSRKDLSTCWIDYKKAYDSVPHAWLMRVLELYKINATLRTFLMSCMGQWRTVLHYPGCRQIQGNGELIRIERGIFQGDSLSPLWFCLALNPLSTLLEGSGLGYRLRRGGQVISHLLYMDDLKLFAPNNLQLLELLKVTETFSNSIRMEFGVDKCAVMHVKRGRIMESVGTQLSDSIQLRSLSSTETYKYLGMSEALGINEADMKQSLRERFFGRLIKVLKSLLSGGNKVRAFNGWVMPVLMYSFGMLRWTQTELDALDRRVRTLLTAYRMHHPRSSVMRLYIPRKCGGRGFLNAKTLHNREVCSLREYFSQADVGMHRDVVAVDKGLTPLSLAKENWRKPVVLDTNGRREVWRSKELHGRFYRALYGPDVDFLASVAWLRFGDLFGETEGFVCAIMDEVMMTNNYRKYIVKDGTVDICRACHCPGESIRHIVSGCSRLANGEYLHRHNLVARIIHQQLALKYDLVDSEVPYYRYVPDPVLENGHVTLYWDRSIITDRTIVANKPDIVVIDRSERRAMIVDITVPHDENLVKAENEKKIKYLDLAHEVVDMWDIDSAVIVPIVVTANGLIAKSLDQHLMRLSLGSWIKGLIQKAVLLDTARIVRKFLSLEP

SEQ ID NO: 11666 - protein, 868 aa, Amphipyra tragopoginis
MRFVRRAFSGTGISPRDYMSRITERIDFLKQKVYAWANRIRRYKRRVERYTLNRTFQSDQRRVYRTWERPDPCGSDVRLPDDEAMSSFWRSIWSVPVAHTEGDWMRDIERACEPIPEMGAIIISPQDVAGAARPLPNWKSPGPDGLHNFWLKWLRSSHACLASQFQSSLESGSLPQFLTTGATHLLYKSGSTAEPKNYRPITCLPTVYKLLTSILRVKISNHIDNNSIMSASQNGCRNGSRGTKELLLIDMTISQQVRRSRKDLSTCWIDYKKTYDSVPHTWLMRVLELYKINTTLRTFLMSCMRQWRTVLRYPGCREIRGRGEPVRIERGIFQGDSLSPLWFCLALNPLSTLLEGTRLGYRLRREGQVISHLLYMDDLKLFAPTDLRLMELLKVTENFSSSIRMEFGVDKCAVMHVKRGGIVESEGTQLSNSIQLRSLSPTETYRYLGMSEALGISEADMRQSLRERFFGRLNKVLRSLLSGGNKVRAFNGWVMPVLMYSFGILKWTQTDLDALDRRVRALLTTHRMHHPRSSVMRLYIPRKCGGRGFLNAKTLHNREVCSLREYFLQAEGEMHRDVVAVDKGLTPLALAKENWRKPAVLSTNDREEVWQSKELHGRFYRALHGPDVDFPASVSWLRFGDLFGETEGFVCAIMDEVMMTNNYRRYIVKDGTVDICRACHRPGESIRHIISGCSRLANGEYLHRHNLVARIIHQQLALKYNLVESEVPYYRYVPDPVLENGHVTLYWDRSIITDRTIVANKPDIVVIDRSERRTMIVDITVPHDENLVKAEKDKQIKYLDLAHEVVGMWDVDSAVIVPIVVTANGLIAKSLDQHLKRLSLGGWIKGLIQKAVLLDTARIVRRFLSLEP

SEQ ID NO: 11667 - protein, 1050 aa, Amphipyra tragopoginis
MLDDTVLDRIRSEVQSSPVISPSPQVLEQSQNLAATLPRPNPADEEDDDRATNVSTQCNEELRSALEDAMREYRYTRSDLRPRIPRLPMHRKNRALVCALDSLLSNYFDGSEDLGDTHSILYCAAVAACRVAHVKFIDNERVTRPKNAVPAWQCRIERRIAEARALIGKLVCFREGNTRPRVMRFVRRAFSGTDVSPREYMSRVTERIDFLKQKVYAWASRIRRYRRRVDRYTQNRLFQSDERWVYRTWERPDQRVGDAHLPDNDVISAFWRNIWSVPVTHTEGDWMQEVQRACEPIQEMGDIIISPQDVASAVRPMSNWKSPGPDGLHNFWLKWLRSSHACLASQFQSSLESESLPQFLTTGVTHLLHKSGSTAEPKNYRPITCLPTVYKLLTSILRSKINFHIENNCIMSPSQNGCRNGSRGTKELLLIDMAISQQVRRSRKDLSTCWIDYKKAYDSVPHTWLMRVLELYKVNTTLCAFLTSCMRQWRTVLRCPGCRQIQGIGEPIRIERGIFQGDSLSPLWFCLALNPLSTLLEGSGLGYRLRRGGQVISHLLYMDDLKLFAPNKLQLLELLKVTETFSNSIRMEFGVDKCAVMHVKRGRIMESAGTQLTDSIHLRSLSSTETYKYLGMSEALGINGTDMKQSLRERFCGRLKKVLNSLLSGGNKVRAFNGWVMPVLMYSFGILKWTQTELDALDRRVRSLLTANRMHHPRSSVMRLYIPRKCGGRGFLNAKTLHNREVCSLREYFSQADVGMHRDVVAVDKGFTPLSLAKENWRKPVVLDTNDRREVWRSKELHGRFYRALHGPDVDFLASVAWLRFGDLFGETEGFVCAIMDEVMMTNNYRKYIVKDGTVDICRACHCPGESIRHIVSGCSRLANGEYLHRHNLVARIIHQQLALKYNLVDAEVPYYRYVPDPVLENGHITLYWDRSIITDRTIVANKPDIVVIDRSERLTMIVDITVPHDENLVKAEKDKEIKYQDLAHEVVAMWDVDSAIIVPIVVTANGLIAKSLDQHLKRLSLGSWIKGLVQKAVLLDTARIVRKFLSLRP

SEQ ID NO: 11668 - protein, 1203 aa, Amphipyra tragopoginis
MLTRARARQKDARPRSPDSSLCSASQPPESSPPVSAVTPAAAVASSSSDEYFSPPSSPPPVRRRGGARPPACLGPRSQPASNRVPAAGGNVSRMRWTQSINENVMRAYYGATDGGINLTAYRDRMLSLFQVLEPAINVSTQRLSDQVRVIQRNRRLDDTVLERLRSETQNNRTVTSPAQSAVQPQLPAVPPRPSHADGEGDGEVIEVSNQCSDELRSALEGAILEYRTTPPELRPRLPRLPMHKKNRALVCALDSLLSNYFDGSEDLADTHSILYCAAIAACRVAHVKFTESDRATRPKPVVPAWQCRIERRIGGARALIGKLICFREGNTRPRVMRFVRRAFSGTDISPRDYMSRITERIDFLKQKVYAWANRIRRYKRRVERYSQNRTFQSDQRRVFRTWERPDPSGSDVRLPDDEAMGSFWRSIWSVPIAHTEGDWMRDIERACEPIPEMGAIIISPQDVAGAARPLPNWKSPGPDGLHNFWLKWLRSSHACLASQFQSSLESGSLPQFLTTGATHLLYKSGSTAEPKNYRPITCLPTVYKLLTSILRVKISNHIDNNSILSPSQNGCRSGSRGTKELLLIDMTISQQVRRSRKDLSTCWIDYKKAYDSVPHTWLMRVLELYKINTTLRTFLMSCMRQWRTVLRYPGCREIRGRGEPIRIERGIFQGDSLSPLWFCLALNPLSTLLEGTRLGYRLRREGQVISHLLYMDDLKLFAPTDLRLMELLKVTENFSSSIRMEFGVDKCAVMHVKRGGIVESEGIQISNPIQLRSLSPTETYKYLGMSEALGISEADMKQSLRERFFGRLNKVLRSLLSGGNKVRAFNGWVMPVLMYSFGILKWTQTDLEALDRRVRALLTVHRMHHPRSSVMRLYIPRKCGGRGFLNAKTLHNREVCSLREYFLQAEGEMHRDVVAVDKGLTPLALAKENWRKPAVLSTNDREEVWQSKELHGRFYRALHGPDVDFPASVSWLRFGDLFGETEGFVCAIMDEVMMTNNYRKYIVKDGTVDICRACHRPGESIRHIISGCSRLANGEYLHRHNLVARIIHQQLALKYNLVESEVPYYRYVPDPVLENGHATLYWDRSIITDRTIVANKPDIVVIDRSERRTMIVDITVPHDENLVKAEKDKQIKYLDLAHEVVGMWDVDSAVVVPIVVTANGLIAKSLDQHLKRLSLGGWIKGLLQRAVLLDTARIVRRFLSLEP

SEQ ID NO: 11669 - protein, 1203 aa, Amphipyra tragopoginis
MLTRARAREKVARPRSPDPSLRSASQPPESSPSVSAVTPAAAVASSSSDEYFSPPSSPPPVRRRGGARPPACLGPQGQPASNRVPAAGGNVSRMRWTQSINENVMRAYYGATEGGINLTAYRDRMLLLFQVLEPAINVSTQRLSDQVRVIQRNRRLDDTVLERLRSEVQNNRAVTPPVQAVVQAQLPAVTPRPSHGDGEGDGEVIEVSNQCSDELRSALEGAILEYRTTPPELRPRLPRLPMHKKNRALVCALDSLLSNYFDGSEDLADTHSILYCAAIAACRVAHVKFTESDRATRPKPVVPAWQCRIERRIGGARALIGKLICFREGNTRPRVMRFVRRAFSGTDISPRDYMSRITERIDFLKQKVYAWANRIRRYKRRVERYTQNRTFQSDQRRVFRTWERPDPSGSDVRLPDDEAMGSFWRSIWSVPIAHTEGDWMRDIERACEPIPEMGAIIISPQDVAGAARPLPNWKSPGPDGLHNFWLKWLRSSHACLASQFQSSLESGSLPQFLTTGATHLLYKSGSTAEPKNYRPITCLPTVYKLLTSILRVKISNHIDNNSIMSASQNGCRNGSRGTKELLLIDMTISQQVRRSRKDLSTCWIDYKKAYDSVPHTWLMRVLELYKINTTLRTFLMSCMRQWRTVLRYPGCREIRGRGEPVRIERGIFQGDSLSPLWFCLALNPLSTLLEGTRLGYRLRREGQVISHLLYMDDLKLFAPTDLRLMELLKVTENFSSSIRMEFGVDKCAVMHVKRGGIVESEGTQLSNSIQLRSLSPTETYRYLGMSEALGISEADMRQSLRERFFGRLNKVLRSLLSGGNKVRAFNGWVMPVLMYSFGILKWTQTDLDALDRRFRALLTTHRMHHPRSSVMRLYIPRKCGGRGFLNAKTLHNREVCSLREYFLQAEGEMHRDVVAVDKGLTPLALAKENWRKPAVLSTNDREEVWQSKELHGRFYRALYGPDVDFPASVSWLRFGDLFGETEGFVCAIMDEVMMTNNYRKYIVKDGTVDICRACHRPGESIRHIISGCSRLANGEYLHRHNLVARIIHQQLALKYNLVESEVPYFRYVPDPVLENGHVTLYWDRSIITDRTIVANKPDIVVIDRSERRTMIVDITVPHDENLVKAEKDKQIKYLDLAHEVVGMWDVDSAVIVPIVVTANGLIAKSLDQHLKRLSLGGWIKGLIQKAVLLDTARIVRRFLSLEP

SEQ ID NO: 11670 - protein, 1203 aa, Noctua pronuba
MLTRLRAKQLAHPPSPGSSLSSASQPPGRATSVSTLSPVAAVASSSSDEFFSPPSTPPPPQRRRGRRPPAGLGPRGQQAPNRVPAAGGNVSRMRWTQSINEQVMRAYYGATEGGSNLTAYRGRMLSLFQVLQPAVSVSAQRLSDQVRVIQRNHMLDDTVLDRLRSESRSNPVTPASPMIAVQLQSVTSTSPRSDRGGEEDDNEVISVSTQCNAQLRSALEGAFREYRSTPPELRPRLPRLPMHKKNKALMCALDSQLSNCFDSSKDLADTHSILYCGAVAACRVAHVKFPNNDRATRLKLAVPAWQCRIERRIGEARALIGKLICFREGNTRPRVMRFVRRAFSGTDISFRDYLTRVTERIDFLKQKICAWASRIRRYKRRVDRYTQNRTFQSDERWVYRAWERPDQGVTDTRLPDDDAMCSFWRSIWSVPVSHTEGDWTREVERACDPIPQMGAINISPQDVACAVRPLPNWKSPGPDGLHNFWIKWFQRSHARLASQFQSALESGSLPQFLTTGITHLLHKSGSTAEPKNYRPITCLPTVYKVLTSILRAKINHHIDSNSIMSASQNGCRNGSRGTKELLLIDMAISQQVRRSRKNLSTCWIDYKKAYDSVPHTWLMRVLELYKVDATLRTFLMSCMGHWRTVLRYPGCRQIQGNSEPIRIERGIFQGDSLSPLWFCLALNPLSTLLEGSGLGYRLRRGGQVISHLLYMDDLKLFAPNNLQLMKLLKVTETFSSAIRMEFGVDKCAVMHVKRGEIMESVGTQLSDSIQLRSLSSTDTYKYLGMSEALGINTADMKQSVRERFFGRLNKVLSSLLSGGNKVRAFNGWVMPVLMYSFGILKWTQTELDALDRRVRALLTANLMHHPRSSVMRLYIPRKCGGRGFLNAKTLHNREVCSLREYFLETDVGMHRDVVSVDKGLTPLSLANENWRKPRVLDMNDRKEVWQGKEFHGRFYRALHGPDVDFLASVSWLRFGDLFGETEGFVCAIMDEVMMTNNYRKYIVKDGTVDICRACHRPGESIRHIISGCSRLANGEYLHRHNLVARIIHQQLALKYNLVESEVPYYKYAPDPVLDNGNITLYWDRSIITDRTIVANKPDIVVIDRLERRAMIVDITVPHDENLVKAEKDKQFKYLDLAHEVVDMWDVNTAVIVPIVVSANGLIAKSLDQHLKRLALGSWIKGLIQKAVLLDTARIVRRFLSQEP

SEQ ID NO: 11671 - protein, 1207 aa, Noctua pronuba
MSPMLTRRRAKLLETHPPSPGSSLSSASQPPGRATSVSAASPVAAVASSSSDEFFSPPSTPPSPRRRGRRPPAGLGPRGQQAPNRVPAAGGNVSRIRWTQSMNENVMRAYYGATEGGINLTAYRCRMLSLFQALEPAVNVSAQRLSDQVRVIQNNHRLDDATLDRLRSELRISPASNPLPSQNVTHVPAALPLRANQHAEEEDDRAVSADNLCNEELRSALEDAIREYRFTSPDLRPRLPRLPMNKKNRALVCALDALLPNFIASSANLCDTHSILYCTAVAACRVANVKFPNTDSATRPKSAVPVWQCRIERRINEARALIGKLICFREGNTRPRVMRFVRRAFSGTDISPREYMSRVTERIDFLKQKVYAWANRIRRYRRRVDRYTQNRMFQSDERWVYRTWERPVTIQGVTDTHLPDNDAMSAFWRSIWSVPVSHTEGDWMRVVEQACDSIPEMEAISISPLDVARAVRPLPNWKSPGPDGLHNFWIKWLQRSHACLASQFQSSLETGSLPSFFTTGVTHLLHKSGSTAEPKNYRPITCLPTVYKVLTSILRAKIVRHIDNNSIMSVSQNGCRNGSRGTKELLLIDMAISQQVRRSRRDLSTCWIDYKKAYDSVPHTWLRRVLELYKIDATLRTFLVSCMGQWSTVLLYPGCRQVLGNDEPIRIERGIFQGDSLSPLWFCLALNPLSTLLEDSGLGYRLRRGGQVISHLLYMDDLKIFAPSNLQLMELLKVTETFSSAIRMEFGVDKCAVMHVKRGEIMESVGTQLSDSIYLRSLSSTETYKYLGMSEALGINATDMKQSLKERFFGRLNKVLKSLLSGGNKVRAFNGWVMPVLMYSYGILKWTQTELDALDRKVRTLLTANRMHHPRSSVMRLYIPRKCGGRGFLNAKTLHNREVCSLREYFLETDVGMHRDVVSVDKGLTPLSLANENWRKPVVLDTNDRKEVWQSKELHGRFFRALHGPDVDLLASVSWLRFGDLFGETEGFVCAIMDEVIMTNNYRKYIVKDGTVDICRACHRPGESIRHIVSGCSRLANGEYLHRHNLVARIIHQQLALQYNLVGTEVPYYKYAPDPVLENGHATLYWDRSIITDRTILANKPDIVVIDRRERRAMIVDITVPHDENLVKAENDKKIKYLDLAHEVVDMWDVDSAIIVPIVVTVNGLIAKSLDQHLRRLSLRGWVKGLIQKAVLLDTARIVRRFLSLEP

SEQ ID NO: 11672 - protein, 1207 aa, Noctua pronuba
MSPMLTRRRAKLLETHPPSPGSSLSSASQPPGRATSVSAASPVAAVASSSSDEFFSPPSTPPSPRRRGRRPPAGLGPRGQQAPNRVPAAGGNVSRIRWTQSMNENVMRAYYGATEGGINLTSYRCRMLSLFQALEPAVNVSAQRLSDQVRVIQNNHRLDDATLDRLRSELRISPASNPLPSQNVTHVPAALPLRANQHAEEEDDRAVSADNLCNEELRSALEDAIREYRFTSPDLRPRLPRLPMNKKNRALVCALDALLPNFIASSANLCDTHSILYCTAVAACRVANVKFPNTDSATRPKSAVPVWQCRIERRINEARALIGKLICFREGNTRPRVMRFVRRAFSGTDISPREYMSRVTERIDFLKQKVYAWANRIRRYRRRVDRYTQNRMFQSDERWVYRTWERPVTIQGVTDTHLPDNDAMSAFWRSIWSVPVSHTEGDWMRVVEQACDSIPEMEAISISPLDVARAVRPLPNWKSPGPDGLHNFWIKWLQRSHACLASQFQSSLETGSLPSFFTTGVTHLLHKSGSTAEPKNYRPITCLPTVYKVLTSILRAKIVRHIDNNSIMSVSQNGCRNGSRGTKELLLIDMAISQQVRRSRRDLSTCWIDYKKAYDSVPHTWLRRVLELYKIDATLRTFLVSCMGQWSTVLFYPGCRQVLGNDEPIRIERGIFQGDSLSPLWFCLALNPLSTLLEDSGLGYRLRRGGQVISHLLYMDDLKIFAPSNLQLMELLKVTETFSSAIRMEFGVDKCAVMHVKRGEIMESVGTQLSDSIYLRSLSSTETYKYLGMSEALGINATDMKQSLKERFFGRLNKVLKSLLSGGNKVRAFNGWVMPVLMYSYGILKWTQTELDALDRKVRTLLTANRMHHPRSSVMRLYIPRKCGGRGFLNAKTLHNREVCSLREYFLETDVGMHRDVVSVDKGLTPLSLANENWRKPVVLDTNDRKEVWQSKELHGRFFRALHGPDVDLLASVSWLRFGDLFGETEGFVCAIMDEVIMTNNYRKYIVKDGTVDICRACHRPGESIRHIVSGCSRLANGEYLHRHNLVARIIHQQLALQYNLVGTEVPYYKYAPDPVLENGHATLYWDRSIITDRTILANKPDIVVIDRRERRAMIVDITVPHDENLVKAENDKKIKYLDLAHEVVDMWDVDSAIIVPIVVTVNGLIAKSLDQHLRRLSLRGWVKGLIQKAVLLDTARIVRRFLSLEP

SEQ ID NO: 11673 - protein, 1106 aa, Noctua pronuba
MNENVMRAYYEATEGGINLTAYRCRMLSLFQALEPAVNVSAQRLSDQVRVIQNNHRLDDATLDRLRSELWISPASNPLPSQNVTHVPAALPLRENQHAEEEDDRAVSADNLCNEELRSALEDAIREYRFTSPDLRPRLPRLPMNKKNRALVCALDALLPNFIASSANLCDTHSILYCTAVAACRVANVKFPNTDSATRPKSAVPVWQCRIERRINEARALIGKLICFREGNTRPRVMRFVRRAFSGTDISPREYMSRVTERIDFLKQKVYAWANRIRRYRRRVDRYTQNRMFQSDERWVYRTWERPVTIQGVTDTHLPDNDAMSAFWRSIWSVPVSHTEGDWMRVVEQACDSIPEMEAISISPLDVARAVRPLPNWKSPGPDGLHNFWIKWLQRSHACLASQFQSSLETGSLPSFFTTGVTHLLHKSGSTAEPKNYRPITCLPTVYKVLTSILRAKIVRHIDNNSIMSVSQNGCRNGSRGTKELLLIDMAISQQVRRSRRDLSTCWIDYKKAYDSVPHTWLRRVLELYKIDATLRTFLVSCMGQWSTVLLYPGCRQVLGNDEPIRIERGIFQGDSLSPLWFCLALNPLSTLLEDSGLGYRLRRGGQVISHLLYMDDLKIFAPSNLQLMELLKVTEIFSSAIRMEFGVDKCAVMHVKRGEIMESVGTQLSDSIYLRSLSSTETYKYLGMSEALGINATDMKQSLKERFFGRLNKVLKSLLSGGNKVRAFNGWVMPVLMYSYGILKWTQTELDALDRKVRTLLTANRMHHPRSSVMRLYIPRKCGGRGFLNAKTLHNREVCSLREYFLETDEGMHRDVVSVDKGLTPLSLANENWRKPVVLDTNDRKEVWQSKELHGRFFRALHGPDVDLLASVSWLRFGDLFGETEGFVCAIMDEVIMTNNYRKYIVKDGTVDICRACHRPGESIRHIVSGCSRLANGEYLHRHNLVARIIHQQLALQYNLVGTEVPYYKYVPDPVLENGHATLYWDRSIITDRTILANKPDIVVIDRRERRAMIVDITVPHDENLVKAENDKKIKYLDLAHEVVDMWDVDSAIIVPIVVTVNGLIAKSLDQHLRRLSLRGWVKGLIQKAVLLDTARIVRRFLSLEP

SEQ ID NO: 11674 - protein, 1204 aa, Noctua pronuba
MITRSRAKQQKAHPPSPGSSLSSASQPPGRATSVSSVSPVAAVASSSSDEFFSPPSTPSPPRRRGRGRPPAGLGPRGQQAPNRVPAAGGNVSRMRWTQSINENVMRAYYGATEGGSNLTAYRGRMLSLFQVLEPGVSVSAQRLSDQVRVIQRNHMLDDTVLDRLRFDSRSNLVTPASPMIAVQLQNVSSAPPRSDHDGEEDDDEVISVSTQCNAQLRSALEGAFREYRSIPPELRPRLPRLPMHKKNKALVCALDSQLSTCFDSSKDLADTHSILYCGAVAACRVAHVKFPNNDRATRPKLAVPAWQRRIERRIGEARVLIGKLICFREGNTRPRVMRFVRRAFSGTGISFRDYLARVTERIDFLKQKICAWANRIRRYKRRVERYTQNRTFQSDERWVYRAWERPDQGVTDTRLPDADAMCLFWRSIWSVPVSHTEGDWTREVEQACDPIPEMGAIIISPQDVACAVRPLPNWKSPGPDGLHNFWIKWFQRSHARLASQFQSALESGSLPQFLTTGITHLLHKSGSTAEPKNYRPITCLPTVYKVLTSILRAKINHHIDSNSIMSASQNGCRNGSRGTKELLLIDMAISQQVRRSRRDLSTCWIDYKKAYDSVPHTWLMRVLELYKVDATLRTFLKSCMGHWRTVLRYPGCRRIQGNSEPIRIERGIFQGDSLSPLWFCLALNPLSTLLEGSGLGYRLRRGGQVISHLLYMDDLKLFAPNNLQLMKLLKVTETFSSAIRMEFGVDKCAVMHVKRGEIMESVGTQLSDSIHLRSLSSTETYKYLGMSEALGINTTDMKQSLRERFFGRLNKVLGSLLSGGNKVRAFNGWVMPVLMYSFGILKWTQTELDALDRRVRALLTANRMHHPRSSVMRLYIPRKCGGRGFLNAKTLHNREVCSLREYFLEADVGMHRDVVSVDKGLTPLSLANENWRKPRVLDTNDRKEVWQGKELHGRFYRALHGPDVDFLASVSWLRFGDLFGETEGFVCAIMDEVMMTNNYRKYIVKDGTVDICRACHRPGESIRHIISGCSRLANGEYLHRHNLVARIIHQQLALKYNLVESEVPYYKYAPDPVLDDGNITLYWDRSIITDRTIVANKPDIVVIDRLERRAIIVDITVPHDENLVKAEKDKQFKYLDLAREVVDMWDVSTAVIVPIVVSANGLIAKSLDQHLRRLSLGSWIKRLIQKAVLLDTARIVRRFLSQEP

SEQ ID NO: 11675 - protein, 1204 aa, Noctua pronuba
MLTRRRAKLLETHPPSPGSSLSSASQPPGRATSVSAASPVAAVASSSSDEFFSPPSTPPSPRRRGRRPPAGLGPRGQQAPIRVPAAGGNVSRIRWTQSMNENVMRAYYGATEGGINLTAYRCRMLSLFQALEPAVNVSAQRLSDQVRVIQNNHRLDDATLDRLRSELRISPASNPLPSQNVTHVPAALPLRANQHAEEEDDRAVSADNLCNEELRSALEDAIREYRFTSPDLRPRLPRLPMNKKNRALVCALDALLPNFIESSANLCDTHSILYCTAIAACRVANVKFPNTDSATRPKSAVPVWQCRIERRINEARVLIGKLICFREGNTRPRVMRFVRRAFSGTDVSPREYMSRVTERIDFLKQKVYAWANRIRRYRRRVDRYTQSRMFQSDERWVYRTWERPVTIQGVTDAHLPDNDAMSAFWRSIWSVPVGHTEGDWMRVIEQACDSIPEMEAISISPLDVARAVRPLPNWKSPGPDGLHNFWIKWLQRSHACLASQFQSSLETGSLPSFFTTGVTHLLHKSGSTAEPKNYRPITCLPTVYKVLTSILRAKIVRHIDSNSIMSVSQNGCRNGSRGTKELLLIDMAISQQVRRSRRDLSTCWIDYKKAYDSVPHTWLRRVLELYKIDATLRTFLVSCMGQWSTVLLYPGCRQVLGNDEPIRIERGIFQGDSLSPLWFCLALNPLSTLLEDSGLGYRLRRGGQVISHLLYMDDLKIFAPSNLQLMELLKVTETFSSAIRMEFGVDKCAVMHVKRGEIMESVGTQLSDSIYLRSLSSTETYKYLGMSEALGINSADMKQSLKERFFGRLNKVLKSLLSGGNKVRAFNGWVMPVLMYSYGILKWTQTELDALDRKVRTLLTANRMHHPRSSVMRLYIPRKCGGRGFLNAKTLHNREVCSLREYFLETDVWMHRDVVSVDKGLTPLSLANENWRKPVVLDTNDRKEVWQSKELHGRFFRALHGPDVDLLASVSWLRFGDLFGETEGFVCAIMDEVIMTNNYRKYIVKDGTVDICRACHRPGESIRHIVSGCSRLANGEYLHRHNLVARIIHQQLALQYNLVGTEVPYYKYVPDPVLENGHATLYWDRSIITDRTILANKPDIEVIDRRERRAMIVDITVPHDENLVKAENDKKIKYLDLAHEVVDMWDVDSAIIVPIVVTVNGLIAKSLDQHLRRLSLRGWVKGLIQKAVVLDTARIVRRFLSLEP

SEQ ID NO: 11676 - protein, 1068 aa, Noctua pronuba
MFEISAIAPLVRVIQRNHMLDDTVLDRLRFDSRSNLVMPAPPMIAVQLQNVSSAPPRSDHDGEDGNDEVISVSTQCNAQLRSALEGAFREYRSTPPELRPRLPRLPMHKKNKALVCALDSQLSTCFDSSKDLADTHSILYCGAVAACRVAHVKFPNNDRATRPKLAVPAWQCRIERRIGEARALIGKLICFREGNTRPRVMRFVRRAFSGTGIGFRDYLARVTERIDFLKQKICAWANRIRRYKRRVERYTQNRTFQSDERWVYRAWERPDQGVTDTRLPDDDAMCLFWRSIWSVPVSHTEGDWTREVEQACDPIPEMGAIIISPQDVACAVRPLPNWKSPGPDGLHNFWIKWFQRSHARLASQFQSALESGSLPQFLTTGITHLLHKSGSTAEPKNYRPITCLPTVYKVLTSILRAKINQHIESNSIMSTSQNGCRNGSRGTKELLLIDMAISQQVRRSRKDLSTCWIDYKKAYDSVPHTWLMRVLELYKVDATLRTFLRSCMGCWRTVLRYPGCRQIQRNSEPIRIERGIFQGDSLSPLWFCLALNPLSTLLEGSGLGYRLRRGGQVISHLLYMDDLKLFAPNNLQLMKLLKVTETFSSAIRMEFGVDKCAVMHVKRGEIMESVGTQLSDSIHLRSLSSTETYKYLGMSEALGINTADMKQSLRERFFGRLNKVLGSLLSGGNKVRAFNGWVMPVLMYSFGILKWTQTELDALDRRVRALLTANRMHHPRSSVMRLYIPRKCGGRGFLNAKTLHNREVCSLREYFLEADVGMHRDVVSVDKGLTPLSLANENWRKPKVLVTNDRKEVWQSKELHGRFYRALHGPDVDFLASVSWLRFGDLFGETEGFVCAIMDEVMMTNNYRKYIVKDGTVDICRACHRPGESIRHIISGCSRLANGEYLHRHNLVARIIHQQLALKYNLVESEVPYYKYVPDPVLDNGNITLYWDRSIITDRTIVANKPDTVVIDRLERRAMIVDITVPHDENLVKAEKDKQFKYLDLAREVVDMWDVSTAVIVPIVVSANGLIAKSLDQHLRRLALGSWIKGLIQKAVLLDTARIVRRFLSQQP

SEQ ID NO: 11677 - protein, 868 aa, Spilosoma lubricipeda
MRFVKQAFLGTTISPQQYMSSVTERIDFLKQKVYAWANRIRRYKKRGDRFNQNRMFQRNEKWVYRKWEAPNPCESDGDLPDENTTNSFWRNIWSVPVTHTDGDWMRDVSRSCESITSMEPVIINEDDISCAVRSLPNWKSPGPDGLHNFWLKWFRSSHACLASQLQAALDSGSLPQFLTTGITHLLYKSGSAMDPKNFRPITCLPTLYKLLTSILRLKITKHINNNSIISVSQNGCRSGTRGTKELLITDMTISQQVRRNRKSLATCWIDYKKAFDSVPHTWLLKVLELYKIDTTLCTFLKSCMRQWRTVLRYPGCRQTAVNDVPIKIERGIFQGDSLSPLWFCLALNPLSILLEGSGLGYRLQKEAPVISHLFYMDDLKLFAPTKLQLTALLRVTENFSNSIKMEFGIDKCAVMHVKKGVIVESEGIELSDSTRLRSLSATETYKYLGFSQSLGIPESDMKQSLRERFFGRLKKVLKSLLSGGNRVRAYNGWVMPVLMYSFGILRWTQTELDALDRRVRTLLTAFRMHHPRSSVMRLYIPRKFGGRGLLNVKTLHNREIYNLREYFLHTDVGVHRSVVAVDTGLTPLALAKENWRKPVVLGTNERREVWKGKKLHGRFYRALNGSDIDFKASTSWLRYGDLFGETEGFVCAIMDEVIMTNNYRKYILKDGTVDICRACHRPGESIRHIISGCSRLANGEYLHRHNQVARIVHQQLALKYKLVSSEVPYYRYVPDPVLENGRATLYWDRSVITDRTIVANKPDIVVIDRSERRAMIVDIAVPHDENLVKVEKEKQIKYLDLSHEIVEMWDVDSVIIVPIVVSVHGLIAKSLDQHLKRLTLDGWIKGLMQKAVLLDTARIVRRFLSLEP

SEQ ID NO: 11678 - protein, 1198 aa, Spilosoma lubricipeda
MLTRARSRALLSSSDSSLRSALPSSDARTEVPTVAEASSSSSSDEFFSPPTSPTPVRRQGRDRPPTSLGPRGPLTSNRAPAAGGDVRRMKWTQSINENVMRAYFRATELGTNLTAYRVRLVSLFQELEPAVNVSAQRLSDQVRAIQRCHLLDDVVLERIRSDVRGTLTVPSSSHSVDLVATTPQLPHNEYVDEQVESEVMTVSTQCNDRIRRALEDAIQEYRHVDYKNRPRLPRLPIHKRNLALVSALNSLLPDYFGNSEDLSDTHSILYCAAIAVCRVAGVKFVEQITTTRPKNEVPAWQCRIERRITETRTLIGKLITFQSGNTRPRVMRFVKQAFLGTTISPQQYMSSVTERIDFLKQKVYAWANRIRRYRKRVDRFIQNRMFQRNEKWVYRKWEEPSPRVGEGRFPDENVTNTFWRNIWSVPVTHTEGDWYRDVERSCESITSMEPITISKDDIGCAVRSLPNWKSPGPDGLHNFWLKWFRSSHACLASQYQAAMDSGSLPQFLTTGITHLLYKSGSAMDPKNFRPITCLPTMYKLLTSILRLKISTHINNNLIMSVSQNGCRSGSRGTKELLIIDMTISQQVRRNRKSLATCWIDYKKAYDSVPHTWLLRVLELYKIDTTLCTFLKSCMGQWRTVLRYPGCRQTAVNDVLINIERGIFQGDSLSPLWFCLALNPLSALLEDSGLGYRLQKDDQVISHLFYMDDLKLLAPTKLQLTALLKVTENFSNSIKMEFGVDKCAVMYVKKGVIVESEGTELSDSTRLRSLSATETYKYLGFSQSLGIPEPDMKQSLRERFFGRLKKVLKSLLSGGNKVRAYNGWVMPVLMYSFGILRWTQTELDALDRRVRTLLTAFRMHHPRSSVMRLYIPRKFGGRGLLIAKTLHNREIYNLREYFLHTDVGVHRSVVTVDTGLTPLALAKENWRKPVVLSTNDRREVWKGKELHGRFYRALNGPDIDFKASTSWLRYGDLFGESEGFVCAIMDEVIMTNNYRKYILKDGTVDICRACHRPGESIRHIISGCSRLANGEYLHRHNQVARIVHQQLALKYHLVSSEVPYYRYVPDPVLENGRATLYWDRSIITDRTIVANKPDIVVIDRLERRAMIVDIAVPHDENLVKVEKEKQIKYLDLSHEIVDMWNVDSAIIVPIVVSAHGLIAKSLDQHLKRLTLEGWIKGLMQKAVLLDTARIVRRFLSLEP

SEQ ID NO: 11679 - protein, 1194 aa, Autographa pulchrina
MLTRSRSRRPAPPPSPDSSPSSASQLPDHVPAPAPAVASSSSDEYYSPPTSPTPVRRQGRRRPPSSLAPAGQPASNRAPAPGGDVRRMKWTQGINENVMRAYYGATEGGTNLTAYRARMLSLFQGLEPDVNVSAQRLSDQVRVIQRNHRLDDATLDRLRSEVQRSPAASTPSPAVVPVIGSPPTNPADGEEEDGAITVSTQCSEHIRSTLEDTIREFRSTPPGLRPRLPRLPMHNRNKAIMGVLDSLLLVYFGSSEDLSDTHSILYCAALAACRVANVKINNINLDTRPKPAVPAWQCRIERRVAEARALIGKLIAFKDGNSRPRVMRFVRRAFTGTNISPSEYTARVTERIDFFKQKVCAWASRIRRYKCRVDRFHQNRMFQRDQRWVFRTWERPVLGMDDRRLPDEDATNSFWRNIWSVPVSHSEGVWMRDVEESCEPIQEMRAITIGPQDVANAIRPMSNWKAPGPDGLQNFWLKWFRSSHGCLASQFQYAIESDALPQFFTTGSTHLLHKTGSTTDPKNYRPITCLPTIYKLLTSILRVKINEHIDSHSIMSASQNGCRNGSRGTKELLLIDMTICQQVRRSKKNLSTCWIDYKKAYDSVPHSWLMRVLELYKINTTLRAFLSSCMRRWTTVLRYPGCRDIQQSGEPIRIERGIFQGDSLSPLWFCLALNPLSTLLENSRLGYSLRRGSQVISHLLYMDDLKLFASNELQLMGLLKITESFSNSIRMEFGVDKCAVMHVKQGGIVESQGIQLSDSINLRSLSAADTYKYLGMSEALGIDVADMKQSLLTRFFGRLNKVLKSLLSGGNRVRAFNGWVMPVLMYSFGILKWTQTELDALDRRVRTLLTANRMHHPRSSVMRLYIPRKCGGRGFLNAKTLHNREVCNLREYFLQVDVGMHRDVVVVDKGFTPLSLGKENWHKPVVLSVKDRRDVWQSKELHGRFYQSLHGPDVDFLASVAWLRFGDLFGETEGFVCAIMDEVIMTNNYRKYIIKDGTVDICRACHCPGESIRHIISGCSRLANGEYLHRHNQVARIIHQQLALRYKLVEAEVPYYRYVPDPVLDNGHVTLYWDRSIITDRTIVANKPDIVVIDRSERRAMIVDVTIPHDENLVKAEKEKQMKYLDLAHEVVDMWEVDSAIIVPIVITANGIIAKSLDQHLKRLSLGIWVKGLIQKAVLLDTARIVRRFLSLEP

SEQ ID NO: 11680 - protein, 1106 aa, Ochropleura plecta
MRWTSSINENVMRSYYGATEGGNNLTAYRVRMLSLFQVLEPAVNVSAQRLSDQVRVIQRNRMLDDTVLDRLRTEMQSSQVITSSSQAVVPPQSHQLVSHADEVSNDMATNVSTQCNEEMRIALEGAIREYRYISPELRPRLPRLPMHNKNRALVAVLDSQLSNYFDNCENLTDAHSILYCAAVAACRVAHVKFPDDGATRPKPAVPFWQCRIERRIGVARALIGKLICFREGNTRPRVMRFVRRAFAGTDISPPDYMSHITERIDFLKQKVYAWANRIRRYKRRVERYTLNRTFQSDERWVYRAWERPDQGVSDTHLPDDDAMCLFWRNIWSVPVSHTEGEWTREVERACDPIPEMGALTISPQDVACAVRPLPNWKSPGPDGLHNFWLKWIQRSHARLATLFQTALESGSLPKFLTTGITHLLHKSGSTTEPKNYRPITCLPTIYKVLTSILRAKITKHIDDNSIMSASQNGCRNGSRGTKELLLIDMAISQQVRRSRRHLSTCWIDYKKAYDSVPHTWLMRVLELYKVDATLRTFLSSCMRQWNTVLRYPGCRQIQRNSEPIRIERGIFQGDSLSPLWFCLALNPLSTLLEDSGLGYRLRRGGRVISHLLYMDDLKLFAPNDSQLMELLKVTETFSSAISMEFGVDKCAVMHVKRGEIVESVGTQLSDSIHLRSLSANETYKYLGMSEALGINVADMKQSLKERFFGRLRKVFNSLLSGGNKVRAFNGWVMPVLMYSFGILKWTQTELDALDRKVRTLLTAYRMHHPRSSVMRLYIPRSCGGRGFLNAKTLHNREICSLREYFLEADVGMHRDVVTVDKGFTPLSLAKENWRKPVVLDTNDRREVWQSKELHGRFFRALHGPDVDQPASVAWLRSGDLFGETEGFVCAIMDEVMMTNNYRRFIVKDGTVDICRACHRPGESIRHIISGCSRLANGEYLHRHNLVARIIHQQLALKYSLVESEVPYYRYEPDPVLEHGNITLYWDRSIITDRTIVANKPDIVVVDRSERRAMIVDITVPHDENLVKAEKDKQIKYIDLAREVVDMWDVDSAIIVPIVVSANGLIAKSLDQHLRRLSLGSWIKGLIQKAVLLDTARIVRRFLSLEP

SEQ ID NO: 11681 - protein, 1200 aa, Ochropleura plecta
MKMITRSAARRDARLPPPGPSLSSASPPPEPSLVVSAVTSAVAVASSSSDEYFSPPTTPPPARRRGGRRPPDGLGLRGPPASDRVPAPGGSVQRMRWTSSINENVMRSYYGATEGGNNLTAYRVRMLSLFQVLEPAVNVSAQRLSDQVRVIQRNRMLDDTVLDRLRTEMQSSQVITSSSQAVVPPQSHQLVSRADEVSNDMATNVSTQCSEEMRSALEGAIREYRYMSPELRPRLPRLPMHNKNRALVAVLDSQLSNYFDNCENLTDAHSILYCAAVAACRVAHVKFPDDGATRPKPAVPFWQCRIERRIGVARALIGKLICFKEGNTRPRVMRFVRRAFAGTDISPPDYMSRITERIDFLKQKVYAWANRIRRYKRRVERYTLNRTFQSDERWVYRAWERPDQGVSDTHLPDDDAMCLFWRSIWSVPVSHTEGEWTREVERACDPIPEMGALTISPQDVACAVRPLPNWKSPGPDGLHNFWIKWIQRSHVRLAALFQSALESGSLPKFLTTGITHLLHKSGSTAEPKNYRPITCLPTLYKVLTSILRAKITKHIDDNSIMSASQNGCRNGSRGTKELLLIDMAISQQVRRSRRHLSTCWIDYKKAYDSVPHAWLMRVLDLYKIDATLRTFLISCMRQWSTVLRYPGCRQIQRNSEPIRIERGIFQGDSLSPLWFCLALNPLSTLLENSGLGYRLKRGGQVISHLLYMDDLKLFAPNDLQLMELLKVTETFSSAIRMEFGVDKCAVMHVKRGEIVESVGTQLSDSINLRSLSATETYKYLGMSEALGINVADMKQLLKERFFGRLRKVFNSLLSGGNKVRAFNGWVMPVLMYSFGILKWTQTELDALDRKVRTLLTAFRMHHPRSSVMRLYIPRSCGGRGFLNAKTLHNREICSLREYFLETDVGMHRDVVAVDKGLTPLSLAKENWRKPVVLDTNDRREVWQSKELHGRFFRALHGPDVDQSASVAWLRSGDLFGETEGFVCAIMDEVMMTNNYRRFIVKDGTVDICRACHRPGESIRHIISGCSRLANGEYLHRHNLVARIIHQQLALKYNLVEAEVPYYRYEPDPVLEHGYITLYWDRSIITDRTVVANKPDIVVVDRSERRAMIVDITVPHDENLVKAEKDKQIKYIDLAREVVDMWDVDSAIIVPIVVSANGLIAKSLDQYLRRLSLGSWIKGLIQKAVLLDTARIVRRFLSLEP

SEQ ID NO: 11682 - protein, 1202 aa, Hecatera dysodea
MLTRSRTRAQTTQSTSSGSSLSSASQPPGPTPAVSPEIPVAAVASSSSDEYFSPPTTPPPARRRGRGRPPTSLGPRGPPASDRVPAIGGSVQRMRWTQSINENVMRSYFGATEGGTNLTAYRGRMLSLFQVLEPAVNVSAQRLSDQVRVIQRNRMLDDAVLDRLRLESRSSRVSPASPPAAVQIQPSISPRPDHVSEYVDDGAITVSTQCNERLRSALEDAFREYRSTPPGLRPRLPRLPMHNKNRALVCALDSQLENCFNSSKDLADTHSILYCAAAAACRVAHVKFPNSDRAARPAVPAWQCRIERRIGEARALIGKLTSICFREGNTRRRVMRFVRRAFSGTDISPRDYLTRVTERIDFLKQKVYTWASRIRRYKRRVERYTQNRTFQSNERWVYRAWERPDQVVTDTHLPDDDAMCSFWRSIWSVPVSHTEGDWTWEVERTCDPIPEMGAFTISPQDVARAVRPLPNWKSPGPDGLHNFWIKWFTRSHARLASQFQSALESRSLPQFLTTGITHLLHKSGSTAEPKNYRPITCLPTVYKVLTSILRAKINDHIESNSIMSTSQNGCRNGARGTKELLLIDVAISQQVRRSRKDLSTCWIDYKKAYDSVPHTWLMRVLELYKVNTVLRTFLMSCMGQWRTVLHYPGCRQTQANSEPIRIERGIFQGDSLSPLWFCLTLNPLSTLLEGSGQGYRLRRGGQVISHLLYMDDLKLFAPNNLQLMKLLKVTETFSSDISMEFGVDKCAVMHVKRGEIMESVGTQLSDSIYLRSLCSTETYKYLGMSEALGINATSVKQSLKERFFGRLNKVLNSLLSGGNKVRAFNGWVMPVLMYSFGILKWTQTELDALDRRVRSLLTANRMHHPRSSVMRLYIPRKCGGRGFLNAKTLHNREVCSLREYFLEADVGMHRDVVAVDKGLTPLSLANENWRKPVVLDTNDRREVWQRKELHGRFYRVLHGPDVDFLASVAWLRFGDLFGETEGFICAITDEVMMTNNYRKYIMKDGTVDICRACHRPGESIRHIISGCSSLANGDYLHRHNLVARIIHQQLALKYNLVESEVPYYRYVPDPVLENGNCTLYWDRSIITDRTIVANKPDKVVIDRLERRAMIVDIAVPHDENLVKAEKDKQSKYLDLAREVVDMWNVNTAVIVPIIVTANGIIAKSLDQHLKRLSLGSWIKGLIQKAVLLDTARIVRRFLSQEP

SEQ ID NO: 11683 - protein, 1200 aa, Hecatera dysodea
MLTRSRTRCQNTRLTPSDSSLSSASQPPGPTPPVSPEIPVAAVASSSSDEYFSPPTTPPPARRRGRGRPPTSLGPRGPPASDRVPAIGGSVQRMRWTHSINENVMRSYFGATEGGTNLTAYRGRMLSLFQVLEPAVNVSAQRLSDQVRVIQRNRMLDDAVLDRLRLESRSSRVSPASPPAAVQIQPSISPRPDHVSEDVDDGTISVSTQCNERLRSALEDAFREYRSTPPELRPRLPRLPMHNKNRALVCALDSQLSIYFDSSENLTDTHSILYCGAAAACRVAHVKLPNSDRVARPAVPAWQCRIERRIAEARALIGKLICFREGNTRRRVMRFVRRAFSGTDISPRDYLTRVTERIDFLKQKVYAWANRIRRYKRRVERYTQNRIFQNNERWVYRAWERPDQGVTDTRLPDDEAMLSFWRNIWSVPISHTEGDWTREVERACDSIPEMGAINISPQDVARAVRPLPNWKSPGPDGLHNFWIKWLTRSHARLASQFQSALESRSLPQFFTTGITHLLHKSGSTADPKNYRPITCLPTVYKVLTSILRAKINDHIESNSIMSTSQNGCRSGARGTKELLLIDVAISQQVRRSRKDLSTCWIDYKKAYDSVPHTWLMRVLELYKVDAVLRAFLMSCMGQWRTVLHYPGCRQTQANSEPIRIERGIFQGDSLSPLWFCLALNPLSTLLEGSGQGYRLRRGGQVISHLLYMDDLKLFAPNNLQLMKLLKVTETFSSDISMEFGVDKCAVMHVKRGEIMESVGTQLSDSIHLRSLCSTETYKYLGMSEALGINATSVKQSLKERFFGRLNKVLNSLLSGGNKVRAFNGWVMPVLMYSFGILKWTQTELDALDRRVRSLLTANRMHHPRSSVMRLYIPRKCGGRGFLNAKTLHNREVCSLREYFLEADVGMHRDVVAVDKGFTPLSLANENWRKPVVLDTNDRREVWQSKELHGRFYRVLHGPDVDFLASVAWLRFGDLFGETEGFICAITDEVMMTNNYRKYIVKDGTVDICRACHRPGESIRHIISGCSSLANGDYLHRHNLVARIIHQQLALKYNLVESEVPYYRYAPDPVLENGNCTLYWDRSIITDRTIVANKPDIVVIDRLERRAMIVDIAVPHDENLVKAEKDKQSKYLDLAREVVDMWDVNTAVIVPIVVTANGIIAKSLDQHLKRLSLGSWIKGLIQKAVLLDTARIVRRFLSREP

SEQ ID NO: 11684 - protein, 1197 aa, Hecatera dysodea
MLTRAAARRARLPPPASSLSSASPPPEPSPTVSAATPAVAVASSSSDEYFSPPTSPPPARRRRGRRPPDGLGPRGPPASDRVPAPGGSVQRMRWTQTINENVMRSYYGATEGGTNLTAYRGRMLSLFQVLEPAVNVSAQRLSDQVRVILRNRMLDDSVLDRLRMEICSSHVITPSPQTVAQPQLIQIPSHGDEESDDRVTNVSTQCNEELRSALESAIREFRYVSPELRPRIPRLPMHNKNRALVAALDSQLSNYFDNCEDLTDAHSIMYCAAVAACRVAHVKMPNDRVTRPKPAIPAWQCRIERRIGGARALIGKLICFREGNTRPRVMRFVRRAFSGTEISPLDYLSRVTERIDFLKQKVYAWANRIRRYKRRVERYTQNRTFRSNERWVYKAWERPDQGVTDTRLPDDDAMCSFWRNIWSAPVSHTEGDWIREVERACDPLPDMGAIIISPQDVARAVRPLPNWKSPGPDGLHTFWIKWLHSSHACLAFLYQASLESGSLPEFLMTGITHLLHKSGSTAEPKNYRPITCLPTVYKVLTSILRDKINQHINSNNIMSSSQNGCRNGSRGTKELLLIDIAISQQVRRSRKDLSTCWIDYKKAYDSVPHTWLLRVLELYKIDATLRTFLMSCMGQWRTVLRYPGCRHVQRNSEPIRIERGIFQGDSLSPLWFCLALNPLSTLLGNSGLGYRLKRGGQVISHLLYMDDLKLFAPTNLQLMELLKVTETFSNAIRMEFGVDKCAIMHVKRGEIMESVGSQLSDSINLRCLSSTETYKYLGMSEALGINVTDMKQSLKERFFGRLKKVFNSLLSGGNKVRAFNGWVMPVLMYSFGVLKWTQTELDALDRRVRTLLTAYRMHHPRSSVMRLYIPRKCGGRGFLNAKTLHNREICSLRGYFLAVEVGMHRDVVAVDKGLTPLSLANENWLKPAVLDTNDRRAVWQSKELHGRFFRALHGPDVDQLASVAWLRFGDLFGETEGFVCAIMDEVIMTNNYRRFIVKDGTVDICRACHRPGESIRHIVSGCSRLANGEYLHRHNLVARIIHQQLALKYSLVNSEVPYYRYVPDPVLDNGNITLYWDRSIITDRTIVANKPDIVVVDRIERRTMIVDITVPHDENLVKAEKDKQIKYLDLAREVVDMWDVDSAIIVPIVVSANGLIAKSLDQHLRRLSLGSWIKGLIQKAVLLDTARIVRRFLSLEP

SEQ ID NO: 11685 - protein, 1085 aa, Mythimna impura
MTAYRVRMLSLFQVLEPAVNVSAQRLSDQVRVIQRNHMLDDTVLDRLRTEMGSHAIASSSQTAVPSQVLASNHLPNHADEESTDMVTHVSTQCSNELRSALECAIREYRNMPLELRPRLPRLPMCNKNKALVAALDSQLSNYFDDCEDLTDTHSIMYCAAVAACRVAHVKFPNSDVATRPKPAVPAWQCRIERRIGGARALIGKLICFREGNTRPRVMRFVRRAFSGTDISPRDYMSCVTERIDFLKQKVYAWANRIRRYKRRVERYTQNRTFRSNERWVYRAWEQPDQGVTDTRLPDDDAMSSFWRNIWSVPVSHTEGGWTREVERACEPIPEMGAITISPQDVARAVRPLPNWKSPGPDGLHNFWIKWLQRSHARLASQYQTALESGSLPEFLTTGVTHLLHKSGSTAEPKNYRPITCLPTVYKVLTSILRAKINHHVDNNDIMSASQNGCRNGSRGTKELLLIDMAISQQVRRSRKDLSTCWIDYKKAYDSVPHTWLMRVLELYKIDTTLRTFLMSCMRQWRTVLRYPGCRHIQRNSEPVRIERGIFQGDSLSPLWFCLALNPLSTLLENSGLGYRLKRGGQVISHLLYMDDLKLFAPNHLQLMELLKVTETFSSAIRMEFGVDKCAVMHVKRGEIVESVGTQLSDSINLRSLSPTETYKYLGMSEALGINATDMKQTLRERFFGRLKKVFNSLLSGGNKVRAFNGWVMPVLMYSFGVLKWTQTELDALDRRVRTLLTAYRMHHPRSSVMRLYIPRKCGGRGFLNAKTLHNREVCSLREYFLTADVGMRRDVVAVDKGLTPLSLANESWRKPVVLDTNDRREVWQSKELHGRFFRALHGPDVDQLASVAWLRVGDLFGETEGFVCAIMDEVIMTNNYRRFIVKDGTVDICRACHRPGESIRHIISGCSRLANGEYLHRHNLVARIIHQQLALNYSLVESEVPYYRYVPDPVLDNGDITLYWDRSIITDRTIVANKPDIVVVDRRERRTMIVDISVPHDENLVKAEKDKQIKYIDLAREVVDMWDVDSAIIVPIVVSANGLIAKSLDQHLRRLALGGWIKGLIQKAVLLDTARIVRRFLSLEP

SEQ ID NO: 11686 - protein, 1200 aa, Mythimna impura
MLTRSRAQKLHTHPTSSGSSLSSASQPPGPAPTVSPEIPVAAVASSSSDEYFSLPTTPPPARRRGRGRPPASLGPRGPPASDRVPAAGGSVQRMRWTSSINENVMRSYFGATEGGINLTAYRSRMLSLFQVLEPAVNVSVQRLSDQVRVIQRNRMLDDAVLDRLRLESQSSRVSPATTPAAVQRLPTASPRPVQVGDADDDAAISVSTQCNDRLRGALEDAFREYRSTPPGLRPRLPRLPMHKRNRALVCALDSQLSNCFDSSKDLTDTHSILYCAAVAACRVAHVKFPNCDRATRPAVPAWQCRIEHRIGEARALIGKLICFREGNTRPRVMRFVRRAFSGTDISPRDYLPCVTERIDFLKQKIYAWANRIRRYKRRVERYTRNRTFQSNERWVYRDWERSDQGVTDTRLPDDDAMCSFWRSIWSAPVSHTEGDWIREVERACDLLPEMGAITISPQDVARAVRPLPNWKSPGPDGLHNFWVKWFQRSHARLASQFQSALESGSLPQFLTTGITHLLHKSGSTAEPKNYRPITCLPTVYKVLTSILRAKINSHIETNSIMSASQNGCRNGSRGTKELLLIDIAISQQVRRSRKNLSACWIDYKKAYDSVPHTWLMRVLELYKVDATLRTFLMSCMGQWRTVLHYPGCRQIQENNEPIRIERGIFQGDSLSPLWFCLALNPLSTLLEGSGLGYRLKRGGQVISHLLYMDDLKLFAPNNLQLVELLKVTETFSSAIRMEFGVDKCAVIHVKRGEIMESVGIQLSDSIHLRSLCSTETYKYLGMSESLGINTDDVKQSLKERFFGRLNKVLNSLLSGGNKVRAFNGWVMPVLMYSFGILKWTQTELDALDRRVRTLLTANRMHHPRSSVMRLYIPRKCGGRGFLNAKTLHNREVCSLREYFLKTDVGMHRDVVAVDKGLTPLSLANENWRKPIVLDTNDRREVWQSKELHGRFYRALHGPDVDLLASVSWLRFGDLFGETEGFVFAIMDEVMMTNNYRKYIVKDGTVDICRACHRPGESIRHIISGCSHLANGDYLHRHNLVARIIHQQLALKYNLVESEVPYYRYVPDPVLDNGNITLYWDRSIITDRTIVANKPDIVVIDRLERRTMIVDIAVPHDENLVKAEKDKQTKYLDLAREVVDMWEVDKAIIVPIVVTANGLIAKSLEQHLRRLSLGSWIKGLIQKAVLLDTARIVRRFLSQEP

SEQ ID NO: 11687 - protein, 1200 aa, Mythimna impura
MLTRAAARRARPPPPASSLSSASPPPESSLTVSAVTPAVAVASSSSDEYFSPPTSPPPARRRRGRRPPSGLGPRGPPVSDRVPAPGGSVQRMRWTQSINENVMRAYYGATEGGNNLTAYRVRMLSLFQVFEPAVNVSAQRLSDQVRVIQRNHMLDDTVLDRLRTEMSNHAIAPSSQSVVPVMVPPSYHLSDHADEAITDMVTHVSTQCNNELRSALECAIREYRNMPLELRPRLPRLPMHNKNKALVAALDLQLSNYFDDCKDLTDTHSIMYCAAVAACRVAHVKFPNCDVATRPKPAVPAWQCRIERRIGGARALIGKLICFREGNTRPRVMRFVRRAFSGTDISPRDYMSRVTERIDFLKQKVYAWANRIRRYKRRVERYTQNRTFRSNERWVYRAWERPDQGVTDACLPDDDAMSSFWRSIWSVPVSHTEGDWTREVERACDPIPQMGAIDISPQDVARAVRPLPNWKSPGPDGLHNFWIKWFTRSHARLAYQFQSALESGSLPQFLTTGITHLLHKSGSTAEPKNYRPITCLPTVYKVLTSILRSKINSHIDKNLIMSPSQNGCRNGSRGTKELLLIDMTISQQVRRSRKDLSTCWIDYKKAYDSVPHTWLMRVLELYKIDTTLRTFLMSCMRQWSTVLRYPGCRHTQRNSEPVRIERGIFQGDSLSPLWFCLALNPLSTLLENSGLGYRLKRGGQVISHLLYMDDLKLFAPNNLQLMELLKVTETFSSAIRMEFGVDKCAVMHVKRGEVVESVGTQLTDSKNLRSLSPTETYKYLGMSEALGINITDMKQSLKERFFGRLKKVLNSLLSGGNKVRAFNGWVMPVLMYSFGVLKWTQTELDALDRRVRTLLTAYRMHHPRSSVMRLYIPRKCGGRGFLNAKTLHNREVCSLREYFLAADVGMHRDVVAVDKGLTPLSLANENWRKPVVLDTNDRREVWQSKKLHGRFFRALHGPNVDQLASVAWLRFGDLFGETEGFVCAIMDEVIMTNNYRRFIVKDGTVDICRACHRPGESIRHIISGCSRLANGEYLHRHNLVARIIHQQLALKYSLVESEVPYYRYEPDPVLDNGHITLYWDRSIITDRTIVANKPDIVMVDRSERRAMIVDISVPHDENLVKAEKDKQIKYIDLAREVVDMWDVDSAIIVPIVVSANGLIAKSLDQHLRRLALGGWIKGLIQKVVLLDTARIVRRFLSLEP

SEQ ID NO: 11688 - protein, 1081 aa, Mythimna impura
MLSLFQDLEPTVNVSAQRLSDQVRFIQRNHRLDDAALDRLRSEVLSNQIVSTSIQTQTAATPTTNAISPRSILNNDDADERVVTVSSQCNDELRSALEDALREYRLTPTELRPRLPRLPMHKKNRALVCTLDSLLKNIFESSENLVDTHSILYCGAVAACRLANIKFPNTDGTIRPKPAVPAWQYRIERRIDGARVLIGKLHSFREGNTRPRVMRFVRRAFLGTSISPQEYMSRVTERIDFLKQKVCAWASRIRRYKRRVDRYSQNRIFQSDERWVYRAWERPEQNVIDGLRPDDFATITFWRNIWSVPVSHTEGGWIREVERVCEAIPEMEKITISPADVAKAVRPLPNWKSPGPDGLQNFWLKWYRNSHAPLASQFQSTLESGSLPEYLTTGVTHLLHKTGNPAEPKNYRPITCLSTVYKLLTSILREKINRHIENNSIMSASQNGCRNGSRGTKELLLIDMAVSQQARRSRKDLSTCWIDYKKAYDSVPHTWLMRVLELYKIDTTLRTFLESCMRQWKTVLRYPGCRPIQGDDEPIRIKRGIFQGDSLSPLWFCLALNPLSTLLEDSGLGYRLRRGGQAISHLLYMDDLKLFAPSNLQLMELLKVTETFSSAIRMEFGVDKCAAMHVKQGEIMESEGIQLPDSIHLKSLSSTETYRYLGMSEALGINNADMKQSLKERFFGRLKKVLNSLLSGGNKVRAFNGWVMPVLMYSFGILKWTQTELDALDRRVRTLLTANRMHHPRSSVMRLYISRKCGGRGFLNAKTLHNREVCSLREYFLKTDVGMHRDVVAVDKGLTPLSMAKEDWRKPVVLTTDDRKEVWKGKELHGRFYRALHEPDVDFLASVAWLRFSDLFGETEGFVCAIMDEVILTNNYRKYIMKDGTVDVCRACHRPGESIRHIISGCSRLANGEYLHRHNQVARIIHQQLALKYNLVDSEVPYYKYVPDPVLENDHVTLYWDRSIITDRTIVANKPDIVVIDRLARRAIIVDVTIPHDENLVKAEKEKQIKYLDLAHEVVGMWNMDSAVIVPIVVTANGLIAKSFDDHLSKLSLRGWIKGLIQKAVLLDTARIVRRFLSLEP

SEQ ID NO: 11689 - protein, 1200 aa, Mythimna impura
MLTRAAARRARPPPPALSLSSASPPPESSPTVSAVTPAVAVASSSSDEYFSPPTSPPPARRRRGRRPPSGLGPRGPPASDRVPAPGGSVQRMRWTQSINENVMRAYYGATEGGNNLTAYRVRMLSLFQVLEPAVNVSAQRLSDQVRVIQRNHMLDDTVLDRLRTEMSNHAIAPSSQSVVPVMVPPSYHLSDHADEEITDMVTHVSTQCNNELRSALECAIREYRNMTLELRPRLPRLPMHNKNKALVAALDLQLSNYFDDCKDLTDTHSIMYCAAVAACRVAHVKFPNCDVATRPKPAVPAWQCRIERRIGGARALIGKLICFREGNTRPRVMRFVRRAFSGTDISPRDYMSRVTERIDFLKQKVYAWANRIRRYKRRVERYTQNRTFRSNERWVYRAWERPDQGVTDACLPDDDAMSSFWRSIWSVPVSHTEGDWTREVERACDPIPQMGAIDISPQDVARAVCPLPNWKSPGPDGLHNFWIKWFTRSHARLAYQFQSALESGSLPQFLTTGITHLLHKSGSTAEPKNYRPITCLPTVYKVLTSILRSKINSHIDKNLIMSPSQNGCRNGSRGTKELLLIDMTISQQVRRSRKDLSTCWIDYKKAYDSVPHTWLMRVLELYKIDTTLRTFLMSCMRQWSTVLRYPGCRHTQRNSEPVRIERGIFQGDSLSPLWFCLALNPLSTLLENSGLGYRLKRGGQVISHLLYMDDLKLFARNNLQLMELLKVTETFSSAIRMEFGVDKCAVMHVKRGEVVESVGTQLTDSINLRSLSPTETYKYLGMSEALGINITDMKQSLKERFFGRLKKVLNSLLSGGNKVRAFNGWVMPVLMYSFGVLKWTQTELDALDRRVRTLLTAYRMHHPRSSVMRLYIPRKCGGRGFLNAKTLHNREVCSLREYFLAADVGMHRDVVAVDKGLTPLSLANENWRKPVVLDTNDRREVWQSKELHGRFFRALHGPDVDQLASVAWLRFGDLFGETEGFVCAIMDEVIMTNNYRRFIVKDGTVDICRACHRPGESIRHIISGCSRLANGEYLHRHNLVARIIHQQLALKYSLVELEVPYYRYEPDPVLDNGHITLYWDRSIITDRTIVANKPDIVMVDRSERRAMIVDISVPHDENLVKAEKDKQIKYIDLAREVVDMRDVDSAIIVPIVVSANGLIAKSLDQHLRRLALGGWIKGLIQKVVLLDTARIVRRFLSLEP

SEQ ID NO: 11690 - protein, 1200 aa, Mythimna impura
MLTRAAARRARPPPPASSLSSASPPPESSPTVSAVTPAVAVASSSSDEYFSPPTSPPPARRRRGRRPPSGLGLRGPPVSDRVPAPGGSVQRMRWTQSINENVMRAYYGATEGGNSLTAYRVRMLSLFQVLEPSVNVSAQRLSDQVRVIQRNHMLDDTVLDRLRTEMSNHAIAPSSQSVVPVMVPPSYHLSDHADEAITDMVTHVSTQCNNELRSALECAIREYRNMPLELRPRLPRLPMHNKNKALVAALDLQLSNYFDDCKDLTDTHSIMYCAAVAACRVAHVKFPNCDVATRPKPAVPAWQCRIERRIGGARALIGKLICFREGNTRPRVMRFVRRAFSGTDISPRDYMSRVTERIDFLKQKVYAWANRIRRYKRRVERYTQNRTFRSNERWVYRAWERPDQGVTDACLPDDDAMSSFWRSIWSVPVSHTEGDWTREVERACDPIPQMGAIDISPQDVARAVRPLPNWKSPGPDGLHNFWIKWFTRSHARLAYQFQSALESGSLPQFLTTGITHLLHKSGSTAEPKNYRPITCLPTVYKVLTSILRSKINSHIDKNLIMSPSQNGCRNGSRGTKELLLIDMAISQQVRRSRKDLSTCWIDYKKAYDSVPHTWLMRVLELYKIDTTLRTFLMSCMRQWSTVLRYPGCRHTQRNSEPVRIERGIFQGDSLSPLWFCLALNPLSTLLENSGLGYRLKRGGQVISHLLYMDDLKLFAPNNLQLMELLKVTETFSSAIRMEFGVDKCAVMHVKRGEVVESVGTQLTDSINLRSLSPTETYKYLGMSEALGINITDMKQSLKERFFGRLKKVLNSLLSGGNKVRAFNGWVMPVLMYSFGVLKWTQTELDALDRRVRTLLTAYRMHHPRSSVMRLYIPRKCGGRGFLNAKTLHNREVCSLREYFLAADVGMHRDVVAVDKGLTPLSLANENWRKPVVLDTNDRREVWQSKELHGRFFRALHGPDVDQLASVAWLRFGDLFGETEGFVCAIMDEVIMTNNYRRFIVKDGTVDICRACHRPGESIRHIISGCSRLANGEYLHRHNLVARIIHQQLALKYSLVESEVPYYRYEPDPVLDNGHITLYWDRSIITDRTIVANKPDIVMVDRSERRAMIVDISVPHDENLVKAEKDKQIKYIDLAREVVDMWDVDSAIIVPIVVSANGLIAKSLDQHLRRLALGGWIKGLIQKVVLLDTARIVRRFLSLEP

SEQ ID NO: 11691 - protein, 1200 aa, Mythimna impura
MLTRSRAREQETHPTSSGSSLSSASQPPGSAPAVSPVIPAAAVASSSSDEYFSPPTTPPPARRRGRGRPPASLRPRGPPASDRVPAAGGSVQRMRWTQSINENVMRSYFGATEGGSNLTAYRGRMLSLFQVLEPTVNVSAQRLSDQVRVIQRNRMLDDAVLDRLRSESQRSRASSATPPAAVQLQPSALPRPDHVGDADDDAAISVSTQCNERLRSALEDAFREYRSTPPGLRPRLPRLPMHKRNRALVCALDSQLSNCFDSSKDLADTHSILYCAAAAACRVAHVKFPNCDRATRPAVPAWQRRIERRIGEARALIGKLICFREGNTRPRVMRFVRRAFLGTDISPQNYLPCVTERIDFLKQKVYAWASRIRRYKRRVERYTQNRTFQSNERWVYRTWERPDQDVTDTRLPDDDAMCSFWRRIWSVPVSHIEGDWIREVERTCDLLPEMGAITISPQDVARAVRPLPNWKSPGPDGLHNFWIKWFQGSHARLASQFQSALESGSLPEFLTTGITHLLHKSGSTADPKNYRPITCLPTVYKVLTSILRAKINTHIETNSIMSASQNGCRNGSRGTKELLLIDMAISQQVRRSRKDLSTCWIDYKKAYDSVPHTWLMRVLELYKVDTTLRTFLMSCMRQWRTVLHYPGCRQIRENSEPIRIERGIFQGDSLSPLWFCLALNPLSTLLEGSGLGYRLKRGGQVISHLLYMDDLKLFAPNNLHLMELLKVTETFSSAIRMEFGVDKCAVMHVKRGEIMESVGTQLSDSIYLRSLCSTETYKYLGMSEALGINAADMKQSLKERFFGRLNRVLKSLLSGGNKVRAFNGWVMPVLMYSFGILKWTQTELDALDRRVRTLLTANRMHHPRSSVMRLYIPRKCGGRGFLNAKTLHNREVCSLREYFLETDVGMHRDVVAVDKGLTPLSLANGNWRKPIILDTNDRREVWQSKELHGRFYRALHGPDVDLLASVSWLRFGDLFGETEGFVCAIMDEVVMTNNYRKYIVKDGTADICRACHRPGESIRHIISGCSHLANGDYLHRHNLVARIIHQQLALKYNLVESEVPYYKYVPDPVLDNGSITLYWDRSIITDRTIVANKPDIVVIDRLERRTVIVDIAVPHDDNLVKAEKDKQTKYLDLAREVVDMWEVDTAVIVPIVVTANGLISKSLDQHLRRLSLGSWIKGLIQKAVLLDTARIVRRFLSQEP

SEQ ID NO: 11692 - protein, 1201 aa, Mythimna impura
MLTRAAARRARPPPPASSLSSALPPPEPCLTVSAVTPAVAAASSSSDEFYSPPTTPPPTRRRGERRPPACLGSRGPPASDRVPATGGCVSRMRWTQSINENVMRAYYYGATEGGNNLTAYRVRMLSLFQVLEPAVNVSAQRLSDQVRVIQRNHMLDDTVLDRLRTEMGSHAIASSSQTVVPSQVSPPNHLSNHADEESTDMVTHVSTQCSNELRSALECAIREYRNMPLELRPRLPRLPMCNKNKALVAALDSQLSNYFDDCEDLTDTHSIMYCAAVAACRVAHVKFPNSDVATRPKPAVPAWQCRIERRIGGARALIGKLICFREGNTRPRVMRFVRRAFSGTDISPRDYMSCATERIDFLKQKVYAWANRIRRYKRRVERYTQNRTFRSNERWVYRAWEQPDQGVADMRLPDDDAMSSFWRNIWSVPVSHTEGGWTREVERACEPIPEMGAITISPQDVARAVRPLPNWKSPGPDGLHNFWIKWLQRSHARLASQYQTALESGSLPEFLTTGVTHLLHKSGSTAEPKNYRPITCLPTVYKVLTSILRAKINHHVDNNAIMSASQNGCRNGSRGTKELLLIDMAISQQVRRSRKDLSTCWIDYKKAYDSVPHTWLMRVLELYKIDATLRTFLMSCMRQWRTVLRYPGCRHIQRNSEPVRIERGIFQGDSLSPLWFCLALNPLSTLLENSGLGYRLKRDGQVISHLLYMDDLKLFAPNNLQLMELLKVTETFSSAIRMEFGVDKCAVMHVKRGEIVESVGTQLSDSINLRSLSPTETYKYLGMSEALGINATDMKQTLRERFFGRLKKVFNSLLSGGNKVRAFNGWVMPVLMYSFGVLKWTQTELDALDRRVRTLLTAYRMHHPRSSVMRLYIPRKCGGRGFLNAKTLHNREVCSLREYFLTADVGMHRDVVAVDKGLTPLSLANESWRKPVVLDTNDRREVWQSKELHGRYFRALHGPDVDQLASVAWLRVGDLFGETEGFVCAIMDEVIMTNNYRRFIVKDGTVDICRACHRPGESIRHIISGCSRLANGEYLHRHNLVARIIHQQLALNYSLVESEVPYYRYVPDPVLDNGDITLYWDRSIITDRTIVANKPDIVVVDRRERRTMIVDISVPHDENLVKAEKDKQIKYIDLAREVVDMWDVDSVIIVPIVVSANGLIAKSLDQHLRRLALGGWIKGLIQKAVLLDTARIVRRFLSLEP

SEQ ID NO: 11693 - protein, 1200 aa, Mythimna impura
MLTRSRAQKLHTHPTSSGSSLSSASQPPGPAPTVSPEIPVAAVASSSSDEYFSPPTTPPPARRRGRGRPPASLGPRGPPASDRVPAAGGSVQRMRWTSSINENVMRSYFGATEGGINLTAYRGRMLSLFQVLEPAVNVSVQRLSDQVRVIQRNRMLDDAVLDRLRLESQSSRVSPATTSVAVQRLPTASPRPVQVGDADDDAAISVSTQCNDRLRGALEDAFREYRSIPPGLRPRLPRLPMHKRNRALVCALDSQLSNCFDSSKDLTDTHSILYCAAVAACRVAHVKFPNCDRATRPAVPAWQCRIEHRIGEARALIGKLICFREGNTRPRVMRFVRRAFSGTDISPRDYLPCVTERIDFLKQKIYAWANRIRRYKRRVERYTRNRTFQSNERWVYRDWERSDQGVTDTRLPDDDAMCSFWRSIWSAPVSHTEGDWIREVERACDLLPEMGAITISPQDVARAVRPLPNWKSPGPDGLHNFWVKWFQRSHARLASQFQSALESGSLPQFLTTGITHLLHKSGSTAEPKNYRPITCLPTVYKVLTSILRAKINSHIETNSIMSASQNGCRNGSRGTKELLLIDIAINQQVRRSRKNLSACWIDYKKAYDSVPHTWLMRVLELYKVDATLRTFLMSCMGQWRTVLHYPGCRQIQENNEPIRIERGIFQGDSLSPLWFCLALNPLSTLLEGSGLGYRLKRGGQVISHLLYMDDLKLFAPNNLQLEELLKVTETFSSAIRMEFGVDKCAVIHVKRGEIMESVGIQLSDSIHLRSLCSTETYKYLGMSESLGINTDDVKQSLKERFFGRLNKVLNSLLSGGNKVRAFNGWVMPVLMYSFGILKWTQTELDALDRRVRTLLTANRMHHPRSSVMRLYIPRKCGGRGFLNAKTLHNREVCSLREYFLKTDVGMHRDVVAVDKGLTPLSLANENWRKPIVLDTNDRREVWQSKELHGRFYRALHGPDVDLLASVSWLRFGDLFGETEGFVFAIMDEVMMTNNYRKYIVKDGTVDICRACHRPGESIRHIISGCSHLANGDYLHRHNLVARIIHQQLALKYNLVESEVPYYRYVPDPVLDNGNITLYWDRSIITDRTIVANKPDIVVIDRLERRTMIVDIAVPHDENLVKAEKDKQTKYLDLAREVVDMWEVDRAIIVPIVVTANGLIAKSLEQHLRRLSLGSWIKGLIQKAVLLDTARIVRRFLSQEP

SEQ ID NO: 11694 - protein, 1140 aa, Mythimna impura
MLTRAAARRARLPPPASSLSSASPPPESSPTVSAVTPAVAVASSSSDEYFSPPTSPPPARRRRGRRPPSGLGPRGPPASDRVPAPGGSVQRMRWTQSINENVMRAYYGATEGGNNLTAYRVRMLSLFQVLEPAVNVSAQRLSDQVRVIQRNHMLDDTVLDRLRTEMSNHAIAPSSQPVAPVMVPPSYHLSDHADEEITDMVTHVSTQCNNELRSALECAIREYRNMPLELRPRLPRLPMHNKNKALVAALDLQLSNYFDDCEDLTDTHSIMYCAAVAACRVAHVKFPSCDVSTRPKPAVPAWQCRIERRIGGARALIGKLICFREGNTRPRVMRFVRRAFSGTDISPRDYMSRVTERIDFLKQKVYAWANRIRRYKRRVERYTQNRTFRSNERWVYRAWERPDQGVTDTRLPDDDAMSSFWRSIWSVPVSHTEGDWTREVERACDPIPQMGAIDISPQDVARAVRPLPNWKSPGPDGLHNFWIKWFTRSHARLAYQFQSALESGSLPQFLTTGITHLLHKSGSTAEPKNYRPITCLPTVYKVLTSILRSKINSHIDKNLIMSPSQNGCRNGSRGTKELLLIDMTISQQVRRFRKDLSTCWIDYKKAYDSVPHTWLMRVLELYKIDTTLRTFLMSCMRQWSTVLRYPGCRHIQRNSEPVRIERGIFQGDSLSPLWFCLALNPLSTLLENSGLGYRLKRGGQVISHLLYMDDLKLFAPNNLQLMELLKVTETFSSAIRMEFGVDKCAVMHVKRGEVVESVGTQLTDSINLRSLSPTETYKYLGMSEALGINITDMKQSLKERFFGRLKKVFNSLLSGGNKVRAFNGWVMPVLMYSFGVLKWTQTELDALDRRVRTLLTAYRMHHPRSSVMRLYIPRKCGGRGFLNAKTLHNREVCSLREYFLATDVGMHRDVVTVDKGLTPLSLANENWRKPVVLDTNDRREVWQSKELHGRFFRAFHGPDVDQLASVAWLRFGDLFGETEGFVCAIMDEVIMTNNYRRFIVKDGTVDICRACHRPGESIRHIISGCSRLANGEYLHRHNLVARIVHQQLALKYSLVESEVPYYRYEPDPVLDNGHITLYWDRSIITDRTIVANKPDIVVVDRSERRAMIVDISVPHDENLVKAEKDKQSINQSINHLFCKT

SEQ ID NO: 11695 - protein, 1202 aa, Phlogophora meticulosa
MLTRSRARVLNAPKTSSGSSLSSASQLPGPAPDVSPVTPAAAVVSSSSDEYYSPPTSPPPVRRCGRGRPPASLGLRGTPASARVPASGGSVQRMRWTQSINENVMRSYYGATEGGTNLTAYRGRMLSLFQVLEPAVNVSAQRLSDQVRVIQRNHMLDDTVLDRLRLNSRSIRVMPASPLVAVQLPTLPIVSPRPDYVGEEDDDAAISVSSQCNVRLRSALEDAFREYRSTPPGLRQRLPRLPMHKKNKALMCTLDSLLSNSFDNSKDLADTHSILYCTAAAACRVANVKFPNSKKATRPAIPAWQCRIERRIGEARVLIGKLICFREGNTRPRVMRFVRRAFSGTDISSRDYLTRVTERIDFLKQKICAWANRIRRYKRRVERYTQNRTFRSDERWVYRAWERPDQGVIDTCLPDDEAMYSFWRSIWSVPVSHTEGDWTREVERACEPLPVMGTINISPQDVACAVRPLPNWKSPGPDGLHNFWIKWLKSSHARLATQFQSALESGSLPQFLTTGITHLLHKSGSTAEPKNYRPITCLPTVYKVLTSILRSKINNHIETSLIMSVSQNGCKNGSRGTKELLLIDMAISQQVRRSRKDLSTCWIDYKKAYDSVPHTWLMRVLELYKIDTTLRTFLTSCMRQWRTVLHYPGCRQFRENSEPIRIERGIFQGDSLSPLWFCLALNPLSTLLEGSGLGYRLRRGAQVISHLLYMDDLKLFAPNNLQLMELLKVTETFSSAIRMDFGVDKCAVMHVKRGGIVESAGTQLSDSIYLRSLSSTETYKYLGMSEALGINAADMKQSLKERFFGRLNKVLNSLLSGGNKVRAFNGWVMPVLMYSFGILKWTQTELDALDRRVRTLLTANRMHHPRSSVMRLYISRKCGGRGFLNAKTLHNREVCSLREYFIEADVGMHRDVVAVDKGLTPLSLANENWRKPIVLDTTDRMEIWKNKELHGRFYRVLHGPDVDLLASISWLRFGDLFGETEGFVCAIMDEVIMTNNYRKYIVKDGTVDICRACHRPGESIRHIISGCSRLANGEYLHRHNLVARIIHQQLALKYNLVELEVPYYKYVPDPVLENGNITLYWDRSIITDRTIVANKPDIVVIDRSERRTMIVDITVPHDENLVKAEQEKQMKYLDLAREVVDMWDVNTAVIVPIVVTANGIIAKSLDQHLRRLSLGSWIKGLIQKAVLLETARIVRRFLSQEP

SEQ ID NO: 11696 - protein, 1048 aa, Phlogophora meticulosa
MLDDVVLDRLRLNSRIYHVTPALPPVAVQLQSLPSVSPRPDYVGEEDDDAAISVSSQCNVRLRSALEDAFREYRSTPPELRSRLPRLPMHKKNKALMSALDSLLTKSFDNSKDLTDTHSILYCAAAAACRVANVKFPNTERATRPTVPAWQCRIQRRIDEARALIGKLICFREGNTRPRVMRFVRRAFSGTDISSRDYLTRVTERIDFLKQKICAWANRIRRYKRRVERYTQNRTFRSDERWVYRAWERSDQGVTDTCLPDDEAMCSFWRSIWSVPVSHTEGNWTREIERACEPLPEMGAINISPQDVASAVRPLPNWKSPGPDGLHNFWIKWLQSSHARLACQFQSALESGSLPKFLTTGITHLLHKSGSTAEPRNYRPITCLPTVYKVLTSILRSKINNHIDSNLIMSFSQNGCRNGSRGTKELLLIDTAISQQVRRSRKDLSTCWVDYKKAYDSVPHTWLMRVLELYKVDATLRTFLMSCMGQWRTVLRYPGCQQTRENSEPIRIERGIFQGDSLSPLWFCLALNPLSTLLEGSGLGYRLRTGGQVISHLLYMDDLKLFAPNNLQLMELLKVTETFSSAIRMDFGVDKCAVMHVKRGEIVESVGTQLSDSIYLRSLSSTETYKYLGMSEALGINATDMKQSLKERFFGRLNKVLNSLLSGGNKVRAFNGWVMPVLMYSFGILKWTQTELDALDRRVRTLLTANRMHHPRSSVMRLYIPRKCGGRGFLNAKTLHNREICSLREYFLKADVGMHRDVVAVDKTFTPLSLANKNWRKPIVLDTADRMEIWKSKELHGRFYRVLHGPDVDLVASISWLRFGDLFRETEGFVCAIMDEVIMTNNYRKYIVKDGMVDICRACHRPGESIRHIISGCSRLANGDYLHRHNLVARIIHQQLALKYNLVDLEVPYYKYVPDPVLENGSITLYWDRSIITDRTIVANKPDIVVIDRSERRTMIIDITVPHDENLVKAEKEKQMKYLDLAREVVDMWDVNTAVIVPIVVTANGIIAKSLDQHLKRLSLGSWIKGLIQKAVLLDTARIVRRFLSQEP

SEQ ID NO: 11697 - protein, 1198 aa, Phlogophora meticulosa
MLTRSAARRARPPPPASSLSSASSPPKPSTIVSTVKPAVPVASSSSDEYFSPPTSPPPARRRRGRRPPDGLGPRGPPASDRVPAPGGSVQRMRWTQSINENVMRSYYGATEGGSNLTAYRVRMLSLFQVLEPAVNVSAQRLSDQVRVIQRNHMLDDVVLDRLRTEMQSSRVITSPSHTVVPPQYNIVLSSFADGEGSDKVTNVSTQYNEELRSALEGAIREYRFMLPALRPRLPRLPMHNKNRALVAALDSQLSNYFDNCDDLTDAHSILYCAALAACRVAQVKFPYDIATRPKPAVPAWQCRIERRIAGARALIGKLVCYREGNTRPRVMRYVRRAFLGTDISPRDYMSRVTERIDFLKQKVYAWASRIRRYKRRVERYTQNRTFQSNERWVYRAWERPVQGVTDTHLPDDDVMCSFWRNIWSVPVSHTEGDWTREVERACDPIPQMGAITISPQDVARAVRPLPNWKSPGPDGLHNFWIKWLQKSHARLASQFQSALETGSLPQFLTTGITHLLHKSGSTAEPKNYRPITCLPTVYKVLTSILRVKINNHIDSNSIMSASQNGCRNGSRGTKELLLIDTAISQQVRRSRKDLSTCWIDYKKAYDSVPHTWLKRVLELYKVDATLRTFLTSCMGQWRTVLRYPGCRQIQRNSEPIRIERGIFQGDSLSPLWFCLALNPLSTLLEDSGLGYRLKRGGQVVSHLLYMDDLKLFAPSDLQLMELLTVTKTFSSAIRMEFGVDKCAVMHVKRGKIVESVGTQLPDFINFRALSPIETYKYLGMSEALGINAADMKQSLKERFFGRLKKVCNSLLSGGNKVRAFNGWVMPVLMYSFGILKWTQTELDALDRRVRTFLTASRMHHPRSSVMRLYIPRKCGGRGFLNAKTLHNREICSLRDYFLETDVGMHRDVVAVDQGLTPLSLAKENWRKPVVLDTNDRKEVWQSKELHGRFFQALHGPDVDQLASVSWLRFGDLFGETEGFVCAIMDEVIMTNNYRRFIVKDGTVDICRACHRPGESIRHIISGCSRLANEEYLHRHNLVARIIHQQLALKYSLVESEVPYYKYVPDPVLENGSVTLYWDRSIITDRTIVANKPYIVVMDRIERRATIIDVTVPHDGNLVKAEKDKQIKYLDLAREVVDMWDVDSAIVVPIVVSANGLIAKSLDQHLRRLALGSWIKGLIQKAVLLDTARIVRRFLSLEP

SEQ ID NO: 11698 - protein, 1198 aa, Phlogophora meticulosa
MLTRSAARRARPPPPASSLSSASSPPKPSTIVSTVKPAVPVASSSSDEYFSPPTSPPPARRRRGRRPPDGLGPRGPPASDRVPAPGGSVQRMRWTQSINENVMRSYYGATEGGSNLTAYRVRMLSLFQVLEPAVNVSAQRLSDQVRVIQRNHMLDDVVLDRLRTEMQSSRVITSPSHTVVPPQYNIVLSSFADGEGSDKVTNVSTQYNEELRSALEGAIREYRFMLPALRPRLPRLPMHNKNRALVAALDSQLSNYFDNCDDLTDAHSILYCAAVAACRVAHVKFPYDIATRPKPAVPAWQCRIERRIAGARALIGKLVCYREGNTRPRVMRYVRRAFLGTDISPRDYMSRVTERIDFLKQKVYAWASRIRRYKRRVERYTQNRTFQSNERWVYRAWERPVQGVTDTHLPEDDVMCSFWRNIWSVPVSHTEGDWTREVERACDPIPQMGAITISPQDVARAVRPLPNWKSPGPDGLHNFWIKWLQKSHARLASQFQSALETGSLPQFLTTGITHLLHKSGSTAEPKNYRPITCLPTVYKVLTSILRVKINNHIDSNSIMSASQNGCRNGSRGTKELLLIDSAISQQVRRSRKDLSTCWIDYKKAYDSVPHTWLKRVLELYKVDATLRTFLTSCMGQWRTVLRYPGCRQIQRNSEPIRIERGIFQGDSLSPLWFCLALNPLSTLLEDSGLGYRLKRGGQVVSHLLYMDDLKLFAPSDLQLMELLTVTKTFSSAIRMEFGVDKCAVMHVKRGKIVESVGTQLPDFINFRALSPIETYKYLGMSEALGINAADMKQSLKERFFGRLKKVCNSLLSGGNKVRAFNGWVMPVLMYSFGILKWTQTELDALDRRVRTFLTASRMHHPRSSVMRLYIPRKCGGRGFLNAKTLHNREICSLRDYFLETDVGMHRDVVAVDQGLTPLSLAKENWRKPVVLDTNDRKEVWQSKELHGRFFQALHGPDVDQLASVSWLRFGDLFGETEGFVCAIMDEVIMTNNYRRFIVKDGTVDICRACHRPGESIRHIISGCSRLANEEYLHRHNLVARIIHQQLALKYSLVESEVPYYKYVPDPVLENGSVTLYWDRSIITDRTIVANKPDIVVMDRIERRATIIDVTVPHDGNLVKAEKDKQIKYLDLAREVVDMWDVDSAIVVPIVVSANGLIAKSLDQHLRRLALGSWIKGLIQKAVLLDTARIVRRFLSLEP

SEQ ID NO: 11699 - protein, 1194 aa, Phlogophora meticulosa
MHLQHLRVRRSAPPPSCLASGLAPDVSPVTPAAAVASSSSDEYYSPPTSPPPVRRCGRGRPPASLGLQGPPASARVPASGGSVQRMRWTQSINENVMRSYYGATEGGINLTAYRGRMLSLFQVLEPAVNVSAQRLSDQVRVIHRNHMLDDAVLDRLRLNSRSNRVTPASPPVAVQLQNLPSVSPRPDYVGEEDDDAAISVSSQCNVRLRSALEDAFREYRSTPPGLRQRLPRLPMHKKNKALMCTLDSLLSNSFDSSRDLADTHSILYCAAVAACRVANVKFPNSVRSTRPAIPAWQCRIERRIGEARVLIGKLICFREGNTRPRVMRFVRRAFSGTDISSRDYLTRVTERIDFLKQKICAWANRIRRYKRRVERYTQNRTFRSDERWVYRTWERPDQGVTDTFLPDDEAMCLFWRSIWSVPVSHTEGDWTREVERTCEPLPEMGAINISPQDVACAVRPLPNWKSPGPDGLHNFWIKWLKSSHARLASQFQSALESGSLPQFLTTGITHLLHKSGSTAEPKNYRPITCLPTVYKVLTSILRSKINNHIDSTSIMSVSQNGCKNGSRGTKELLLIDMAISQQVRRSRKDLSTCWIDYKKAYDSVPHTWLMRVLELYKIDATLRTFLKSCMGQWRTVLHYPGCRQFQENSEPIRIERGIFQGDSLSPLWFCLALNPLSTLLEGSGLGYRLRRGGQVISHLLYMDDLKLFAHNNLQLMKLLKVTETFSSAIRMDFGVDKCAVMHVKRGGIVESAGTQLSDSIYLRSLSSTETYKYLGMSEALGINTADMKQSLKERFFGRLNKVLNSLLSGGNKVRAFNSWVMPVLMYSFGILKWTQTELDALDRRVRTLLTANRMHHPRSSVMRLYISRKCGGRGFLNAKTLHNREVCSLREYFLEADVGMHRDVVAMDKALTPLSLANENWRKPIVLDTTDRMEIWKSKELHGRFYRVLHGPDVDLSASVSWLRFGDLFGETEGFVCAIMDEVIMTNNYRKYIVMDGTVDICRACHRPGESIRHIISGCSRLANGDYLHRHNLVAKIIHQQLALKYNLVESEVPYYKYVPDPVLENGNITLYWDRSIITDRTIVANKPDIVVIDRLDRRTMIVDITVPHDENLVKAEKEKQIKYLDLAREVVDMWDVNTAVIVPIVVTANGIIAKSLDQHLRRLSLGSWIKGLIQKAVLLDTARIVRRFFSQEP

SEQ ID NO: 11700 - protein, 1201 aa, Xestia xanthographa
MLTRSAAARRARLPPPDSSLSSASPPPEPSPIVSAVTPAVAVASSSSDEYFSPPTTPPPARRRGGRRPPDGLGPRGPPASDRVPAPGGSVQRMRWTLSINENVMRAYYGATEGGNNLTAYRVRMLSLFQVLEPAVNVSAQRLSDQVRVIQRNRMLDDTVLDRLRTEIQSSHVIATPSQAVVPPQSSIIPNCDNDVGNDMVTNVSTQCNVEMRSALEGAIREYRFMQPDLRPRIPRLPMHNKNRALVAVLDSQLSNYFDNCEDLTDVHSILYCAAVAACRVAHVKFPSDRATRPKPAVPAWQYRIERRIGGARALIGKLVCFREGNTRPRVMRFVRQAFSGTDYGTCSPRDYMSRVTERIDFLKQKVYAWANRIRRYKRRVDRYTQNRTFQKDERWVYRAWERPDQGVADTHLPDDDAMCSFWRSIWSVPVSHAEGEWTRVIERACDPVSEMGAITISPQDVARAVRPLPNWKSPGPDGLHNFWIKWFTRSHARLATLFQSALESGSLPEFLTTGITHLLHKSGSTAEPKNYRPITCLPTVYKVLTSILRTKISKHIDDNSVMSASQNGCRNGSRGTKELLLIDMAISHQVRRSRKDLSTCWIDYKKAYDSVPHTWLMRVLELYKVDATLRTFLMSCMGQWRTVLRYPGCRQIQRNSEPIRIERGIFQGDSLSPLWFCLALNPLSTLLEDSGLGYRLRKDGQVISHLLYMDDLKLFAPNDLQLMELLKVTDTFSSAIRMEFGVDKCAVMHVKRGEIVESVGTQLSDSITLRSLSATETYKYLGMSEALGVNVADMKQSLKERFFGRLKKVFNSLLSGGNKVRAFNGWVMPVLMYSFGILKWTQTELDALDTKVRKLLTAYRMHHPRSSVMRLYIPRKCGGRGFLNAKTLHNREICSLREYFLGTDVGMHRDVVTVDKGLTPLSLAKENWRKPPVLDTNDRREVWQSKELHGRFFRALHGPDVDLPASVAWLRSGDLFGETEGFVCAIMDEVMMTNNYRKYIVKDGTVDICRACHRPGESIRHIISGCSSLANGEYLHRHNLVARIIHQQLALKYNLVESEVPYYKYAPDPVLDNGHITLYWDRPITTDRTVVANRPDIVVIDRLERRAMIVDITIPHDENLVKAEKDKQFKYLDLAREVVDMWDVGTAVIVPIVVSANGLIAKSLDQHLRRLSLGSWIKGLIQKAVLLDTARIVRRFPSQEP

SEQ ID NO: 11701 - protein, 1198 aa, Xestia xanthographa
MLTRSAAARRARLPPPDSSLSSASPPPEPSPIVSAVTPAVAVASSSSDEYFSPPTTPPPARRRGGRRPPDGLGPRGPPASDRVPAPGGSVQRMRWTQSINENVMRAYYGATEGGNNLTAYRVRMLSLFQVLEPAVNVSAQRLSDQVRVIQRNRMLDDTVLDRLRTEIQSSHVIATPSQAVVPPQSSIIPNCDNDVGNDMVTNVSTQCNVEMRSALEGAIREYRFMQPDLRPRIPRLPMHNKNRALVAVLDSQLSNYFDNCEDLTDVHSILYCAAVAACRVAHVKFPSDRATRPKPAVPAWQYRIERRIGGARALIGKLVCFREGNTRPRVMRFVRQAFSGTDISPRDYMSRVTERIDFLKQKVYAWANRIRRYKRRVDRYTQNRTFQKDERWVYRAWERPDQGVADTHLPDDDAMCSFWRSIWSVPVSHAEGEWTRVIERACDPVSEMGAITISPQDVARAVRPLPNWKSPGPDGLHNFWIKWFTRSHARLATLFQSALESGSLPEFLTTGITHLLHKSGSTAEPKNYRPITCLPTVYKVLTSILRTKISKHIDENSVMSASQNGCRNGSRGTKELLLIDMAISHQVRRSRKDLSTCWIDYKKAYDSVPHTWLMRVLELYKVDATLRTFLMSCMGQWRTVLRYPGCRQIQRNSEPIRIERGIFQGDSLSPLWFCLALNPLSTLLEDSGLGYRLRKDGQVISHLLYMDDLKLFAPNDLQLMELLKVTDTFSSAIRMEFGVDKCAVMHVKRGEIVESVGTQLSDSITLRSLSATETYKYLGMSEALGVNVADMKQSLKERFFGRLKKVFNSLLSGGNKVRAFNGWVMPVLMYSFGILKWTQTELDALDTKVRKLLTAYRMHHPRSSVMRLYIPRKCGGRGFLNAKTLHNREICSLREYFLGTDVGMHRDVVTVDKGLTPLSLAKENWRKPPVLDTNDRREVWQSKELHGRFFRALHGPDVDLPASVAWLRSGDLFGETEGFVCAIMDEVMMTNNYRRFIVKDGTVDICRACHRPGETIRHIISGCSRLANGEYLHRHNLVARIIHQQLALKYNLVESEVPYYRYVPDPVLDNGCITLYWDQSIITDRTIVANKPDIVVVDRSERRAMIVDITVPHDENLVKAEKDKQIKYLDLAREVVDMWEVDSAIIVPIVVSAHGLIAKSLDQYLRRLSLGSWIKGLIQKAVLLDTARIVRRFLSLEP

SEQ ID NO: 11702 - protein, 1205 aa, Cosmia trapezina
MLTRSRAQHLRNTHPTSSGSSLSSASQLPEPAPDVSQVIPAAAVASSSSDEYFSPPTTPPPVRRRGRGRPPASLGPRGPPASDRVPAPGGSVQRMRWTQTVNENVMRAYFGATEGGSNLTAYRGRMLSLFQVLEPAVNVSAQRLSDQVRVIQRNHMLDDVVLDRLRLESRNSRVTSDSPMVAVQLQNLPSASPRPDRVGEEDDSGAISVSSQCNVQLRSALEDAFREYRSTPPGLRPRLPRLPMHKKNKALVCALDSQLSNCFDGSKDLADTHSILYCAAVAACRVAHVKFHNNDRVTRPKPAVPTWQCRIERRIGEARALIGKLICFREGNTRPRVMRFVRRAFSGMDISPRDYLTCVTERIDFLKQKICAWANRIRRYRRRVERYTQNRTFQSDERWVYRAWERPDQGVADTQLPDDDAMCSFWRSIWSVPVSHTEGDWTREVERACDHIPQMGALTISPQDVARAVRPLPNWKSPGPDGLHNFWIKWFQRSHARLASQFQSALQSGSLPQFLTTGITHLLHKSGSTAEPRNYRPITCLPTVYKVLTSILRAKINKHIDTNSIMSASQNGCGNGSRGTKELLLIDMTISQQVRRSRKDLSTCWIDYKKAYDSVPHTWLMRVLELYKIDATLRTFLMSCMGQWRTVLRYPGCRNIQRNSEPIRIERGIFQGDSLSPLWFCLALNPLSTLLEDSGLGYRLRRGGQVISHLLYMDDLKLFAPNNLQLMELLKVTETFSSAIRMEFGVDKCAVMHVKRGEIVESVRTQLSDSIHLRSLSSLETYKYLGMSEALGINAADMKQSLKERFFGRLNKVLNSLLSGGNKVRAFNGWVMPVLMYSFGILKWTQTELDALDRRVRTLLTANRMHHPRSSVMRLYIPRKCGGRGFLNAKTLHNREVCSLREYFLEADVGMHREVVSVDKGLTPLSLANENWRKPIVLDTNDRREVWQSKELHGRFYRVLHGPDVDFLASVSWLRFGDLFGETEGFVFAIMDEVMMTNNYRKYIVKDGTVDICRACHRPGESIRHIISGCSRLANGDYLHRHNLVARIIHQQLAVKYSLVESEVPYYRYVPDPVLENGNITLYWDRSIITDRTIVANKPDIVVIDRLERRTVIVDIAVPHDENLVKAEKDKQIKYLDLAREVVDMWDVDTAIIVPIVVTANGIIAKSLDQHLRRLSLGGWIKGLIQKAVLLDTARIVRRFLSQQP

SEQ ID NO: 11703 - protein, 1205 aa, Cosmia trapezina
MLTRSRAQQLRNTQPTSSGSSLSSASQLPEPAPDVSQVIPAAAVASSSSDEYFSPPTTPPPVRRRGRGRPPASLGPRGPSASDRVPAPGGSVQRMRWTQTVNENVMRAYFGATEGGSNLTAYRGRMLSLFQVLEPAVNVSAQRLSDQVRVIQRNHMLDDVVLDRLRLESRNSHVTSVSPMVAVQLQNLPSASPLPDRVGEEDDGGAISVSSQCNVQLRSALEGAFREYRSTPPGLRPRLPRLPMHKKNKALVCALDSQLSNCFDDSKDLADTHSILYCAAVAACRVAHVKFPNSDRVPRPKPAVPAWQCRIERRIGEARALIGKLICFREGNTRPRVMRFVRRAFSGTDISPRDYFTCVTERIDFLKQKICAWANRIRRYRRRVERYTQNRTFQSDERWVYRAWERPDQGVADTQLPDDDAMCSFWRSIWSVPVSHTEGDWTREVERACNHIPQMGALTISPQDVARAVRPLPNWKSPGPDGLHNFWIKWFQRSHARLASQFQSALQSGSLPQFLTTGITHLLHKSGSTAEPRNYRPITCLPTVYKVLTSILRAKINKHIDTNSIMSASQNGCGNGSRGTKELLLIDMTINQQVRRSRKDLSTCWIDYKKAYDSVPHTWLMRVLELYKIDATLRTFLMSCMGQWRTVLRYPGCRNIQRNSEPIRIERGIFQGDSLSPLWFCLALNPLSTLLEDSGLGYRLRRGGQVISHLLYMDDLKLFAPNNLQMMELLKVTETFSSAIRMEFGVDKCAVMHVKRGEIVESVRTQLSDSIHLRSLSSLETYKYLGMSEALGINAADMKQSLRERFFGRLNKVLNSLLSGGNKVRAFNGWVMPVLMYSFGILKWTQTELDALDRRVRTLLTANRMHHPRSSVMRLYIPRKCGGRGFLNAKTLHNREVCSLREYFLEADVGMHRDVVSVDKGLTPLSLANENWRKPIVLDTNDRREVWQSKELHGRFYRVLHGPDVDFLASVSWLRFGDLFGETEGFVFAIMDEVMMTNNYRKYIVKDGTVDICRACHRPGESIRHIISGCSRLANGDYLHRHNLVARIIHQQLALKYSLVESEVPYYRYVPDPVLENGNITLYWDRSIITDRTIVANKPDIVVIDRLERRTVIVDIAVPHDENLVKAEKDKQIKYLDLAREVVDMWDVDTAIIVPIVVTANGIIAKSLDQHLRRLSLGGWIKGLIQKAVLLDTARIVRRFLSQQP

SEQ ID NO: 11704 - protein, 964 aa, Cosmia trapezina
MNKKNRALVCALDALLPNFIESSADLCDTHSILYGTAVAACRVACVKFPNTDRATRPKPAAPAWQCRIERRINEARVLIGKLICFREGNTRPRVMRFVRRAFSGTNVSPQEYVSRVTERIDFLKQKVYAWANRIRRYRRRVDRYSQNRMFQSDERWVYRAWERPIPTQGVTDVRPPDNETMSAFWRSIWSVPVSHTEGDWMRIVEQACDSIPNMDAVTISPSDVACAVRPLPNWKSPGPDGLHNFWIKWLQRSHACLASQFQSSLETGSLPLLFTTGVTHLLHKSGSTAEPKNYRPITCLPTVYKVLTSILRAKIAHHIYNNSIMSVSQNGCRNGSRGTKELLLIDMTISQQVRRSRKDLSTCWIDYKKAYDSVPHTWLIRVLELYKIDATLRTFLMSCMGQWKTVLLYPGCRRIPGIDEPIRIERGIFQGDSLSPLWFCLALNPLSTLLEDSGLGYRLRRGGQVISHLLYMDDLKLFAPNNLRLMELLKVTENFSSAIRMEFGVDKCAVMHVKRGEIMESVGTQLSDSIHLRSLSSTETYKYLGMSEALGINVADMKQSLKERFFGRLKKVFNSLLSGGNKVRAFNGWVMPVLMYSFGVLKWTQTELDALDRRVRTLLTAYRMHHPRSSVMRLYIPRKCGGRGFLNAKTLHNREICSLREYFLEADVGMHRDVVAVDKGLTPLSLAKENWRKPAVLDTNDRREVWQGKELHGRFFRALHGPDVDFLASVSWLRFGDLFGETEGFVCAIMDEVIMTNNYRKYIVKDGTVDICRACHHPGESIRHIVSGCSRLANGEYLHRHNLVARIIHQQLALQYNLVESEVPYYRYVPDPVLENGQATLYWDRSIITDRTIVANKPDIVVIDRRERRAIIVDIAVPHDENLVKAEKDKKIKYLDLAHEVVDMWDVDSAIIVPIIVTVNGLIAQSLDQHLRRLSLRGWIKGLIQKAVLLDTARIVRRFLSLEP

SEQ ID NO: 11705 - protein, 1200 aa, Cosmia trapezina
MLTRSAARKARLPPPDSSLSSASPPPVPSLTVSAVSTPAAVVASSSSDEYFSPPTTPPPARRRGGRRPPDGLGPRGPPASDRVPAPGGSVQRMRWTRAINENVMRSYYGATEGGNNLTAYRVRMHSLFQVLEPALNVSAQRLSDQVRVIQRNHMLDDTVLDRLRSEMQSSRVIAPLSQTIVAPPPPQCNTSQADEGSDGTAANVSTQCNEELRSALEGAIQEYRFVSPELRPRLPRLPMHNKNRALVAALDSQLSNYFDDCEDLTDTHSILYCAAVAACRVAHVKFANDSRATRPKPAVPAWQCRIERRIGGARALIGKLICFREGNTRPRVMRFVRRAFSGTDVSPQDYMSRVTERIDFLRQKVYAWANRIRRYKRRVDRYTQNRTFQSDERWVYRGWERPDQGVTDTRLPDDDAMCSFWRSIWSVPVSHTEGDWAREVRRACDPIPEMGAITICPQDVARAVRPLPNWKSPGPDGLHNFWIKWFLGSHARLAAQYQSALQSGSLPQFLTTGITHLLHKSGSTTEPKNYRPITCLPTVYKVLTSILRAKINEHIDTNSIMSASQNGSRNGSRGTKELLLIDMAISQQVRRSRRDLSTCWIDYKKAYDSVPHTWLMRVLELYKVDATLRTFLMSCMGQWRTVLRYPGCRNIQRNSEPIRIERGIFQGDSLSPLWFCLALNPLSTLLEDSGLGYRLRRGGQVISHLLYMDDLKLFAPSNLQLMELLKVTETFSSAIRMEFGVDKCAVMHVKRGEIVESVGTQLSDSINLRTLSAAETYKYLGMSEALGINVADMKQSLKERFFGRLKKVFNSLLSGGNKVRAFNGWVMPVLMYSFGILKWTQTELDALDRRVRTLLTAYRMHHPRSSVMRLYIPRKCGGRGFLNAKTLHNREICSLREYFLETDVGMHRDVVAVDKGLTPLSLAKENWRKPVVLDANDRMEVWQSKELHGRFFRALHGPDVNLLASVAWLRSGDLFGETEGFVCAIMDEVIMTNNYRRFIVKDGTVDICRACHRPGESIRHIISGCSRLANEEYLHRHNLVARIIHQQLALKYSLVESEVPYYRYVPDPVLENGHITLYWDRSIITDRTIVANKPDIVVVDRTERRAMIVDITVPHDGNLVKAEKDKQIKYIDLAREVVDMWDVDSAVIVPIVVSANGLIAKSLDQHLRRLSLGSWIKGLIQKAVLLDTARIVRRFLSLEP

SEQ ID NO: 11706 - protein, 868 aa, Cosmia trapezina
MRFVRRAFSGTDISPRDYFACVTERIDFLKQKICAWANRIRRYRRRVERYTQNRTFQSDERWVYRAWERPDQGVADTQLPDDDAMCSFWRSIWSVPVSHTEGDWTREVERACDHIPQMGALTISPQDVARAVRSLPNWKSPGPDGLHNFWIKWFQRSHARLASQFQSALQSGSLPQFLTTGITHLLHKSGSTAEPRNYRPITCLPTVYKVLTSILRAKINKHIDTNSIMSASQNGCGNGSRGTKELLLIDMTINQQVRRSRKDLSTCWIDYKKAYDSVPHTWLMRVLELYKIDATLRTFLMSCMGQWRTVLRYPGCRNIQRNSEPIRIERGIFQGDSLSPLWFCLALNPLSTLLEDSGLGYRLRRGGQVISHLLYMDDLKLFAPNNLQLMELLKVTETFSSAIRMEFGVDKCAVMHVKRGEIVESVRTQLSDSIHLRSLSSLETYKYLGMSEALGINVADMKQSLKERFFGRLKKVFNSLLSGGNKVRAFNGWVMPVLMYSFGILKWTQTELDALDRRVRTLLTANRMHHPRSSVMRLYIPRKCGGRGFLNAKTLHNREVCSLREYFLEADVGMHRDVVSVDKGLTPLSLANENWRKPVVLDTNDRREVWQSKELHGRFYRVLHGPDVDFLASVSWLRFGDLFGETEGFVFAIMDEVMMTNNYRKYIVKDGTVDICRACHRPGESIRHIISGCSRLANGDYLHRHNLVARIIHQQLALKYSLVESEVPYYRYVPDPVLENGNITLYWDRSIITDRTIVANKPDIVVIDRLERRTMIVDIAVPHDENLVKAEKDKQIKYLDLAREVVDMWDVDTAVIVPIVVTANGIIAKSLDQHLRRLSLGGWIKGLIQRAVLLDTARIVRRFLSQQP

SEQ ID NO: 11707 - protein, 1205 aa, Cosmia trapezina
MLTRSRAQHLRNTHPTSSGSSLSSASQLPEPAPDVSQVIPAAAVASSSSDEYFSPPTTPPPVRRRGRGRPPASLGPRGPPASDRVPAPGGSVQRMRWTQTVNENVMRAYFGATEGGSNLTAYRGRMLSLFQVLEPAVNVSAQRLSDQVRVIQRNHMLDDVVLDRLRLESRNSRVTSDSPMVAVQLQNLPSASPRPDRVDEEDDSGAISVSSQCNVQLRSALEDAFREYRSTPPGLRPRLPRLPMHKKNKALVCALDSQLSNCFDGSKDLADTHSILYCAAVAACRVAHVKFHNNDRVTRPKPAVPTWQCRIERRIGEARALIGKLICFREGNTRPRVMRFVRRAFSGMDISPRDYLTCVTERIDFLKQKICAWANRIRRYRRRVERYTQNRTFQSDERWVYRAWERPDQGVADTQLPDDDAMCSFWRSIWSVPVSHTEGDWTREVERACDHIPQMGALTISPQDVARAVRPLPNWKSPGPDGLHNFWIKWFQRSHARLASQFQSALQSGSLPQFLTTGITHLLHKSGSTAEPRNYRPITCLPTVYKVLTSILRAKINKHIDTNSIMSASQNGCGNGSRGTKELLLIDMTISQQVRRSRKDLSTCWIDYKKAYDSVPHTWLMRVLELYKIDATLRTFLMSCMGQWRTVLRYPGCRNIQRNSEPIRIERGIFQGDSLSPLWFCLALNPLSTLLEDSGLGYRLRRGGQVISHLLYMDDLKLFAPNNLQLMELLKVTETFSSAIRMEFGVDKCAVMHVKRGEIVESVRTQLSDSIHLRSLSSLETYKYLGMSEALGINAADMKQSLRERFFGRLNKVLNSLLSGGNKVRAFNGWVMPVLMYSFGILKWTQTELDALDRRVRTLLTANRMHHPRSSVMRLYIPRKCGGRGFLNAKTLHNREVCSLREYFLEADVGMHREVVSVDKGLTPLSLANENWRKPIVLDTNDRREVWQSKELHGRFYRVLHGPDVDFLASVSWLRFGDLFGETEGFVFAIMDEVMMTNNYRKYIVKDGTVDICRACHRPGESIRHIISGCSRLANGDYLHRHNLVARIIHQQLALKYSLVESEVPYYRYVPDPVLENGNITLYWDRSIITDRTIVANKPDIVVIDRLERRTVIVDIAVPHDENLVKAEKDKQIKYLDLAREVVDMWDVDTAIIVPIVVTANGIIAKSLDQHLRRLSLGGWIKGLIQKAVLLDTARIVRRFLSQQP

SEQ ID NO: 11708 - protein, 1101 aa, Mamestra brassicae
MRWTQTINENVMRSYYGATEGGTNLTAYRGRMLSLFQVLEPAVNVSAQRLSDQVRVILRNRMLDDAVLDRLRLESRSGRVSPASPPAAVQIQSSVSPRPNNVGEDDDEGAISVSTHCNERLRSALEDAFREYRSTPPELRPRLPRLPMHNKNKALVCALDSQLTNCFDSSEDLADTHSILYCAAAAACRVAHVKFPKSDRATRPAVPAWQCRIERRIGEARALIGKLICFREGNTRRRVMRFVSDTSPRDYLTRVTERIDFLKQKIYAWANRIRRYKRRVERYTQNRTFQSNERWVYRAWERPDQGVTDTRLPDDDVMCSFWRNIWSVPVSHTEGDWTREVERACDPIPEMGAITISPQDVARAVRPLPNWKSPGPDGLHNFWIKWFKRSHARLASQFQSALESGSLPQFLTTGITHLLHKSGSTAEPQNYRPITCLPTVYKVLTSILRAKINSHIETNSIMSASQNGCRNQSRGTKELLLMDIAISQQVRRSRRDLSTCWIDYKKAYDSVPHTWLMRVLELYKVDAVLRTFLMSCMGQWRTVLRYPGCRQIQVNSDPIRIERGIFQGDSLSPLWFCLALNPLSTLLEGSGQGYRLRRGGQVISHLLYMDNLKLFAPNNLQLMKLLKVTETFSSAISMEFGVDKCAVMHVKRGEIMESVRTQLSDSINLRSLSSTETYKYLGMSEALGINAADVKQSLKERFFGRLNKVLNSLLSGGNKVRAFNGWVMPVLMYSFGILKWTQTELDALDRRVRSLLTANRMHHPLSSVMRLYIPRKCGGRGFLNAKTLHNREICNLREFFLEADVGMHRDVVAVDKGLTAVSLANENWRKPVVLDTNDRREVWQSKELHGRFYRVLHGPDVDFLASVAWLRFGDLFGETEGFVCAIMDEVMMTNNYRKYIVKDGTVDICRACHRPGESIRHIISGCSSLANGDYLHRHNLVARIIHQQLALKYNLVESEVPYYRYVPDPVLENGNCTLYWDRSIITDRTIVANKPDIVVIDRLERRAMIVDIAVPHDANLVKSEKDKQTKYLDLAREVVDMWDVNTAVIVPIVVTANGIIAKSLDQHLKRLSLGSWIKGLIQKAVLLDTARIVRRFLSQGP

SEQ ID NO: 11709 - protein, 1198 aa, Mamestra brassicae
MLTRAAAQRARLPPPASSLSSASPPPEPSPTVSAVIPAVAVASSSSDEYFSPPTSPPPARRRRGRRPPDGLGPRGPPASDRVPAPGGSVQRMRWTQTINENVMRSYYGATEGGTNLTAYRGRMLSLFQVLEPAVNVSAQRLSDQVRVIQRNRMLDDAVLDRLRLESRNGRVSAASPPAAVQIQFSISPRPNIVGEDDDDGAISVSTQCNERLRSALEDAFREYRSTPPELRPRLPRLPMHNKNRALVCALDSQLANCFDSSEDLADTHSILYCAAAAACRVAHIKFPNSDRATRPAVPAWQCRIERRIGEARALIGKLICFREGNTRRRVMRFVRRAFSGTDTSPRDYLTRVTERIDFLKQKIYAWANRIRRYKRRVERYTQNRTFQSNERWVYRAWERPDQGVTDTRLPDDDVMCSFWRNIWSVPVSHTEGDWTREVERACDPIPEMGAITISPQDVARAVRPLPNWKSPGPDGLHNFWIKWFKRSHARLASQFQSALESGSLPQFLTTGITHLLHKSGSTAEPKNYRPITCLPTVYKVLTSILRAKINQHIKTNSIMSASQNGCRNRSRGTKELLLIDVAISQQVRRSRRDLSTCWIDYKKAYDSVPHTWLMRVLELYKVDAVLRTFLMSCMGQWRTVLRYPGCRQIQANSDPIRIERGIFQGDSLSPLWFCLALNPLSTLLEGSGQGYRLRRGGQVISHLLYMDDLKLFAPNNLQLMKLLKVTETFSSAISMEFGVDKCAVMHVKRGEIMESVGTQLSDSIHLRSLSSTETYKYLGMSEALGINANDVKQSLKVRFFGRLNKVLNSLLSGGNKVRAFNGWVMPVLMYSFGILKWTQTELDALDRRVRSLLTANRMHHPRSSVMRLYIPRKCGGRGFLNAKTLHNREICSLREFFLEADVGMHRDVVAVDKGLTALSLANENWRKPVVLDTNDRREVWQSKELHGRFYRVLHGPDVDFLASVAWLRFGDLFGETEGFVCAIMDEVMMTNNYRKYIVKDGTVDICRACHRPGESIRHIISGCSSLANGDYLHRHNLVARIIHQQLALKYNLVESEVPYYRYVPDPVLENGNCTLYWDRSIITDRTIIANKPDIVVIDRLERRAMIVDIAVPHDVNLVKTEKDKQTKYLDLAREVVDMWDVNTAVIVPIVVTANGIIAKSLDQHLKRLSLGSWIKGLIQKAVLLDTARIVRRFLAQGP

SEQ ID NO: 11710 - protein, 1169 aa, Mamestra brassicae
MTFSLMVCVHRMRCTLPPGAGTLSEAGGPRGPKPSGGRRPLRRRAGGGDVGGEKYSSLELDATATAGITALTVGLGSGGGEAELSDEAGGGRRARRMLSLFQVLEPAVNVSAQRLSDQVRVIQRNRMLDDAVLDRLRLKSRNGRVSAASPPAAVQIQFSVSPRPNIVGEDDDDGAISVSTQCNERLRSALEDAFREYRSTPPELRPRLPRLPMHNKNRALVCALDSQLANCFDSSEDLADTHSILYCAAAAACRVAHVKFSNSDRATRPAVPAWQCRIERRIGEARALIGKLICFREGNTRRRVMRFVRRAFSGTDTSPRDYLTRVTERIDFLKQKIYAWANRIRRYKRRVERYTQNRTFQSNERWVYRAWERPDQGVTDTRLPDDDVMCSFWRNIWSVPVSHTEGDWTREVERACDPIPEMGAITISPQDVARAVRPLPNWKSPGPDGLHNFWIKWFKRSHARLASQFQSALESGSLPQFLTTGITHLLHKSGSTAEPKNYRPITCLPTVYKVLTSILRAKINQHIETNSIMSASQNGCRNRSRGTKELLLIDVAISQQVRRSRRDLSTCWIDYKKAYDSVPHTWLMRVLELYKVDAVLRTFLMSCMGQWRMVLRYPGCRQIQANSDPIRIERGIFQGDSLSPLWFCLALNPLSTLLEGSGQGYRLRRGGQVISHLLYMDDLKLFAPNNLQLMKLLKVIETFSSAISMEFGVDKCAVMHVKRGEIMESVGTQLSDSIHLRSLSSTETYKYLGMSEALGINANDVKQSLKERFFGRLNKVLNSLLSGGNKVRAFNGWVMPVLMYSFGILKWTQTELDALDRRVRSLLTANRMHHPRSSVMRLYIPRKCGGRGFLNAKTLHNREICSVREFFLEADVGMHRDVVAVDKGLTALSLANENWRKPVVLDTNDRREVWQSKELHGRFYRVLHGPDVDFLASVAWLRFGDLFGETEGFVCAIMDEVMMTNNYRKYIVKDSTVDICRACHRPGESIRHIISGCSSLANGDYLHRHNLVARIIHQQLALKYNLVESEVPYYRYVPDPVLENGNCTLYWDRSIITDRTIIANKPDIVVIDRLERRAMIVDIAVPHDVKTEKDKQTKYLDLAREVVDMWDVNTAVIVPIVVTANGIIAKSLDQHLKRLSLGSWIKGLIQKAVLLDTARIVRRFLSQGP

SEQ ID NO: 11711 - protein, 1099 aa, Noctua fimbriata
MLTRAAAKRARLSPPDPSLSSASPPPESSPVMSAVTPAVAVASSSSDEYFSPPTTPPPVRRRGGRRPPDGLGPRGPPASDRVPAPGGSVQRMRWTQSINENVMRSYYGATEGGNNLTAYRVRMLSLFQVLEPAVNVSAQRLSDQVRVIQRNRMLDDTVLDRLRTEMQSSHVIATPPPQAVVPPQSTIIPNRDNDVSNDIVTNVSTQCNEEMRSALEGAIREYRFMQPDLRPRIPRLPMHNKNRALVAVLDSQLSNYFDNCEDLTDAHSILYCAAVGACRVAHVKFSNDRATRPKPAVPPWQYRIERRIGGARALIGKLICFREGNTRPRVMRFVRRAFSGTDISPRDYMSRITERIDFLKQKVYAWANRIRRYKRRVDRYTQNRTFQRDERWVYRAWERPDQGVADTWFTRSHARLAILFQSALESGSLPEFLTTGITHLLHKSGSTAEPKNYRPITCLPTVYKVLTSILRAKINKHIDDNSIMSASQNGCRNGSRGTKELLLIDMAISQQVRRSRRDLSTCWIDYKKAYDSVPHTWLMRVLELYKVDATLRTFLMSCMGQWRTVLRYPGCRQIQRNSEPIRIERGIFQGDSLSPLWFCLALNPLSTLLEDSGLGYRLRRGGQVISHLLYMDDLKLFAPNDLQLMELLKVTETFSSAIRMEFGVDKCAVMHVKRGEIVESVGTQLSDSINLRSLSATETYKYLGMSEALGINVADMKQSLKERFFGRLKKVFNSLLSGGNKVRAFNGWVMPVLMYSFGILKWTQTELDALDRRVRTLLTAYRMHHPRSSIMRLYIPRKCGGRGFLNAKTLHNREICSLREYFLETDVGMHRDVVAVDKGLTPLSLAKENWRKPLVLDTNDRMEVWQSKELHGRFFRALHGPDVDLSASVAWLRSGDLFGETEGFVCAIMDEVMMTNNYRRFIVKDGTVDICRACHRPGESIRHIISGCSRLANGEYLHRHNLVARIIHQQLALKYNLVESEVPYYKYVPDPVLENGSITLYWDQSIITDRTIVANKPDIVVVDRSERRTMIVDITVPHDENLVKAEKDKKIKYLDLAREVVDMWDVDSAIIVPIVVSAHGLIAKSLDQYLRRLSLGSWI

SEQ ID NO: 11712 - protein, 1033 aa, Noctua fimbriata
MQSSHVIATPPPQAVVPPQSTIIPNRDNDVSNDIVTNVSTQCNEEMRSALEGAIREYRFMQPDLRPRIPRLPMHNKNRALVATLDSQLSNYFDNCEDLTDAHSILYCAAVAACRVAHVKFSDDRATRPKPAVPPWQYRIERRIGGARALIGKLICFREGNTRPRVMRFVRRAFSGTDISPRDYMSRITEHIDFLKQKVYAWANRIRRYTRRVDRYTQNRTFQRDERWVYRAWERPDQGVADTRLPDDDAMCSFWRSIWSVPVSHTEGEWTQGVERACDLVPEMGAITISPQDVVRAVRPLPNWKSPGPDGLHNFWIKWFTRSHARLAILFQSALESGSLPEFLTTGITHLLHKSGSTAEPKNYRPITCLPTVYKVLTSILRAKINKHIDDNSIMSASQNGCRNGSRGTKELLLIDMAISQQVRRSRSDLSTCWIDYKKAYDSVPHTWLMRVLELYKVDATLRTFLMSCMGQWRTVLRYPGCRQIQRNSEPIRIERGIFQGDSLSPLWFCLALNPLSTLLEDSGLGYRLRRGGQVISHLLYMDDLKLFAPNDLQLMELLKVTETFSSAIRMEFGVDKCAVMHVKRGEIVESVGIQLSDSINLRSLSATETYKYLGMSEALGINVADMKQSLKERFFGRLKKVFNSLLSGGNKVRAFNGWVMPVLMYSFGILKWTQTELDALDRRVRTLLTAYRMHHPRSSVMRLYIPRKCGGRGFLNAKTLHNREICSLREYFLETDVGMHRDVVAVDKGLTPLSLAKENWRKPLVPDTNDRMEVWQSKELHGRFFRALHGPDVDLSASVAWLRSGDLFGETEGFVCAIMDEVMMTNNYRRFIVKDGTVDICRACHRPGESIRHIISGCSRLANGEYLHRHNLVARIIHQQLALKYNLVESEVPYYKYVPDPVLENGSITLYWDQSIITDGTIVANKPDIVVVDRSERRTMIVDITVPHDENLVKAEKDKKIKYLDLAREVVDMWDVDSAIIVPIVVSAHGLIAKSLDQYLRRLSLGSWIKGLIQKAVLLDTARIVRRFLSLEP

SEQ ID NO: 11713 - protein, 1198 aa, Noctua fimbriata
MLTRSAARRARLSPPDPSLSSASPPPESSPVVSAVTPAVAVASSSSDEYFSPPTTPPPVRRRGGRRPPDGLGPRGPPASDRVPAPGGSVQRMRWTQSINANVMRAYYGATEGGNNLTAYRVRMLSLFQVLEPAVNVSAQRLSDQVRVIQRNRMLDDTVLDRLRTEMQSSHVIATPPPQAVVPPQSTIIPNRDNDVSNDIVTNVSTQCNEEMRSALEGAIREYRFMQPDLRPRIPRLPMHNKNRALVAVLDSQLSNYFDNCEDLTDAHSILYCAAVAACRVAHVKFSDDRATRPKPAVPPWQYRIERRIGGARALIGKLICFREGNTRPRVMRFVRRAFSGTDISPRDYMSRITERIDFLKQKVYAWANRIRRYKRRVDRYTQNRTFQRDERWVYRAWERPDQGVADTRLPDDDAMCSFWRSIWSVPVSHTEGEWTQGVERACDLVPEMGAITISPQDVVRAVRPLPNWKSPGPDGLHNFWIKWFTRSHVRLAILFQSALESGSLPEFLTTGITHLLHKSGSTAEPKNYRPITCLPTVYKVLTSILRAKINKHIDDNSIMSASQNGCRNGSRGTKELLLIDMAISQQVRRSRSDLSTCWIDYKKAYDSVPHTWLMRVLELYKVDATLRTFLMSCMGQWRTVLRYPGCRQIQRNSEPIRIERGIFQGDSLSPLWFCLALNPLSTLLEDSGLGYRLRRGGQVISHLLYMDDLKLFAPNDLQLMELLKVTETFSSAIRMEFGVDKCAVMHVKRGEIVESVGTQLSDSINLRSLSATETYKYLGMSEALGINVADMKQSLKERFFGRLKKVFNSLLSGGNKVRAFNGWVMPVLMYSFGILKWTQTELDALDRRVRTLLTAYRMHHPRSSVMRLYIPRKCGGRGFLNAKTLHNREICSLREYFLETDVGMHRDVVAVDKGLTPLSLAKENWRKPVVFDTNYRMEVWQSKELHGRFFRALHGPDVDLSASVAWLRSGDLFGETEGFVCAIMDEVMMTNNYRRFIVKDGTVDICRACHRPGESIRHIISGCSRLANGEYLHRHNLVARIIHQQLALKYNLVELEVPYYKYVPDPVLENGSITLYWDQSIITDRTIVANKPDIVVVDRSERRTMIIDITVPHDENLVKAEKDKKIKYLDLAREVVDMWDVDSAIIVPIIVSAHGLIAKSLDQYLRRLSLGSWIKGLIQKAVLLDTARIVRRFLFLEP

SEQ ID NO: 11714 - protein, 1197 aa, Noctua fimbriata
MLTRAAAKRARLSPPDPSLSSASPPPESSPVVSAVTPAVAVASSSSDEYFSPPTTPPPVRRRGGRRPPDGLGPRGPPASDRVPAPGGSVQRMRWTQSINENVMRSYYGATEGGNNLTAYRVRMLSLFQVLEPAVNVSAQRLSDQVRVIQRNRMLDDTVLDRLRTETQSSHVITPSAQAVVLPQSSTIPNRDNDVSNDMVTNVSTQCNEEMRSALEGAIREYRFMQPDLRPRIPRLPMHNKNRALVAVLDSQLSNYFDNCEDLTDAHSILYCAAVAACRIAHVKFSDDRATRPKPAVPPWQYRIERRIGGARALIGKLICFREGNTRPRVMRFVRRAFSGTDISPRDYMSRITERIDFLKQKVYAWASRIRRYKRRVDRYTQNRTFQRDERWVYRTWERPDQGVADTRIPDDDAMCSFWRSIWSVPVSHTEGEWTRGVERACDLVPEMGAITISPQDVVRAVRPLPNWKSPGPDGLHNFWIKWFTRSHARLAILFQSALESGSLPEFLTTGITHLLHKSGSTAEPKNYRPITCLPTVYKVLTSILRAKINKHIDDNSIMSASQNGCRNGSRGTKELLLIDMAISQQVRRSRRDLSTCWIDYKKAYDSVPHTWLMRVLELYKVDATLRTFLMSCMGQWRTVLRYPRCWQIQRNSEPIRIERGIFQGDSLSPLWFCLALNPLSTLLEDSGLGYQLRRGGQVISHLLYMDDLKLFARNDLQLMELLKVTETFSSAIRMEFGVDKCAVMHVKRGEIVESVGTQLSDSINLRSLSATETYKYLGMSEALGINVADMKQSLKERFFGRLKKVFNSLLSGGNKVRAFNGWVMPVLMYSFGILKWTQTELDALDRRVRTLLTAYRMHHPRSSVMRLYIPRKCGGRGFLNAKTLHNREICSLREYFLETDVGMHRDVVAMDKGLTPLSLAKENWRKPLVLDTNDRMEVWQSKELHGRFFRALHGPDVDLSASVAWLRSGDLFGETEGFVCAIMDEVMMTNNYRRFIVKDGTVDICRACHRPGESIRHIISGCSRLANGEYLHRHNLVARIIHQQLALKYNLVESEVPYYKYVPDPVLENGSITLYWDQSIITDRTIVANKPDIVVVDRSERRTMIVDITVPHDENLVKAEKDKKIKYLDLAREVVDMWDVDSAIIVPIVVSAHGLIAKSLDQYLRRLSLGSWIKGLIQKAVLLDTARIVRRFLSLEP

SEQ ID NO: 11715 - protein, 1198 aa, Noctua fimbriata
MLTRSAARRARLSPPDPSLSSASPPPESSPVVSAVTPAVAVASSSSDEYFSPPTTPPPVRRRGGRRPPDGLGPRGPPASDRVPAPGGSVQRMRWTQSINANVMRAYYGATEGGNNLTAYRVRMLSLFQVLEPAVNVSAQRLSDQVRVIQRNRMLDDTVLDRLRTEMQSSHVIATPPPQAVVPSQSTIIPNRDNDVSNDIVTNVSTQCSEEMRSALEGAIREYRFMQPDLRPRIPRLPMHNKNRALVAVLDSQLSNYFDNCEDLTDAHSILYCAAVAACRVAHVKFSDDRATRPKPAVPPWQYRIERRIGGARALIGKLICFREGNTRPRVMRFVRRAFSGTDISPRDYMSRITERIDFLKQKVYAWANRIRRYKRRVDRYTQNRTFQRDERWVYRAWERPDQGVADTRLPDDDAMCSFWRSIWSVPVSHTEGEWTQGVERACDLVPEMGAITISPQDVVRAVRPLPNWKSPGPDGLHNFWIKWFTRSHARLAILFQSALESGSLPEFLTTGITHLLHKSGSTAEPKNYRPITCLPTVYKVLTSILRAKINKHIDDNSIMSASQNGCRNGSRGTKELLLIDMAISQQVRRSRSDLSTCWIDYKKAYDSVPHTWLMRVLELYKVDATLRTFLMSCMGQWRTVLRYPGCRQIQRNSEPIRIERGIFQGDSLSPLWFCLALNPLSTLLEDSGLGYRLRRGGQVISHLLYMDDLKLFAPNDLQLMELLKVTETFSSAIRMEFGVDKCAVMHVKRGEIVESVGTELSDSINLRSLSATETYKYLGMSEALGINVADMKQSLKERFFGRLKKVFNSLLSGGNKVRAFNGWVMPVLMYSFGILKWTQTELDALDRRVRTLLTAYRMHHPRSSVMRLYIPRKCGGRGFLNAKTLHNREICSLREYFLETDVGMHRDVVAVDKGLTPLSLAKENWRKPVVFDTNYRMEVWQSKELHGRFFRALHGPDVDLSASVAWLRSGDLFGETEGFVCAIMDEVMMTNNYRRFIVKDGTVDICRACHRPGESIRHIISGCSRLANGEYLHRHNLVARIIHQQLALKYNLVELEVPYYKYVPDPVLENGSITLYWDQSIITDRTIVANKPDIVVVDRSERRTMIVDITVPHDENLVKAEKDKKIKYLDLAREVVDMWDVDSAIIVPIVVSAHGLIAKSLDQYLRRLSLGSWIKGLIQKAVLLDTARIVRRFLSLEP

SEQ ID NO: 11716 - protein, 1197 aa, Noctua fimbriata
MLTRAAAKRARLSPPDPSLSSASPPPESSPVVSAVTPAVAVASSSSDEYFSPPTTPPPVRRRGGRRPPDGLGPRGPPASDRVPAPGGSVQRMRWTQSINENVMRSYYGATEGGNNLTAYRVRMLSLFQVLEPAVNVSAQRLSDQVRVIQRNRMLDDTVLDRLRTETQSSHVITPSAQAVVLPQSSTIPNRDNDVSNDMVTNVSTQCNEEMRSALEGAIREYRFMQPDLRPRIPRLPMHNKNRALVAVLDSQLSNYFDNCEDLTDAHSILYCAAVAACRIAHVKFSDDRATRPKPAVPPWQYRIERRIGGARALIGKLICFREGNTRPRVMRFVRRAFSGTDISPRDYMSRITERIDFLKQKVYAWASRIRRYKRRVDRYTQNRTFQRDERWVYRTWERPDQGVADTRIPDDDAMCSFWRSIWSVPVSHTEGEWTREVERACDLVPEMGAITISPQDVVRAVRPLPNWKSPGPDGLHNFWIKWFTRSHARLAILFQSALESGSLPEFLTTGITHLLHKSGSTAEPKNYRPITCLPTVYKVLTSILRAKINKHIDDNSIMSASQNGCRNGSRGTKELLLIDMAISQQVRRSRRDLSTCWIDYKKAYDSVPHTWLMRVLELYKVDATLRTFLMSCMGQWRTVLRYPRCWQIQRNSEPIRIERGIFQGDSLSPLWFCLALNPLSTLLEDSGLGYQLRRGGQVISHLLYMDDLKLFAPNDLQLMELLKVTETFSSAIRMEFGVDKCAVMHVKRGEIVESVGTQLSDSINLRSLSATETYKYLGMSEALGINVADMKQSLKERFFGRLKKVFNSLLSGGNKVRAFNGWVMPVLMYSFGILKWTQTELDALDRRVRTLLTAYRMHHPRSSVMRLYIPRKCGGRGFLNAKTLHNREICSLREYFLETDVGMHRDVVAMDKGLTPLSLAKENWRKPLVLDTNDRMEVWQSKELHGRFFRALHGPDVDLSASVAWLRSGDLFGETEGFVCAIMDEVMMTNNYRRFIVKDGTVDICRACHRPGESIRHIISGCSRLANGEYLHRHNLVARIIHQQLALKYNLVESEVPYYKYVPDPVLENGSITLYWDQSIITDRTIVANKPDIVVVDRSERRTMIVDITVPHDENLVKAEKDKKIKYLDLAREVVDMWDVDSAIIVPIVVSAHGLIAKSLDQYLRRLSLGSWIKGLIQKAVLLDTARIVRRFLSLEP

SEQ ID NO: 11717 - protein, 1198 aa, Noctua fimbriata
MLTRSAARRARLSPPDPSLSSASPPPESSPVVSAVTPAVAVASSSSDEYFSPPTTPPPVRRRGGRRPPDGLGPRGPPASDRVPAPGGSVQRMRWTQSINANVMRAYYGATEGGNNLTAYRVRMLSLFQVLEPAVNVSAQRLSDQVRVIQRNRMLDDTVLDRLRTEMQSSHVIATPPPQAVVPPQSTIIPNRDNDVSNDIVTNVSTQCNEEMRSALKGAIREYRFMQPDLRPRVPRLPMHNKNRALVAVLDSQLSNYFDNCEDLTDAHSILYCAAVAACRVAHVKFYDDRATRPKPVVPPWQYRIERRIGGARALIGKLICFREGNTRPRVMRFVRRAFSGTDISPRDYMSRITERIDFLKQKVYAWASRIRRYKRRVDRYTQNRTFQRDERWVYRAWERPDQGVADTRIPDDDAMCSFWRSIWSVPVSHTEGEWTRRVERACDLVPEMGAITISPQDVVRAVRPLPNWKSPGPDGLHNFWIKWFTRSHARLAILFQSALESGSLPEFLTTGITHLLHKSGSTAEPKNYRPITCLPTVYKVLTSILRAKINKHIDDNSIMSASQNGCRNGSRGTKELLLIDMAISQQVRRSRRDLSTCWIDYKKAYDSVPHTWLMRVLELYKVDATLRTFLMSCMGQWRTVLRYPGCRQIQRNSEPIRIDRGIFQGYSLSPLWFCLALNPLSTLLEDSGLGYRLRRGGQVISHLLYMDDLKLFAPNDLQLMELLKVTETFSSAIRMEFGVDKCAVMHVKRGEIVESVGTQLSDSINLRSLSATETYKYLGMSEALGINVADMKQSLKERFFGRLKKVFNSLLSGGNKVRAFNGWVMPVLMYSFGILKWTQTELDALDRRVRTLLTAYRMHHPRSSVMRLYIPRKCGGRGFLNAKTLHNREICSLREYFLETDVGMHRDVVAVDKGLTPLSLAKENWRKPLVLDTNDRMEVWQSKELHGRFFRALHGPDVDLSASVAWLRCGDLFGETEGFVCAIMDEVMMTNNYRRFIVKDGTVDICRACHRPGESIRHIISGCSRLANGEYLHRHNLVARIIHQQLALKYNLVESEVPYYKYVPDPVLENGSITLYWDQSIITDRTIVANKPDIVVVDRSERRTMIVDITVPHYENLVKAEKDKKIKYLDLAREVVDMWDVDSAIIVPIVVSAHGLIAKSLDQYLRRLSLGSWIKGLIQKAVLLDTARIVRRFLSVEP

SEQ ID NO: 11718 - protein, 1198 aa, Atethmia centrago
MLTRSAAVRARLPPPDSSLSSASPPPVPSPTVCAVTTPTAAVASSSSDEYFSPPTTPPPVRRRGGRRPPDGLGSRGPPASDRVPAPGGSVKRMRWTQSVNENVMRSYYGATEGGNNLTAYRVRMLSLFQVLEPAVNVSAQRLSDQVRVIQRNHMLDDTVLDRLRSEMQRSHVIVPPSQTVVHSPQLSTNQADEGSDDRATNVSTQCNVELRSALEDAIREYRLMSPELRPRLPRLPMHKKNRALVAALDSQLSNYFDDCEDLTDTHSILYCAAVAVCRVAHVKFAKDSRTTRPKPTVPAWQCRIESRIGGARALIGKLICFREGNTRPRVMRFVRRAFSGTDIGPQYYMTRVTERIDFLKQKVYAWANRIRRYKRRVERYTQNRTFQSDERWVYRSWERPDQDVTDTRLPDDDVMCSFWRSIWSVPVSHTEGDWARKVERACDPIPEMGAITICPQDVARAVRPLPNWKSPGPDGLHNFWLKWFLRSHARLAAQYQTALESGSLPQFLTTGVTHLLHKSGSTAEPKNYRPITCLPTVYKLLTSILRAKINKHIDTNSIMSASQNGCRNGSRGTKELLLIDMTISQQVRRSRKDLSTCWIDYKKAYDSVPHTWLMRVLELYKVDATLRTFLISCMGQWRTVLRYPGCRNIQRNSEPIRIERGIFQGDSLSPLWFCLALNPLSTLLEDSGLGYRMRRGSQVISHLLYMDDLKLFASNNLQLMELLKITETFSSAIRMEFGVDKCAVMHVKRGEIVESVGTQLSDSINLRTLSASETYKYLGMSEALGINVTDMKQSLKERFFGRLKKVFNSLLSGGNKVRAFNGWVMPVLMYSFGILKWTQTELDALDRRVRTLLTAYRMHHPRSSVMRLYIPRKCGGRGFLNAKILHNREVCSLREYFLEADVGMHRDVVAVDKGLTPLSLAKENWRKLVVLDTNDRREVWQSKELHGRFFRALHEPDVDFQASVAWLRFGDLFGETEGFVCAIMDEVIMTKNYRRFIVKDGTVDVCRACHRPGESIRDIISGCSRLANEEYLHRHNLVARIIHQQLALKYSLVESEVPYYRYVPDPVLDNGNITLYWDRSIITDRTIVANKPDIVVVDRTERRAMIVDITVPHDGNLVKAEKDKQIKYLDLAREVVDMWDVDSAIIVPIVVSANDLIAKSLDQHLKRLTLDGWIKGLIQKAVLLDTARIVRRFLSLEP

SEQ ID NO: 11719 - protein, 1194 aa, Atethmia centrago
MLTRSAARARLPPPDFSLSSASPPPVPNPTVTSPAAVVASSSSDEYFSPPTTPPPVRRRGGHRPPDGLGSRGPPASDRVPAPGGSVQRMRWTRSINEYVMRSYYGATEGGNNLTAYRVRMLSLFQVLEPAVNVSAQRLSDQVRVIQRNHMLDDTVLDRLRSETQSGHAIAPPSQTVVVSTQLRTNQADEGSDDRATNVSTQYNVELRSALEDAIREYRFMSPELRPRLPRLPMHKKNRALVAALDSQLSNYFDDCEDLTDTHSILYCAAVAVCRVAHVKFAKDSRATRPKPTVPAWQRRIERRIGGARALIGKLICFREGNTRPRVMRFVRRAFSGTDIGPQDYMSRVTERIDFLKQKVYAWANRIRRYKRRVERYTQNRTFQSDERWVYRGWERPDQGVTGTRLPDDDVMCSFWRSIWSVPVSHTEGDWVREVERACDPIPEMGAITISPQDVARAVRPLPNWKSPGPDGLHNFWLKWFLRSHARLAAQYQTALESGSLPQFLTTGVTHLLHKSGSTAEPKNYRPITCLPTVYKVLTSILRAKINEHIDTNSIMSASQNGCRNGSRGTKELLLIDITITQQVRHSRKDLATCWIDYKKAYDSVPHTWLMRVLELYKVDATLRTFLMSCMGQWRTVLRYPGCRNIQRNSEPIRIERGIFQGDSLSPLWFCLALNPLSTLLEDSGLGYRLKRGSQAISHLLYMDDLKLFASNNLQLMELLKITETFSSAIRMEFGVDKCAVMHVKRGKIMESVGTQLSDSINLRALSASETYKYLGMSEALGINVTDMKQSLKERFFGRLKKVFNSLLSGGNKVRAFNGWVMPVLMYSFGILKWTQTELDALDRRVRTLLTAYRMHHPRSSVMRLYIPRKCGGRGFLNAKTLHNREVCSLREYFLKADVGMHRDVVAVDKGLTPLSLAKENWRKLVVLDTNDRREVWQSKELHGRFFRALHEPDVDFQASVAWLRFGDLFGETEGFVCAIMDEVIMTKNYRRFIVKDGTVDVCRACQRPGESIRHIISGCSRLANEEYLHRHNLVARIIHQQLALKYNLVESEVPYYRYVPDPVLENGNITLYWDRSIITDRTIIANKPDIVVVDRTERRAMIVDITVPHDGNLVKAEKDKQIKYLDLAREVVDMWDVNSAIIVPIVISANGLIAKSLDQHLRRLSLDSWIKGLIQRAVLLDTARIVRRFLSLEP

SEQ ID NO: 11720 - protein, 868 aa, Atethmia centrago
MRFVRRAFSGTDIGPHDYMTRVTERIDFLKQKVYAWANRIRRYKRRVERYTQNRTFQSDERWVYRGWERPDQDVTDTRLPDDDVMCSFWRSIWSVPVSHTEGDWARKVERACDPIPEMGAITICPQDVARAVRPLPNWKSPGPDGLHNFWLKWFLRSHARLAAQYQTALESGSLPQFLTTGVTHLLHKSGSTAEPKNYRPITCLPTVYKLLTSILRAKINKHIDTNSIMSASQNGCRNGSRGTKELLLIDMTISQQVRRSRKDLSTCWIDYKKAYDSVPHTWLMRVLELYKVDATLRTFLISCMGQWRTVLRYPGCRNIQRNSEPIRIERGIFQGDSLSPLWFCLALNPLSTLLEDSGLGYRMRRGGQVISHLLYMDDLKLFASNNLQLMELLKITESFNSAIRMEFGVDKCAVMHVKRGKIVESVGTQLSDSINLRTLSASETYKYLGMSEALGINVTDMKQSLKERFFGRLKKVFNSLLSGGNKVRAFNGWVMPVLMYSFGILKWTQTELDALDRRVRTLLTAYRMHHPRSSVMRLYIPRKCGGRGFLNAKILHNREVCSLREYFLEADVGMHRDVVAVDKGLTPLSLAKENWRKLVVLDTNDRREVWQSKELHGRFFRALHEPDVDFQASVAWLRFGDLFGETEGFVCAIMDEVIMTKNYRRFIVKDGTVDVCRACHRPGESIRHIISGCSRLANEEYLHRHNLVARIIHQQLALKYSLVESEVPYYRYVPDPVLDNGNITLYWDRSIITDRTIVANKPDIVVVDRTERRAMIVDITVPLDGNLVKAEKDKQIKYLDLAREVVDMWDVDSAIIVPIVVSANGLIAKSLDQHLKRLTLDGWIKGLIQKAVLLDTARIVRRFLSLEP

SEQ ID NO: 11721 - protein, 1206 aa, Mesoligia furuncula
MLTRSRARHLLKNTHPTSSGSSLSVASQLPDPAPDVSSVRPAAAVASSSSDEYFSPPTTPPPVCRRGRGRPPASLGLRGPPASDRVPAPGGSVQRMRWTQTVNENVMRAYFGATEGGSNLTAYRGRMLSLFQVLEPAVNVSAQRLSDQVRVIQRNHMLDNVVLDRLRLESRNSHVTPASSLIAVQLQNVPSVSPRPDHVYVEDDDEAITVSSQCSARLRSALEDAFREYRSIPPGLRPRLPRLPMHKKNKALVCALDLQLSNCFNNSKDLTDTHSILYCAAVAACRVAHVKFPNSDKAPRPKPAVPAWQCRIECRIGEARALIGKLICFREGNTRPRVMRFVRRAFSGTDISSRDYLSHVTERIDFLKQKIYAWANRIRRYRRRVERYTQNRTFQNDERWVYRAWERPDQGVTDTPLPDDDAMCSFWRNIWSVPVSHTEGDWTAKIERACDLIPEMGVLTISPQDVARAVRPLPNWKSPGPDGLHNFWIKWFQGSHARLASQFQSALESGSLPQFLTTEITHLLHKSGSTADPKNYRPITCLPTVYKVLTSILRAKINKHIDTNSIMSVSQNGCRNGSRGTKELLLIDMTISQQVRRFRKDLSTCWIDYKKAYDSVPHTWLMRVLELYKVNTTLRTFLMSCMGQWRTVLRYPGCRNIQRNSEPIRIERGIFQGDSLSPLWFCLALNPLSTLLEDSGLGYRLRRGGQVISHLLYMDDLKLFAPNNLRLMELLKITEIFSSAMRMEFGVDKCAVMHVKRGEIVESVGTQLSDSTNLRALSASETYKYLGMSEALGINVTDMKQSLKERFFGRLKKVFNSLLSGGNKVRAFNSWVMPVLMYSFGILKWTQTELDALDRKVRTLLTANRMHHPRSSVMRLFIPRKCGGRGFLNAKTLHNREICSLREYFLETDVGMHRDVVAVNKGLTPLSLGKENWRKPVVLDTNDRMEVWQSKELHGRFFRALHGPDVDLLASVAWLRFGDLFGETEGFVYAIMDEVMMTNNYRRFIVKDGTVDICRACHRPGESIRHIISGCSRLANGEYLHRHNLVARIIHQQLALKYSLVESEVPYYRYVPDPVLENGNITLYWDRSIITDRTIVANKPDIVVVDRSERRAMIVDITVPHDENLVKAEKDKQVKYLDLAREVVDMWDVDSAIIVPIVVTANGLIAKSLDQHLKRLSLGSWIKGLIQKAVLLDTARIVRRFLSLEP

SEQ ID NO: 11722 - protein, 1198 aa, Mesoligia furuncula
MLTRSALRKARLPPPDSSLSSASPPPVPSLTVSAVTTPAVAVASSSSDEYFSPPTTPPPARRRGGRRPPDGLGPRGPPASDRVPAPGGSVQRMRWTRSINENVMRSYYGATEGGNNLTAYRVRMLSLFQVLEPAVNVSAQRLSDQVRVIQRNHMLDDTVLDRLRSEMQSSHVIAPQPQTAVLLPQCNTIHADEGSNDRATNVSTQCNEELRSALEDAIREYRFMSPEHRPRLPRLPMHNKNRALVAALDSQLSNYFDDCEDLTDTHSILYCAAVAACRVAHVKFANDSRATRPKPAIPAWQCRIERRIGGARALIGKLICFREGNTRPRVMRFVRRAFLGTDISPRDYMSCVTERIDFLKQKVYAWANRIRRYKRRVERYTQNRTFQSDERWVYRGWERPDQSVADTCLPDDEAMCSFWRSIWSVPVSHTEGDWAREVERACDPIPEMGAITICPQDVARAVRPLPNWKSPGPDGLHNFWIKWFLRSHARLASQFQTALESGSLPQFLTTGITHLLHKSGSTAEPKNYRPITCLPTVYKVLTSILRAKIDKHINTNSIMSVSQNGCKNGSRGTKELLLIDMAISQQVRRSRKDLSTCWIDYKKAYDSVPHTWLMRVLELYKVDATLRTFLMSCMGQWRTVLRYPGCRNIQRNSEPIRIERGIFQGDSLSPLWFCLALNPLSTLLEDSGLGYRLRRGGQVISHLLYMDDLKLFAPNNLQLMELLKVTQTFSSAIRMEFGVDKCAVMHVKRGEIVESVGTQLSDSTNLRALSASETYKYLGMSEALGINVTDMKQSLKERFFGRLKKVLNSLLSGGNKVRAFNGWVMPVLMYSFGILKWTQTELDALDRRVRTLLTANRMHHPRSSVMRLYIPRKCGGRGFLNAKTLHNREICSLREYFLETDVGMHRDVVAVDKGLTPLSLAKENWRKPVVLDTNDRMEVWQSKELHGRFFRALHGPDVDLLASVAWLRFGDLFGETEGFVCAIMDEVMMTNNYRRFIVKDGTVDICRACHRPGESIRHIISGCSRLANGEYLHRHNLVARIIHQQLALKYSLVESEVPYYRYVPDPVLENGNISLYWDRSIITDRTIVANKPDIVVVDRSERRAMIVDITVPHDENLVKAEKDKQIKYLDLAREVVDMWDVDSAIIVPIVVTANGLIAKSLDQHLRRLSLGSWIKGLIQRAVLLDTARIVRRFLSLEP

SEQ ID NO: 11723 - protein, 1206 aa, Mesoligia furuncula
MLTRSRARHLLKNTHPTSSGSSLSSASQLPDPAPDVSSVRPAAAVASSSSDEYFSPPTTPPPVCRRGRGRPPASLGLRGPPASDRVPAPGGSVQRMRWTQTVNENVMRAYFGATEGGSNLTAYRGRMLSLFQVLEPAVNVSAQRLSDQVRVIQRNHMLDNVVLDRLRLESRNSHVTPASSLIAVQLQNVPSVSPRPDHVYVEDDDEAITVSSQCNARLRSALEDAFREYRSIPPELRPRLPRLPMHKKNKALVCALDSQLSNCFNNSKDLTDTHSILYCAAVAACRVAHVKFPNSDRAPRPKPAVPAWQCRIECRIGEARALIGKLICFREGNTRPRVMRFVRRAFSGTDISSRDYLSRVTERIDFLKQKIYAWANRIRRYRRRVERYTQNRTFQNDERWVYRAWERPDQGVTDTPLPDDDAMCSFWRNIWSVPVSHTEGDWTAKIERACDLIPEMGVLTISPQDVARAVRPLPNWKSPGPDGLHNFWIKWFQGSHARLASQFQSALESGSLPQFLTTGITHLLHKSGSTADPKNYRPITCLPTVYKVLTSILRAKINKHIDTNSIMSVSQNGCRNGSRGTKELLLIDMTISQQVRRFRKDLSTCWIDYKKAYDSVPHTWLMRVLELYKVDTTLRTFLMSCMGQWRTVLRYPGCRNIQRNSEPIRIERGIFQGDSLSPLWFCLALNPLSTLLEDSGLGYRLRRGGQVISHLLYMDDLKLFAPNNLRLMELLKITETFSSAIRMEFGVDKCAVMHVKRGEIVESVGTQLSDSTNLRALSASETYKYLGMSEALGINVTDMKQSLKERFFGRLKKVFNSLLSGGNKVRAFNSWVMPVLMYSFGILKWTQTELDALDRKVRTLLTANRMHHPRSSVMRLYIPRKCGGRGFLNAKTLHNREICSLREYFLETDVGMHRDVVAVDKGLTPLSLGKENWRKPVVLDTNDRMEVWQSKELHGRFFRALHGPDVDLLASVAWLRFGDLFGETEGFVYAIMDEVMMTNNYRRFIVKDGTVDICRACHRPGESIRHIISGCSRLANGEYLHRHNLVARIIHQQLALKYSLVESEVPYYRYVPDPVLENGNITLYWDRSIITDRTIVANKPDIVVVDRSERRAMIVDITVPHDENLVKAEKDKQVKYLDLAREVVDMWDVDSAIIVPIVVTANGLIAKSLDQHLKRLSLGSWIKGLIQKAVLLDTARIVRRFLSLEP

SEQ ID NO: 11724 - protein, 1206 aa, Mesoligia furuncula
MLTRSRARHLLKNTHPTSSGSSLSSASQLPDPAPDVSSVRPAAAVASSSSDEYFSPPTTPPPVCRRGRGRPPASLGLRGPPASDRVPAPGGSVQRMRWTQTVNENVMRAYFGATEGGSNLTAYRGRMLSLFQVLEPAVNVSAQRLSDQVRVIQRNHMLDNVVLDRLRLESRNSHVTPASTLIAVQLQNVPSVSPRPDHVYVEDDDEAITVSSQCNARLRSALEDAFREYRSIPPGLRPRLPRLPMHKKNKALVCALDSQLSNCFKNSKDLTDTHSILYCAAVAACRVAHVKFPNSDRAPRPKPAVPAWQCRIECRIGEARALIGKLICFREGNTRPRVMRFVRRAFSGTDISSRDYLSRVTERIDFLKQKIYAWANRIRRYRRRVERYTQNRTFQNDERWVYRAWERPDQGVTDTRLPDDDAMCSFWRNIWSVPVSHTEGDWTAKIERACDLIPEMGVLTISPQDVARAVRPLPNWKSPGPDGLHNFWIKWFQGSHARLASQFQSALESGSLPQFLTTGITHLLHKSGSTADPKNYRPITCLPTVYKVLTSILRAKINKHIDTNSIMSVSQNGCKNGSRGTKELLLIDMTISQQVRRFRKDLSTCWIDYKKAYDSVPHTWLMRVLELYKVDTTLRTFLMSCMGQWRTVLRYPGCRNIQRNSEPIRIERGIFQGDSLSPLWFCLALNPLSTLLEDSGLGYRLRRGGQVISHLLYMDDLKLFAPNNLRLMELLKITETFSSAISMGFGVDKCAVMHVKRGEIVESVGTQLSDSTNLRALSASETYKYLGMSEALGINVTDMKQSLKERFFGRLKKVFNSLLSGGNKVRAFNGWVMPVLMYSFGILKWTQTELDALDRKVRTLLTANRMHHPRSSVMRLYIPRKCGGRGFLNAKTLHNREICSLREHFLETDVGMHRDVVAVDKGLTPLSLGKENWRKPVVLDTNDRMEVWQSKELHGRFFRALHGPDVDLLASVAWLRFGDLFGETEGFVYAIMDEVMMTNNYRRFIVKDGTVDICRACHRPGESIRHIISGCSRLANGEYLHRHNLVARIIHQQLALKYSLVESEVPYYRYVPDPVLENGNITLYWDRSIITDRTIVANKPDIVVVDRSERRAMIVDITVPHDENLVKAEKDKQVKYLDLAREVVDMWDVDSAIIVPIVVTANGLIAKSLDQHLKRLSLGSWIKGLIQKAVLLDTARIVRRFLSLEP

SEQ ID NO: 11725 - protein, 1197 aa, Spilarctia lutea
MLTRAKLRAQLSPSDSSLRSALPPMEATVEVSAVHEASSSSSSDEYFSPPTSPTPVRRQGRGRPPTSMGSRGPLTSNRAPATGGDVRRMKWTHCINENVMRAYFRATELGTNLTAYRVRLVSMFQELEPAVNVSAQRLSDQVRAIQRCRLLDDAVLERIRSDVRNTLTIPSSSHSVDVVVNTPQLPCNDDVDEQRESEIISVSTQYNDRIRSALEDAIQEYRYVNYNNRPRLPRLPIHKRNLALVGALNSLLPDYFGNSEDLGDTHSILYCAAIAVCRVAGVKFIERITTRTKNTMPAWQYRIERRIAVTKTLIGKLIAFKSGNTRPRVMRFVKQAFLGTTISPQQYMSSVTERIDFLKQKVCAWANRIRRFKKRGDRFNQNRMFQTNEKWVYRKWEAPNPCDRDGHLPDENATNTFWRNIWSVPVTHTDGDWMRDVKRSCESITNMKPVSIDREDVSCAVRSLPNWKAPGPDGLHNFWLKWFRSSHACLASQFQTALDSGSLPQFLTTGITHLLYKSGSTMDPKNFRPITCLPTLYKLLTSILRLKITTHINHNSIFSISQNGCRSGTRGTKELLIIDMTISQQVRRNRKSLATCWIDYKKAYDSVPHTWLLRVLELYKIDTTLCTFLKSCMGQWRTVLRYPGCRQSAMNDVLIKIERGIFQGDSLSPLWFCLALNPLSTLLEGSELGYGLRKDDRVISHLLYMDDLKLLAPTKLQLTALLKITENFSNSIKMEFGVDKCAVMYVKKGLIVESEGVELSDSSKLRSLSATESYKYLGFSQSLGMPESDMKQALRERFFGRLKKVLKSLLSGGNKVRACNGWVMPVLMYSFGILRWTQTELDALDRRVRTLLTAFRMHHPRSSVMRLYIPRKLGGRGLLNIKTLHNREIYNLREYFLHTDVGMHRSVVAVDTGLTPLALAKENWRKPVVLSTDDRREVWKGKELHGRFYRALHGPDIDFKTSTSWLRYGDLFGETEGFVCAIMDEVIMTNNYRKYILRDGTVDICRACHRPGESIRHIISGCSRLANGEYLHRHNQVARIVHKQLALKYHLVNSEVPYYRYVPDPVLENGRATLYWDRSIITDRTIVANKPDIVVMDRLERRAIIIDIAVPHDENLVKVEKEKQIKYLDLSHEIVDMWNVDSVIIVPIVVSAHGLIAKSLDQHLKRLTLEGWIKGLIQKAVLLDTARIVRRFLSLEP

SEQ ID NO: 11726 - protein, 1199 aa, Spilarctia lutea
MLTRARRRAQLSPPDSSLRSALPSPEEAIEVPAGAEASSSSSSDEFFSPPTSPIPVRRQGRGRPPTSLGSRGPLTSNRAPAAGGDVRRMKWTHSINENVMRAYFRATELGTNLTAYRVRLVSLFQELEPAVNVSAQRLSDQVRAIQRCHLLDDAALERIRSDIRNSLTVPSSSHVLNVVTNSTPQVPQNDDISELVDSEIISVSTQYNDRIRSTLEDAIREYRYVNLNNRPRLSRLPIHKRNLALVSALDSLLPKYFSNSEDLSDTHSILYCAAIAVCRVAGVKFTEYTTTTRQENTLPAWQYRIERRIAEARTLIGKLMSFRSGNTRPRVMRFVKRAFLGTTISPQEYMSCVTERIDFLKQKVYAWANRIRRYRKRVDRYNQNRMFQRNERWVYRKWENLSPCVSDGQVPDENATNSFWRNMWSVPVTHTEGDWYRDVERSCESLLPMEPISIDEEDVSCAVRSLPNWKAPGPDGLHNFWLKWFRSSHACLASQFQTALDSGSLPQFLTTGITHLLYKSGDAMDPENFRPITCLPTLYKLLTSILRLKITTHINHNSILSISQNGCRSGTRGTKELLIIDMTISQQVRRNRKSLATCWIDYKKAFDSVPHTWLLRVLELYKIDTTLCTFLRVCMGQWRTALRYPGCRQSAMNDVLIKIERGIFQGDSLSPLWFCLALNPLSTLLEGSGLGYRLQKDDRVISHLFYMDDLKLLAPTKLQLTALLKVTENFSNSIKMGFGVDKCAVMYVKKGEIVESEGIELSDSTKLRSLSATETYKYLGFSQSLGMPESDMKQTLRERFFSRLKKVLKSLLSGGNKVRACNGWVMPVLMYSFGVLRWTQTELDAIDRRVRTLLAAFRMHHPRSSVMRLYIPRRLGGRGLLNIKTLHNREVYNLREYFLQTDVGVHRSVVTVDTGLTPLALAKENWRKPVVLSTNDRREVWKGKVLHGRFYRALNGPDIDFKASTSWLRYSDLFGETEGFVCAIMDEVIMTNNYRKYILKDGTVDICRACHRPGESIRHIISGCSRLANGEYLHRHNQVARIVHQQLALKYNLVISEVPYYRYVPDPVLENGRATLYWDRSIITDRTIVANKPDIVVIDRLERRAMIVDIAVPHDENLVKVEKEKQIKYLDLSHEIVDMWNVDSVIIVPIVVSAHGLIAKSLDQHLKRLTLGGWIKGLIQKAVLLDTARIVRRFLSLEP

SEQ ID NO: 11727 - protein, 1199 aa, Xestia c-nigrum
MLTRAAARRARLPPPDPSLSSASPPPEPSPIVSAVTPAVAVASSSSDEYFSPPTTPPPARRRGGRRPPDGLGPRGPPASDRVPAPGGSVQRMRWTKSNNENVMRAYYGATEGGINLTAYRVRMLSLFQVLEPAVNVSAQRLSDQVRVIQRNRMLDDTVLDRLRTEVQSSRVTATPPSQAVVPPQSTVTTPYCDGDVSSDMVTNVSTQCSEDMRSALEGAIREYRFMTPELRPRLPRLPMHNKNKMLMAVLDSQLSNYFDSCEDLTDIHSILYCAAVAACRVAHVKFSDDRATRPKPAVPAWQYRIEQRIGGARALIGKLICFREGNTRPRVMRFVRRAFSGTDISPRDYMFRVTERIDFLKQKVYAWASRIRRYKRRVDRYTQNRTFQRDERWVYRAWERPDQGVADTRLPDDDAMCSFWRSIWSVPVSHAEGEWTRVVERACDPVPEMGAITISPQDVACAVRPLPNWKSPGPDGLHNFWIKWFTRSHARLATLFQSALESGSLPEFLTTGITHLLHKSGSTAEPKNYRPITCLPTVYKVLTSILRAKITKHIDENSVMSASQNGCRNGSRGTKELLLIDMAISQQVRRSRKDLSTCWIDYKKAYDSVPHTWLRRVLELYKVDATLRTFLMSCMGQWRTVLCYPGCRQIQRNSEPIRIERGIFQGDSLSPLWFCLALNPLSTLLEDSGLGYRLRKDGRVISHLLYMDDLKLFAPNDFQLMELLKVTETFSSAIRMEFGVEKCAVMHVKRGGIVESVGTQLSDSINLRSLSATETYKYLGMSEALGISVADMKQSLKERFFGRLKKVFNSLLSGGNKVRAFNGWVMPVLMYSFGILKWTQTELDALDTKVRKLLTAYRMHHPRSSVMRLYIPRKCGGRGFLNAKTLHNREICSLREYFLAADVGMHRDVVAMDKGLTPLSLAKENWRIPVVFTTDDRRKEWQSKELHGRFYLALHGPDVDFQASVSWLRSGDLFGETEGFVCAIMDEVMMTNNYRRFIVKDGTVDICRACHRPGESIRHIISGCSRLANGEYLHRHNLVARIIHQQLALKYNLVESEVPYYRYVPDPVLVNGSITLYWDQSIITDRTVIANRPDIVVMDRSERRAMIVDITVPHDENLVKAEKDKQIKYLDLAREVVDMWEVDSAIIVPIVVSAHGLIAKSLDQHLRRLSLGSWIKGLIQKAVLLDTARIVRRFLSLEP

SEQ ID NO: 11728 - protein, 1199 aa, Xestia c-nigrum
MLTRAAARRARLSPPDPSLSSASPPPEPSPIVSAVTPAVAVASSSSDEYFSPPTTPPPARRRGGRRPPDGLGPRGPLASDRVPAPGGSVQRMRWTQSNNENVMRAYYGATEGGINLTAYRVRMLSLFQVLEPAVNVSAQRLSDQVRVIQRNRMLDDTVLDRLRTEVQSSRVTATPPSQAVVPPQSTVTTPYCDGDVSSDMVTNVSTQCSEDMRSALEGAIREYRFMTPELRPRLPRLPMHNKNKMLMAVLDSQLSNYFDSCEDLTDIHSILYCAAVAACRVAHVKFSDDRATRPKPAVPAWQYRIEQRIGGARALIGKLICFREGNTRPRVMRFVRRAFSGTDISPRDYKFRVTERIDFLKQKVYAWASRILRYKRRVDRYTQNRTFQRDERWVYRAWERPDQGVADTRLPDYDAMCSFWRSIWSVPVSHAEGEWTRVVERACDPVPEMGAITISPQDVACAVRPLPNWKSPGPDGLHNFWIKWFTRSHARLATLFQSALESGSLPEFLTTGITHLLHKSGSTAEPKNYRPITCLPTVYKVLTSILRAKITKHIDENSVMSASQNGCRNGSRGTKELLLIDMAISQQVRRSRKDLSTCWIDYKKAYDSVPHTWLRRVLELYKVDATLRTFLMSCMGQWRTVLRYPGCRQIQRNSEPIRIERGIFQGDSLSPLWFCLALNPLSTLLEDSGLGYRLRKDGRVISHLLYMDDLKLFAPNDLQLMELLKVTETFSSAIRMEFGVDKCAVMHVKRGGIVESVGTQLSDSINLRSLSATETYKYLGMSEALGISVADMKQSLKERFFGRLKKVFNSLLSGGNKVRAFNGWVMPVLMYSFGILKWTQTELDALDTKVRKLLTAYRMHHPRSSVMRLYIPRKCGGRGFLNAKTLHNREICSLREYFLAADVGMHRDVVAMDKGLTPLSLAKENWRIPVVFTTDDRRKEWQSKELHGRFYRALHGPDVDFQASVSWLRSGDLFGETEGFVCAIMDEVMMTNNYRRFIVKDGTVDICRACHRPGESIRHIISGCSRLANGEYLHRHNLVARIIHQQLALKYNLVESEVPYYRYVPDPVLNSGSITLYWDQSIITDRTVIANRPDIVVMDRSERRAMIVDITVPHDENLVKAEKDKQIKYLDLAREVVDMWEVDSAIIVPIVVSAHGLIAKSLDQHLRRLSLGSWIKGLIQKAVLLDTARIVRRFLSLEP

SEQ ID NO: 11729 - protein, 1198 aa, Xestia c-nigrum
MLTRAAARRARLPPPDPSLSSASPPPEPSPIVSAVTPAVAVASSSSDEYFSPPTTPPPVRRRGGRRPPDGLGPRGPPASDRVPAPGGSVQRMRWTQSNNENVMRAYYGATEGGNNLTAYRVRMLSLFQVLEPAVNVSAQRLSDQVRVIQRNRMLDDTVLDRLRTEMHSSHVIATPPSQAVVPPQSTTITNRDDDVSSDMITNVGTQYSEDMRSALEGAIREYRFMTPELRPRLPRLPMHNKNRMLVAVLDSQLSNYFDNCEDLTDVHSVLYCAAVAACRVARVKFPDDRATRPKPAVPAWQYRIEQRIGGARALIGKLICFREGNTRPRVMRFVRRAFSGTDINPRDYMSRVTERIDFLKQKVYAWASRIRRYKRRVDRYAQNRTFQRDERWVYRAWERPDQGVADTRLPDDDAMCSFWRSIWSVPVSHAEGEWTRVVERACDPVSEMGAITISPQDVACAVRPLPNWKSPGPDGLHNFWIKWFTRSHARLATLFQSALESGSLPEFLTTGITHLLHKSGSTAEPKNYRPITCLPTVYKVLTSILRAKITKHIDENSVMSASQNGCRNGSRGTKELLLIDMAISQQVRRSRKDLSTCWIDYKKAYDSVPHTWLMRVLELYKVDATLRTFLMSCMGQWRTVLRYPGCRQIQRNSEPIRIERGIFQGDSLSPLWFCLALNPLSTLLEDSGLGYQLRKDGRVISHLLYMDDLKLFAPNDFQLMELLKVTETFSSAIRMEFGVDKCAVMHVKRGEIVESVGTQLSDSINLRSLSATETYKYLGMSEALGINVADMKQSLKERFFGRLKKVFNSLLSGGNKVRAFNGWVMPVLMYSFGILKWTQTELDALDTKVRKLLTAFRMHHPRSSVMRLYIPRKCGGRGFLNAKTLHNREICSLRDYFLEADVGMHRDVVAMDKGLTPLSLAKENWRKPIILTTDDRRKEWQGKELHGRFYRALHGPDVDFLASVSWLRSGDLFGETEGFVCAIMDEVMMTNNYRRFIVKDGTVDICRACHRPGESIRHIISGCSRLANGEYLHRHNLVARIIHQQLALKYNLVESEVPYYRYVPDPVLVNGSITLYWDQSIITDRTVIANRPDIVVMDRSERRAMIVDITVPHDENLVKAEKDKQIKYLDLAREVVDMWEVDSAIIVPIVVSAHGLIAKSLDQHLRRLSLGSWIKGLIQKAVLLDTARIVRRFLSLEP

SEQ ID NO: 11730 - protein, 988 aa, Xestia c-nigrum
MRSALEGAIREYRFMTPELRPRLPRLPMHNKNRMLVAVLDSQLSNYFDNCEDLTDVHSVLYCAAVAACRVARVKFPDDRATRPKPAVPAWQYRIEQRIGGARALIGKLICFREGNTRPRVMRFVRRAFSGTDINPRDYMSRVTERIDFLKQKVYAWASRIRRYKRRVDRYTQNRTFQRDERWVYRAWERPDQGVADTRLPDDDAMCSFWRSIWSVPVSHAEGEWTRVVERACDPVSEMGAITISPQDVACAVRPLPNWKSPGPDGLHNFWIKWFTRSHARLATLFQSALESGSLPEFLTTGITHLLHKSGSTAEPKNYRPITCLPTVYKVLTSILRAKITKHIDENSVMSASQNGCRNGSRGTKELLLIDMAISQQVRRSRKDLSTCWIDYKKAYDSVPHTWLMRVLELYKVDATLRTFLMSCMGQWRTVLRYPGCRQIQRNSEPIRIERGIFQGDSLSPLWFCLALNPLSTLLEDSGLGYQLRKDGRVISHLLYMDDLKLFAPNDFQLMELLKVTETFSSAIRMEFGVDKCAVMHVKRGEIVESVGTQLSDSINLRSLSATETYKYLGMSEALGINVADMKQSLKERFFGRLKKVFNSLLSGGNKVRAFNGWVMPVLMYSFGILKWTQTELDALDTKVRKLLTAFRMHHPRSSVMRLYIPRKCGGRGFLNAKTLHNREICSLRDYFLEADVGMHRDVVAMDKGLTPLSLAKENWRKPIILTTDDRRKEWQGKELHGRFYRALHGPDVDFLASVSWLRSGDLFGETEGFVCAIMDEVMMTNNYRRFIVKDGTVDICRACHRPGESIRHIISGCSRLANGEYLHRHNLVARIIHQQLALKYNLVESEVPYYRYVPDPVLVNGSITLYWDQSIITDRTVIANRPDIVVMDRSERRAMIVDITVPHDENLVKAEKDKQIKYLDLAREVVDMWEVDSAIIVPIVVSAHGLIAKSLDQHLRRLSLGSWIKGLIQKAVLLDTARIVRRFLSLEP

SEQ ID NO: 11731 - protein, 1198 aa, Xestia c-nigrum
MLTRAAARRARLPPPDPSLSSASPPPEPSPIVSAVTPAVAVASSSSDEYFSPPTTPPPARRRGGRRPPDGLGRRGPPASDRVPAPGGSVQRMRWTQSNNENVMRAYYGATEGGNNLTAYRVRMLSLFQVLEPAVNVSAQRLSDQVRVIQRNRMLDDTVLDRLRTEMHSSHVIATPPSQAVVPPQSTTITYRDDDVSSDMITNVSTQYSEGMRSALEGAIREYRFMTPELRPRLPRLPMHNKNRMLVAVLDSQLSNYFDNCEDLTDVHSILYCAAVAACRVARVKFSDDSATRPKPAVPAWQYRIEQRIGGARALIGKLICFREGNTRPRVMRFVRRAFSGTDINPRDYMSRVTERIDFLKQKVYAWASRIRRYKRRVDRYTQNRTFQRDERWVYRAWERPDQGVADTRLPDDDAMCSFWRSIWSVPVSHAEGEWTRVIERACDPVPEMGAITISPQDVACAVRPLPNWKSPGPDGLHNFWIKWFTRSHARLATLFQSALESGSLPEFLTTGITHLLHKSGSTAEPKNYRPITCLPTVYKVLTSILRTKICKHVDDNSVMSASQNGCRNGSRGTKELLLIDMAISQQVRRSRKDLSTCWIDYKKAYDSVPHTWLMRVLELYKVDATLRTFLMSCMGQWRTVLRYPGCRQIQRNSEPIRIERGIFQGDSLSPLWFCLALNPLSTLLEDSGLGYQLRKDGRVISHLLYMDDLKLFAPNDLQLMELLKVTETFSSAIRMEFGVDKCAVMHVKRGEIVESVGTQLSDSINLRSLSATETYKYLGMSEALGINVADMKQSLKERFFGRLKKVFNSLLSGGNKVRAFNGWVMPVLMYSFGILKWTQTELDALDTKVRKLLTAFRMHHPRSSVMRLYIPRKCGGRGFLNAKTLHNREICSLRDYFLEADVGMHRDVVTMDKGLTPLSLAKENWRKPIILTTDDRRKEWQGKELHGRFYRALHGPDVDFLASVSWLRSGDLFGETEGFVCAIMDEVMMTNNYRRFIVKDGTVDICRACHRPGESIRHIISGCSRLANGEYLHRHNLVARIIHQQLALKYNLVESEVPYYRYVPDPVLVNGSITLYWDQSIITDRTVIANRPDIVVMDRSERRAMIVDITVPHDENLVKAEKDKQIKYLDLAREVVDMWEVDSAIIVPIVVSAHGLIAKSLDQHLRRLSLGSWIKGLIQKAVLLDTARIVRRFLSLEP

SEQ ID NO: 11732 - protein, 1106 aa, Griposia aprilina
MRWTRSINENVIRSYYGATEGGSNLTAYRVRMLSLFQVLEPAVNVSAQRLSDQVRVIQRNHMLDDTVLDRLRNEMQSSHVIAPPSQTVVVLPQSNTSQADEESDNRATNVSTQCNDDLRSALEDAIREYRFISPELRPRLPRLPMHNKNRVLVAALDAQLSNYFDDCVDLTDTHSILYCAAVAACRVAHVKFANDSRATRPKPAVPAWQCRIERRIGGARALIGKLICFREGNTHPRVMRFVRRAFAGTNISPQDYMSCVTERIDFLEQKVYAWANRIRRYKRRVERYTQNRTFQRNERWVYRGWERPGQGVADTCLPDDDAMCSFWRNIWSVPVSHTEGDWAREVERAGDPIPEMGAISICPQDITRAVRPLPNWKSPGPDGLHTFWIKWFGRSHARLAAQYQVALESGSLPQFLTTGVTHLLHKSGSTAEPKNYRPITCLPTVYKVLTSILRAKINKHIDTNSIMSPSQNGCRNGSRGTKELLLIDMAISQQVRRSRKDLSTCWIDYKKAYDSVPHTWLVRVLELYKVDATLRTFLKSCMGQWRTVLHYPGCRNIQRDNEPIRIERGIFQGDSLSPLWFCLALNPLSTLLEDSGLGYQLRRGGQVISHLLYMDDLKLFAPNNFQLMELLKVTETYSSAIRMEFGVDKCAVMHVKRGEIVESVGTQLSDSINLRALSASETYKYLGMSEALGINGTDMKQSLKERFFGRLKKVFNSLLSGGNKVRAFNGWVMPVLMYSFGILKWTQTEFDALDKKVRSLLTANRMHHPRSSVMRLYIPRKCGGRGFLNAKTLHNREICSLREYFLEADVGMHRDVVTVDKGLTPLSLAKENWRKPVVLDTNDRMEVWQSKELHGRFFRALHGPNVDQLASVAWLRFGDLFGETEGFVCAIMGEVILTNNYRRHIVKDATVDVCRACHRPGESIRHIISGCSRLANEKYLHRHNLVARIIHQQLALKYSLVESEVPYYRYVPDPVLENGHITLYWDRSIITDRTIVANKPDIVVVDRLERRAMIVDITVPHDGNLVKAEKDKQIKYLDLAREVVDMWDVDSAIIVPIVVRANGLIVKSLDQHLRRLSLGSWIKGLIQKAVLLDTARIVRRFLSLEP

SEQ ID NO: 11733 - protein, 1198 aa, Griposia aprilina
MLTRSAARRARPPPPDSSLSSASLPPVSSPTVSAVTTPAAVVASSSSDEYFSPPTTPPPVRRRGGHRPPDGLGPRGPPASDRVPAPGGSVQRMRWTRSINENVMRSYYGATEGGNNLTAYRVRMLSLFQVLEPAVNVSAQRLSDQVRVIQRNHMLDDTVLDRLRNEMQSSHVIAPPSQTVVVLPQPNTSQADEESDDRATNVSTQCNDELRSALEDAIREYRFISPELRPRLPRLPMHNKNRVLVAALDAQLSNYFDDCVDLTDTHSILYCAAVAACRVAHVKFANDSRATRPKPAVPAWQCRIERRIGEARALIGKLICFREGNTRPRVMRFVRRAFAGTNISPQDYMSCVTERIDFLKQKVYAWANRIRRYKRRVERYTQNRTFQRDERWVYRGWERPDQGVADTCLPDDDAMCSFWRNIWSVPVSHTEGDWTREVERACDPIPEMGAITICPQDVTRAVRPLPNWKSPGPDGLHNFWIKWFGRSHARLAAQYQVALESGSLPQFLTTGVTHLLHKSGSTAEPKNYRPIACLPTVYKVLTSILRDKINKHIDTNYIMSPSQNGCRNGSRGTKELLLIDMAISQQVRRSRKDLSTCWIDYKKAYDSVPHTWLMRVLELYKVKATLRTFLMSCMGQWRTVLHYPACRNTQRNSEPIRIERGIFQGDSLSPLWFCLALNPLSTLLEDSGLGYRLRRGGQVISHLLYMDDLKLFAPNNSQLMDLLKVTETFSSAIRMEFGVDKCAVMHVKRGEIVESVGTQLSDSINLRALSASETYKYLGMSEALGINGTDMKQSLKDRFFGRLKKVFNSLLSGGNKVRAFNGWVMPVLMYSFGILKWTQTELDALDRKVRTLLTANRMHHPRSSVMRLYIPRKCGGRGFLNAKTLHNREICSLREYFLEADVGMHRDVVTVDKGLTPLSLAKENWRKPVVLDTNDRMEVWQSKELHGRFFRALHGPDVDQLASVAWLRFGDLFGETEGFVCAIMDEVMMTNNYRRFIVKDGTVDICRACHRPGESIRHIISGCSRLANEEYLHRHNLVARIIHQQLALKYSLVESEVPYYRYVPDPVLENGHITLYWDRSIITDRTIVANKPDIVMVDRLERRAMIVDITVPHDGNLVKAEKDKQIKYLDLAREVVDMWDVDSAIIVPIVVTANGLIAKSLDQHLRRLSLGSWIKGLIQKAVLLDTARIVRRFLSLEP

SEQ ID NO: 11734 - protein, 1198 aa, Griposia aprilina
MLTRSAARRARPPPPDSSLSSASLPPVSSPTVSAVTTPAAVVASSSSDEYFSPPTTPPPVRRRGGHRPPDGLGPRGPPASDRVPAPGGSVQRMRWTRSINENVMRSYYGATEGGNNLTAYRVRMLSLFQVLEPAVNVSAQRLSDQVRVIQRNHMLDDTVLDRLRNEMQSSHVIAPPSQTVVVLPQSNTSQADKESDDRATNVSTQCNDELRSALEDAIREYRFISPELRPRLPRLPMHNKNRVLVAALDAQLSNYFDDCVDLTDTHSILYSAAVAACRVAHVKFANDSRATRPKADVPAWQCRIERRIGGARALIGKLICFREGNTRPRVMRFVRRAFAGTNISPQDYMSCVTERIDFLKQKVYAWANRIRRYKRRVERYTQNRTFQRDERWVYRGWERPDQGVADTCLPDDDAMCSFWRNIWSVPVSHTEGDWTREVERACDPIPEMGAITICPQDVTRAVRPLPNWKSPGPDGLHNFWIKWFGRSHARLAAQYQVALESGSLPQFLTTGVTHLLHKSGSTAAPKNYRPIACLPTVYKVLTSILRDKINKHIDTNYIMSPSQNGCRNGSRGTKELLLIDMAISQQVRRSRKDLSTCWIDYKKAYDSVPHTWLMRVLELYKVEATLRTFLMSCMGQWRTVLRYPACRNTQRNSEPIRIERGIFQGDSLSPLWFCLALNPLSTLLEDSGLGYRLRRGGQVISHLLYMDDLKLFAPNNSQLMDLLKVTETFSSAIRMEFGVDKCAVMHVKRGEIVESVGTQLSDSINLRALSASETYKYLGMSEALGINGTDMKQSLKDRFFGRLKKVFNSLLSGGNKVRAFNGWVMPVLMYSFGILKWTQTELDALDRKVRTLLTANRMHHPRSSVMRLYIPRKCGGRGFLNAKTLHNREICSLREYFLEADVGMHRDVVTVDKGLTPLSLGKENWRKPVVLDTNDRMEVWQSKELHGRFFRALYGPDVDQLASVAWLRFGDLFGETEGFVCAIMDEVMMTNNYRRFIVKDGTVDICRACHRPGESIRHIISGCSRLANEEYLHRHNLVARIIHQQLALKYSLVESEVPYYRYVPDPVLENGHITLYWDRSIITDRTIVANKPDIVMVDRLERRAMIVDITVPHDGNLVKAEKDKQIKYLDLAREVVDMWDVDSAIIVPIVVTANGLIAKSLDQHLRRLSLGSWIKGLIQKAVLLDTARIVRRFLSLEP

SEQ ID NO: 11735 - protein, 1198 aa, Griposia aprilina
MLTRSAARRARPPPPDSSLSSASLPPVSSPTVSAVTTPAAVVASSSSDEYFSPPTTPPPVCRRGGHRPPDGLGPRGPPASDRVPAPGGSVQRMKWTRSINENVMRSYYGATEGGNNLTAYRVRMLSLFQVLEPAVNVSAQRLSDQVRVIQRNHMLDDTVLDRLRNEMQSSHVIAPPSQTVVVLPQSNRSQADEESDDRATNVSTQCNDELRSALEDAIREYRFISPELRPRLPRLPMHNKNRVLVAALDAQLSNYFDDCVDLTDTHSILYCAAVAACRVAHVKFANNSRATRPKPAVPAWQCRIERRIGEAKALIGKLICFREGNTRPRVMRFVRRAFAGTNISPQDYMSCVTERIDFLKQKVYAWANRIRRYKRRVERYTLNRTFQRDERWVYRGWERPDQGVADTCLPDDDAMCSFWRNIWSVPVSHTEGDWTREVERACDPIPEMGAITICPLDVTRAVRALPNWKSPGPDGLHNFWIKWFGRSHARLAAQYQVALESGSLPQFLTTGVTHLLHKSGSTAEPKNYRPIACLPTVYKVLTSILRDKINKHIDTNYIMSPSQNGCRNGSRGTKELLLIGMAISQQVRRSRKDLSTCWIDYKKAYDSVPHTWLMRVLELHKVEATLRTFLMSCMGQWRTVLHYPACRNTQRNSEPIRIERGIFQGDSLSPLWFCLALNPLSTLLEDSGLGYRLRRGGQVIFHLLYMDDLKLFAPNNSQLMDLLKVTETFSSAIRMEFGVDKCAVMHVKRGEIVESVGTQLSDSINLRALSASETYKYLGMSEALGINGTDMKQSLKDRFFGRLKKVFNSLLSGGNKVRAFNGWVMPVLMYSFGILKWTQTELDALDRKVRTLLTANRMHHPRSSVMRLYIPRKCGGRGFLNAKTLHNREICSLREYFLEADVGMHRDVVTVDKGLTPLSLAKENWRKPVVLDTNDRMEVWQSKELHGRFFRALHGPDVDQLASVAWLRFGDLFGETEGFVCAIMDEVMMTNNYRRFIVKDGTVDICRACHRPGESIRHIISGCSRLANEEYLHRHNLVARIIHQQLALKYSLVELEVPYYRYVPDPVLENGHITLYWDRSIITDRTFVANKPDIVMVDRLERRAMIVDITVPHDGNLVKAEKDKQIKYLDLAREVVDMWDVDSAIIVPIVVTANGLIAKSLDQHLRRLSLGSWIKGLIQKAVLLDTARIFRRFLSLEP

SEQ ID NO: 11736 - protein, 1044 aa, Griposia aprilina
MLDDTVLDRLRNEMQSSHVIAPPSQTVVVLPQSNTSQADEESDDRATNVSTQCNDELRSALEDAIREYRFISPELRPRLPRLAMHNKNRVLVAALDAQLSNYFDDCVNLTDTHSILYCAAVAACRVAHVKFANDSRATRPKPAVPAWQCRIERRIGGARALIGKLICFREGNTRPRVMRFVRRAFAGTNISPQDYMSCVTERIDFLKQKVYAWANRIRRYKRRVERYTQNRTFQRDERWVYRGWEQPDQGVADTCLPDDDAMCSFWRNIWSVPVSHTEGDWGREVERACDPIPEMGAISICPQDVTRAVRPLPNWKSPGPDGLQNFWIKWFGRSHARLAAQYQVAIESGSLPQFPTTGVTHLLHKSGSTAEPKNYRPITCLPTVYKVLTSILRAKINKHIDTNSIMSPSQNGCRNGSRGTKELLLIDMAISQQVRRSRKDLSTCWIDYKKANDSVPHTWLVRVLELYKVDATLRTFLKSCMGQWRMILHYPGCRNIQRDNEPIRIARGIFQGDSLSPLWFCLALNPLSTLLEDSGLGYRLRRGGQVISHLLYMDDLKLFAPNNLQLMELLKVTETFSSAIRMQFGVDKCAVMHVKRGKIVEFVGTQLSDSINLRALSASDTYRYLGMSEALGINGTDMKQSLKERFFGRLKKVFNSLLSGGNEVRAFNGWVMPVLMYSFGILKWTQTELDALDRKVRTLPTANRMHHPRSSVMRLYIPRKCGGRGFLNAKTLHNREICSLREYFLEADVGMHRDVVTVDKGLTPLSLAKENWRMPVVLDTNDRMEVWQSKELHGRFFRALHGPDVDQLASVAWLRFGDLFGETEGFVCAIMDEVMITNNYRRFIVKDGTVDICRACHRPGESIRHIISGSSRLANEEYLHRHNLVARIIHQHLALKYSLLESEVPYYRYVPDPVLENGHITLYWDRSIIDRTIVANKPDIVMVDRLERRAMIVDITVPHDGNLVKAEKDKQIKYLDLAREVVDMWDVDSAIIVPIVVTANGLIAKSLDQHLRRLSLGSWIKGLIQKAVLLDTARIVRRFISLEP

SEQ ID NO: 11737 - protein, 1199 aa, Griposia aprilina
MMLTRSAKRRAHPPPPDSSLSSASPPPVSSPTVSAVTTPAAVVASSSSDEYFSPPTTPPPVRRRGGHRPPDGLGPRGPPASDRVPAPGGSVQRMRWTRSINENVMRSYYGATEGGNNLTAYRVRMLSLFQVLEPAVNVSAQRLSDQVRVIQRNHMLDDTVLDRLRNEMQSSHVIAPPSQTVVVLPQSNTSQADEESDDRATNVSTQCNDELRSALEDAIREYRFISPELRPRLPRLPMHNKNRVLVAALDAQLSNYFDDCVDLTDTHSILYCAAVAACRVAHIKFANDSRPTRPKPAVPAWQCRIERRIGGARALIGKLICFREGNTRPRVMRFVRRAFAGTNISPQDYMSCVTERIDFLKQKVYAWANRIRRYKRRVERYTQNRTFQRDERWVYRGWERPDQGVADTCLPDDDAMCSFWRNIWSVPVSHTEGDWGREVERACDPIPEMGAISICPQDVTRAVRPLPNWKSPGPDGLQNFWIKWFGRSHARLAAQYQVAIESGSLPQFLTTGVTHLLHKSGSTAEPKNYRPITCLPTVYKVLTSILRAKINKHIDTNSIMSPSQNGCRNVSRGTKELLLIDMAISQQVRRSRKDLSTCWIDYKKAYDSVPHTWLVRVLELYKVDATLRTFLKSCMGQWRTILHYPGCRNIQRDNEPIRIERGIFQGGSLSPLWFCLALNPLSTLLEDSGLGYRLRRGGQVISHLLYMDDLKLFAPNNLQLMELLKVTETFSSAIRMEFGVDKCAVMHVKRGEIVESVGTQLSYSINLRALSASDTYKYLGMSEALGINGTDMKQSLKERFFGRLKKVFNSLLSGGNKVRAFNGWVMPVLMYSFGILKWTQTELDALDRKVRTLLTANRMHHPRSSVMRLYIPRKCGGRGFLNAKTLHNREICSLREYFLEADVGMHTDVVKVDKGLTPLSLAKENWRKPVVLDTNDRMEVWQSKELHGRFFRALHEPDVDQLASVAWLRFGDLFGETEGFVCAIMDEVILTNNYRRHIMKDGTVDVCRACHRPGESIRHIISGCSRLANEEYLHRHNLVARIIHQQLALKYSLVESEVPYYRYVPDPVLENGHITLYWDRSIITDRTIVANKPDIVVVDRLERRAMIVDITVPHDGNLVKAEKDKQIKYLDLAREVVDMWDVDSAIIVPIVVTANGLIAKSLDQHLRRLSLGSWIKGLIQKAVLLDTARIVRRFLSLEP

SEQ ID NO: 11738 - protein, 1045 aa, Griposia aprilina
MLDDTVLDRLRNEMQSSHVIAPPSQTVVVLPQSNTSQADKESDDRATNVSTQCNDELRSALEDAIREYRFISPELRPRLPRLPMHNKNRVLVAALDAQLSNYFDDCVDLTDTHSILYCAAVAACRVAHVKFANDSRATRPKPAVPAWQCRIERRIGGARALIGKLICFREGNTRPRVMRFVRRAFAGTNISPQDYMSCVTERIDFLKQKVYAWANRIRRYKRRVERYTQNRTFQRDERWVYRGWERPDQGVADTCLPDDDAMCSFWRNIWSVPVSHTEGDWTREVERACDPIPEMGAITICPQDVTRAVRPLPNWKSPGPDGLHNFWIKWFGRSHARLAAQYQVALESGSLPQFLTTGVTHLLHKSGSTAEPKNYRPIACLPTVYKVLTSILRDKINKHIDTNYIMSPSQNGCRNGSRGTKELLLIDMAISQQVRRSRKDLSTCWIDYKKAYDSVPHTWLMRVLELYKVEATLRTFLMSCMGQWRTVLRYPACRNTQRNSEPIRIERGIFQGDSLSPLWFCLALNPLSTLLEDSGLGYRLRRGGQVISHLLYMDDLKLFAPNNSQLMDLLKVTETFSSAIRMEFGVDKCAVMHVKRGEIVESVGTQLSDSINLRALSASETYKYLGMSEALGINGTDMKQSLKDRFFGRLKKVFNSLLSGGNKVRAFNGWVMPVLMYSFGILKWTQTELDALDRKVRTLLTANRMHHPRSSVMRLYIPRKCGGRGFSNAKTLHNREICSLREYFLEADVGMHRDVVTVDKGLTPLSLGKENWRKPVVLDTNDRMEVWQSKELHGRFFRALHGPDVDQLASVAWLRFGDLFGETEGFVCAIMDEVMMTNNYRRFIVKDGTVDICRACHRPGESIRHIISGCSRLANEEYLHRHNLVARIIHQQLALKYSLVESEVPYYRYVPDPVLENGHITLYWDRSIITDRTIVANKPDIVMVDRLERRAMIVDITVPHDGNLVKAEKDKQIKYLDLAREVVDMWDVDSAIIVPIVVTANGLKAKSLDQHLRRLSLGSWIKGLIQKAVLLDTARIVRRFLSLEP

SEQ ID NO: 11739 - protein, 868 aa, Griposia aprilina
MRFVRRAFAGTNISPQDYMSCVTERIDFLKQKVYAWANRIRRCKRRVERYTQNRTFQRDERWVYRGWERPDQGVADTCLPDDDAMCSFWRNIWSVPVSHTEGDWTREVERACDPIPEMGAITICPQDVTRAVRPLPNWKSPGPDGLHNFWIKWFGRSHARLAAQYQVALESGSLPQFLTTGVTHLLHKSGSTAEPKNYRPIACLPTVYKVLTSILRDKINKHIDTNYIMSPSQNGCRNGSRGTKELLLIDMAISQQVRRSRKDLSTCWIDYKKAYDSVPHTWLMRVLELYKVEATLRTFLMSCMRQWRTVLHYPACRNTQRNSEPIRIERGIFQGDSLSPLWFCLALNPLSTLLEDSGLGYRLRRGGQVISHLLYVDDLKLFAPNNSQLMDLLKVTETFSSAIRMEFGVDKCAVMHVKRGEIVESVGTQLSDSINLRALSASETYKYLGMSEALGINGTDMKQSLKDRFFGRLKKVFNSLLSGGNKVRAFNGWVMPVLMYSFGILKWTQTELDALDRKVRTLLTANRMHHPRSSVMRLYIPRKCGGRGFLNAKTLHNREICSLREYFLEADVGMHRDVVTVDKGLTPLSLAKENWRKPVVLDTNDRMEVWQSKELHGRFFRALHGPDVDQLASVAWLRFGDLFGETEGFVCAIMDEVMMTNNYRRFIVKDGTVDICRACHRPGESIRHIISGCSRLANEEYLHRHNLVARIIHQQLALKYSLVESEVPYYRYVPDPVLENGHITLYWDRSIITDRTIVANKPDIVMVDRLERRAMIVDITVPHDGNLVKAEKDKQIKYLDLAREVVDMWDVDSAIIVPIVVTANGLIAKSLDQHLRRLSLGSWIKGLIQKAVLLDTARIVRRFLSLEP

SEQ ID NO: 11740 - protein, 1198 aa, Griposia aprilina
MLTRSAARRARPPPPDSSLSSASLPPVSSPTVSAVTTPAAVVASSSSDEYFSPPTTPPPVRRRGGHRPPDGLGPRGPPASDRVPAPGGSVQRMRWTRSINENVMRSYYGATEGGNNLTAYRVRMLSLFQVLEPAVNVSAQRLSDQVRVIQRNHMLDDTVLDRLRNEMQSSHVIAPPSQTVVVLPQSNTSQADKESDDRATNVSTQCNDELRSALEDAIREYRFISPELRPRLPRLPMHNKNRVLVAALDAQLSNYFDDCVDLTDTHSILYCAAVAACRVAHVKFANDSRATRPKPAVPAWQCRIERRIGGARALIGKLICFREGNTRPRVMRFVRRAFAGTNISPQDYMSCVTERIDFLKQKVYAWANRIRRYKRRVERYTQNRTFQRDERWVYRGWERPYQGVADTCLPDDDAMCSFWRNIWSMPVSHTEGDWTREVERACDPIPEMGAITICPQDVTRAVRPLPNWKSPGPDGLHNFWIKWFGRSHARLAAQYQVALESGSLPQFLTTGVTHLLHKSGSTAEPKNYRPIACLPTVYKVLTSILRDKINKHIDTNYIMSPSQNGCRNGSRGTKELLLIDMAISQQVRRSRKDLSTCWIDYKKAYDSVPHTWLMRVLELYKVEATLRTFLMSCMGQWRTVLRYPACRNTQRNSEPIRIERGIFQGDSLSPLWFCLALNPLSTLLEDSGLGYRLRRGGQVISHLLYMDDLKLFAPNNSQLMDLLKVTETFSSAIRMEFGVDKCAVMHVKRGEIVESVGTQLSDSINLRALSASETYKYLGMSEALGINGTDMKQSLKDRFFGRLKKVFNSLLSGGNKVRAFNGWVMPVLMYSFGILKWTQTELDALDRKVRTLLTANRMHHPRSSVMRLYIPRKCGGRGFLNAKTLHNREICSLREYFLEADVGMHRDVVTVDKGLTPLSLAKENWRKPVVLDTNDRMEVWQSKELHGRFFRALHGPDVDQLASVAWLRFGDLFGETEGFVCAIMDEVMMTNNYRRFIVKDGTVDICRACHRPGESIRHIISGCSRLANEEYLHRHNLVARIIHQQLALKYSLVESEVPYYRYVPDPVLENGHITLYWDRSIITDRTIVANKPDIVMVDRLERRAMIVDITVPHDGNLVKTEKDKQIKYLDLAREVVDMWDVDSAIIVPIVVTANGLIAKSLDQHLRRLSLGSWIKGLIQKAVLLDTARIVRRFLSLEP

SEQ ID NO: 11741 - protein, 964 aa, Griposia aprilina
MNKKNRALVCALDALLPNLIENSADLCDTHSILYCTAVAACRIARVKFPNTDRTAQLKPAAPAWQCRIERRINEARVLIGKLTCFREGNTRPKVMRFVRQAFSGTNISPREYISCVTERIDFLKQKVYAWANRIRRYRRRVDRYTQNRMFQKDERWVYRAWERPIPTQGVTDVLPPDNDTVSAFWRSIWSVPVSHTEGDWMRVVEQACDSIPEMEAISISPLDVARAVRPLPNWKSPGPDGLHNFWIKWLQRSHACLASQFQSSLETGSLPLFFTTGVTHLLHKSGSTAEPKNYRPITCLPTVYKVLTSILRAKIAEHIKNNSIMSVSQNGCKNGSRGTKELLLIDMAISQQVRRSRKDLSTCWIDYKKAYDSVPHTWLIRVLELYKIDATLRTFLISCMGQWRTILLYPGCQQIQRTDEPIRIERGIFQGDSLSPLWFCLALNPLCTLLEDSGLGYRLRRGGQVTSHLLYMDDLKLFAPNNLRLMELLKVTETFSSAIRMEFGVDKCAVMHVKRGGIMESVGTQLSNSIHLRSLSSTETYKYLGMSEALGINAADMKQSLRERFFGRLNKVLNSLLSGGNKVRAFNGWVMPVLMYTFGILKWTQTELDALDRKVRTLLTVYRMHHPRSSVMRLYIPRKCGGRGFLNAKTLHNREICSLREYFLQTDVGMHRDVVAVDKGLTPLYLAKENWRKPAVLDTNDRKEVWQGKELHGRFFRALHGPDVDFLASVSWLRFGDLFGETEGFVCAIMDEVIMTNNYRKYIVKDGTVDICRACHRPGESIRHIVSGCSRLANDEYLHRHNLVARIIHQQLALQYNLVESEVPYYRYVPDPVLENGHTTLYWDRSIITDRTIVANKPDIVVIDRRERRAMIVDIAVPHDENLVKAEKDKKIKYLDLAHEVVDMWGVDSAIIVPIIVSVNGLIAESLDQHLRRLSLRSWVKSLIQRAVLLDTARIVRRFLSLDP

SEQ ID NO: 11742 - protein, 868 aa, Omphaloscelis lunosa
MRFVRRAFLGTDISPQDYMTRVTERIDFLKQKVYAWANRIRRYKRRVERYTQNRTFQSDERWVYRAWERPDQGVADTHLPDDDAMCSFWRSIWSVPVSHTEGDWTREVERACDPIPEMGAITICPQDVARAVRPLPNWKSPGPDGLHNFWIKWFVRSHARLAAQYQTALESGSLPQFLTTGVTHLLHKSGSTAEPKNYRPITCLPTVYKVLTSILRAKINKHIDTNSIMSASQNGSRNGSRGIKELLLIDMAISQQVRRSRKDLSTCWIDYKKAYDSVPHTWLMRVLELYKVHTTLRTFLMSCMGQWRTVLRYPGCRNIQRNSEPIRIERGIFQGDSLSPLWFCLALNPLSTLLEDSGLGYRLRRGGQVISHLLYMDDLKLFAPNNLQLMELLKVTETFSSAIRMEFGVDKCAVMHVKRGEIMESVGTQLSDSINLRALSASETYKYLGMSEALGINVTDMKQSLKERFFGRLKKVLNSLLSGGNRVRAFNGWVMPVLMYSFGILKWTQTELDALDRRVRTLLTAYRMHHPRSSVMRLYIPRKYGGRGFLNAKTLHNREICSLREYFLGVDVGMHRDVVVVDEGLTPLSLAKENWRKPVVLDTKDRMEIWQSKELHGRYFRALHGPDVDLPASVTWLRFGDLFGETEGFVCAIMDEVMMTNNYRRFIVKDGTVDICRACHRPGESIRHIISGCSRLANEEYLHRHNLVARTIHQQLALKYSLVESEVPYYRYVPDPVLENGNITLYWDRSIITDRTIAANKPDIVVVDRGERRTMIIDITVPHDENLVKAEKDKQIKYLDLAREVVDMWDVDSAIIVPIVVTANGLIAKSLDQHLRRLSLGSWIKGLIQRAVLLDTARIVRRFLSLEP

SEQ ID NO: 11743 - protein, 1176 aa, Omphaloscelis lunosa
MLTRSRARKLIDTHPTSSGSSLSSASQLPDPAPNVSPVIPVAAVASSSSDEYFSPPTTPPPTRQRGRGRPPASLGLRGPPASDRVPAPGGSVQRMRWTQTINENVMRAYFGATEGGSNLTAYRGRMLSLFQVLEPAVNVSAQRLSDQVRVIQRNHMLDDVVLDRLRLESRNNNVKPASPLVTVQLQNLTSSSPRPDRVGEEDDDGVISVSSQCNARLRSALEDAFREYRSIPPGLRPHLPRLPMHKKNKALMCTLDSLLSNYFDGSKDLADTHSILYCAAVAACRVAHVKFPNSDRAPRPKPAVPAWQCRIERRIGEARVLIGKLICFREGNTRPRVMRFVKRAFSETDISSQDYLTRVTERIDFLKQKIYAWANRIRRYRRRVERYTQNRTFQSDERWIYRAWERPDQGVIDTRLPDDDAMCTFWRSIWSAPVSHTEGDWTREIERACEQIPEMEALTISPQDIARAVRPLPNWKSPGPDGLHNFWIKWFQRSHARLASQFQSALDSGSLPQFLTTGITHLLHKSGSTAEPKNYRPITCLPTVYKVLTSILRTKINKHINTNSIMSASQNGCKNGSRGTKELLLIDMAINQQVRRSRRDLSTCWIDYKKAYDSVPHTWLMRVLELYKVDATLRTFLMSCMRQWRTVLRYPGCRQILRNSEPIRIERGIFQGDSLSPLWFCLALNPLSTLLEDSGLGYRLRRGGQVISHLLYMDDLKLFAPNNLQLLELLKVTETFSSAIRMEFGVDKCAVMHVKRGEIVESVGTHLSDSIQLRSLSSIETYKYLGMSEALGVNAADMKQSLKERFFNRLNKVLNSLLSGGNKVRAFNGWVMPVLMYSFGILKWTQTELDALDRRVRTLLTANRMHHPRSSVMRLYIPRKCGGRGFLNAKTLHNREVCSLREYFLEADVGMHRDVVTVDKGLTPLSLANENWRKPIVLDTNDRREVWQSKELHGRFYRALHGPDVDLLASVSWLRFGDLFGETEGFVFAIMDEVIMTNNYRKYIVKDGTVDICRACHRPGESIRHIISGCSRLANGDYLHRHNLVARIIHQQLALKYSLVESEVPYYRYVPDPVLENGNITLYWDRSIITDRTTVANKPDIVVIDRLERRTMIIDIAVPHDENLVKAEKDKQIKYFDLAREVVDMWDVDTAIIVPIVVTANGIIAKSLDQHLKRLS

SEQ ID NO: 11744 - protein, 1201 aa, Omphaloscelis lunosa
MLTRLAARRARLPPPDSPLSSASSPPVRSPTVNAVMTPAAAVASSSSDEYFSPSTTPPPARRRGRRRPPDGLGPRGPPASDRVPAPGGSVQRMRWTRSINENVMRSYYGATEGGNNLTAYRVRMLSLFQVLEPAVNVSAQRLSDQVRVIQRNHMLDDTVLDRLRSEMQSSHVIAPPLRSVIIPSQMSSVITSQADERIDDRATNVSTQCNEDLRSALEGAIQEYRFMSPELRPRLPRLPMHNKNKALVAVLDSQLSNYFDDCEDLTDTHSILYCAAVAVCRVAHLKFSNDSRATRPKPAAPAWQCRIERRIGGARTLIGKLICFREGNTRPRVMRFVRRAFLGTDISPQDYMTRVTERIDFLKQKVYAWANRIRRYKRRVERYTQNRTFQSDERCVYRAWERPDQGVADTHLPDDDAMCSFWRSIWSVPVSHTEGDWTREVERACDPIPEMGAITICPQDVARAVRPLPNWKSPGPDGLHNFWIKWFVRSHARLAAQYQTALESGSLPQFLTTGVTHLLHKSGSTAEPKNYRPITCLPTVYKVLTSILRAKINKHIDTNSIMSASQNGCRNGSRGTKELLLIDMAISQQVRRSRKDLSTCWIDYKKAYDSVPHTWLMRVLELYKVHTTLRTFLMSCMGQWRTVLRYPGCRNIQRNSEPIRIERGIFQGDSLSPLWFCLALNPLSTLLEDSGLGYRLRRGGQVISHLLYMDDLKLFAPNNLQLMELLKVTETFSSAIRMEFGVDKCAVMHVKRGEIMESVGTQLSDSINLRALSASETYKYLGMSEALGINVTDMKQSLKERFFGRLKKVLNSLLSGGNKVRAFNGWVMPVLMYSFGILKWTQTELDALDRRVRTLLTAYRMHHPRSSVMRLYIPRKCGGRGFLNAKTLHNREICSLREYFLGVDVGMHRDVVVVDKGLTPLSLAKENWRKPVVLDTKDRMEIWQSKELHGRYFRALHGPDVDLPASVNWLRFGDLFGETEGFVCAIMDEVMMTNNYRRFIVKDGTVDICRACHRPGESIRHIISGCSRLANEEYLHRHNLVARIIHQQLALKYSLVESEVPYYRYVPDPVLENGNITLYWDRSIITDRTIAANKPDIVVVDRGERRTTIIDITVPHDENLVKAEKDKQIKYLDLAREVVDMWDVDSAIIVPIVVTANGLIAKSLDQHLRRLSLGSWIKGLIQRAVLLDTARIVRRFLSLEP

SEQ ID NO: 11745 - protein, 1165 aa, Sesamia nonagrioides
MTPAAVVASSSSDEYFSPPTTPPPARRRGGRRPPDRLGPRGPSASDRVPAPGGSVQRMRWTQSINENVMRSYYGATEGGNNLTAYRVRMLSLFQVLEPAVNVSAQRLSDQVRVIQRNHMLDDVVLDRLRLESRNSHVTPASSLVAVQLNSVSPRPNHVDEEDDDRAISVSPQCNEKLRSALEDAFREYRSIPPEFRPRLPRLPMHKKNKALVCALDSQLSNYLKDSNDLNDTHSILYCGAVAICRVAHVKFPDSDRATRPKSAVPAWQCRIERRIGETRALIGKLISFREGNTRPRVMRFVRRAFSGTDISTRDYLFRVTERIDFFKQKIYAWANRIRRYRRRVERYSQNRNFQSDERRVYRAWERSDQGVTDTCLPDDDATCSFWRNIWSVPVSHTEGSWTRVVERACDPVPEMGAITICPQDVARAVRPLPNWKSPGPDGLHNFWIKWFSGSHARLASQFQTALESGSLPQFLTTGVTHLLHKSGSTAEPKNYRPITCLPTVYKVLTSILKSKINTHIDSNSIMSASQNGCRSGSRGTKELLLIDMAISQQVRRSRKDLSTCWIDYKKAYDSVPHTWLMRVLELYKVDATLRTFLMTCMRTWRTVLRYPGCRNIQRNSEPIRIERGIFQGDSLSPLWFCLALNPLSTLLEDSGLGYRLRRGGQVISHLLYMDDLKLFAHTDSQLKELLKITETFSSSIRMEFGVDKCAVMHVKRGEIMESVGTQLTSSINLRALSASETYKYLGMSEALGINVTDMKQSLKERFFGRLKKVLNSLLSGGNKVRAFNGWVMPVLMYSFGILKWTQTELDALDRRVRTLLTANRLHHPRSSVMRLYIPRKCGGRGFLNAKTLHNREICSLRQYFLTTDVGMHRDVVAVDKGLTPLSLAKENWRKPVVLDTNDRMEVWKSKELHGRFFKALHGPDVDLQASVAWLRFGDLFGETEGFVCAITDEVMMTNNYRRFIVKDGTVDICRACHRPGESIRHIISGCSRLANGEYLHRHNLVARIIHQQLALKYNLVESEVPYYRYTPDPVLENDHITLYWDRSIITDRTIVANKPDLVLVDRSERRAMIVDITIPHDENLVKAEKDKQIKYLDLAHEVVDMWEVDSAIIVPIVVTANGLIAKSLDQHLRRLSLGSWIKGLIQKAVLLDTARIVRKFLSLEP

SEQ ID NO: 11746 - protein, 1105 aa, Sesamia nonagrioides
MRWTQSINENVMRSYYGATEGGNNLTAYRVRMLSLFQVLEPAVNVSAQRLSDQVRVIQRNHMLDDTVLDRLRNEMQSSRIIVHQSQTAEIPPQPTNYADEGSNDRATNVSTQCNEELINALEAAIREYRFTPAELRPRLPRLPMHNRNRALMAALDAQLSDYFDTCEDLTDTHSILYCAAVAACRVAHVKFPSDSRATRPKPVVPAWQHRIERRIGGARALIGKLICFREGNTRPRVMRFVRRAFAGTNISPQNYMARVTERIDFLKQKVYAWANRIRRYKRRVERYTQNRTFQSNERWVYRDWERPEQGVTDTCLLDDDAMCSFWRSIWSVPVSHTEGDWARDVERACDLIPEMGAITICPQDVACAVRPLPNWKSPGPDGLHNFWIKWFSRSHARLASQFQTALVSGSLPQFLTTGITHLLHKSGSTAEPKNYRPITCLPTVYKVLTSILKTKINKHIDSNSIMSASQNGCKSGSRGTKELLLIDMAISQQVRRSRKDLSTCWIDYRKAYDSVPHTWLMRVLELYKVDATLRTFLMSCMKTWRTVLRYPGCRNIQRNSEPIRIERGIFQGDSLSPLWFCLALNPLSTLLEDSGLGYRLRRGGQVISHLLYMDDLKLFAPNNSQLRELLKITETFSSSIRMEFGVDKCAVMHVKRGEIMESVGTQLTDSINLRALSASETYKYLGMSEALGINVTDMKQSLKERFFGRLKKVLNSLLSGGNKVRAFNGWVMPVLMYSFGILKWTQTELDALDQRVRTLLTAKRLHHPRSSVMRLYIPRKCGGRGFLNAKTLHNREVCSLRDYFLVTDVGMHRDVVAADKGLTPLSLAKENWRKPVVLDTNDRMEVWKSKELHGRFFRALHGPDVDLQASVAWLRFGDLFGETEGFVFAIMDEVMMTNNYRRFIVKDGTVDICRACHRPGESIRHIISGCSRLANGEYLHRHNLVARIIHQQLALKYNLVESEVPYYRYTPDPVLENGYITLYWDRSIITDRTIVANKPDIVMVDRSERRAMIVDITIPHDENLVKAEKDKQIKYLDLAHEVVDMWEVDSAIIVPIVVTANGLIAKSLDQHLRRLSLGSWIKSLIQKAVLLDTARIVRKFLSLEP

SEQ ID NO: 11747 - protein, 1200 aa, Sesamia nonagrioides
MLTRSAARRARSPPPDSSPSSASPPPVSSPTVNAVMTPAAAVALSSSDEYFSPPTTPPPVRRRGGRRPPDCLGPRGPPASDRAPATGGNVQRMKWTQSINENVMRAYFGATEGGSNLTAYRGRMLSLFQVLEPAVNVSAQRLSDQVRVIQRNHMLDDVVLDRLRLESRNSHVTPASSLVAVQLNSVPSRPNLVDEEDDDEAISVTPQCNEKVRSALEDAFREYRSTPLELRPRLPRLPMHKKNKALVCALDSQLSNYLKDSKDLADTHSILYCGAVAICRVAHVKFPDSDRATRPKPAVPAWQCRIERRIGETRALIGKLISFREGNTRPRVMRFVRRAFSGTDVSTRDYLLRVTERIDFLKQKIYAWANRIRRYRRRVERYSQNRNFQSDERWVYRAWERSDQGVTDTCLPDDDATRSFWRNIWSVPVSHTEGGWTRDVERACDPVPEMGAITICPQDVARAVRPLPNWKSPGPDGLHNFWIKWFSGSHACLASQFQTALESGSLPQFLTTGITHLLHKSGSTAEPKNYRPITCLPTVYKVLTSILKAKINTHIDSNSIMSASQNGCRNGSRGTKELLLIDMAISQQVRRSRKDLSTCWIDYKKAYDSVPHTWLMRVLDLYKVDATLRTFLMTCMSQWRTVLRYPGCRNIQRNSEPIRIERGIFQGDSLSPLWFCLALNPLSTLLEDSGLGYRLRRGGQVISHLLYMDDLKLFAHTNSQLKELLKITETFSSAIRMEFGVDKCAVMHVQRGEIVESVGTQLTGSINLRSLSASETYKYLGMSEALGINVTDMKQSLKERFFGRLKKVLNSLLSGGNKVRAFNGWVMPVLMYSFGILKWTQTELDALDQRVRTLLTANRLHHPRSSVMRLYIPRKCGGRGFLNAKTLHNREVCSLREYFLKTDVGMHRDVVAVDKGLTPLSLAKENWRKPVVLETNDRMEVWQSKELHGRFFRALRGPDVDFQASVAWLRYGDLFGETEGFVCAIMDEVMMTNNYRKFIVKDGTVDICRACHRPGESIRHIISGCSRLANGEYLHRHNLVARIIHQQLALKYNLVESEVPYYRYMPDPVLENGHITLYWDRSIITDRTIVANKPDIVMVDRSERRAMIVDITIPHDENLVKAEKDKQIKYLDLAHEVVDMWEVDSAIIVPIVVTANGIIAKSLDQHLRRLSLGGWIKGLIQKAVLLDTARIVRKFLSLEP

SEQ ID NO: 11748 - protein, 1197 aa, Sesamia nonagrioides
MLTRSAALRARPPPPDSLLSSASPPPVSSASVSAVTTPAAAVALSSSDEYFSPPTTPPPARRRGGRRPPDRLGPRGPSASDRVPAPGGSVQRMRWTQSINENVMRSYYGATEGGNNLTAYRVRMLSLFQVLEPAVNVSAQRLSDQVRVIQRNHMLDDTVLDRLRNEMQSSRVIAHQSQTAEIPPQSTNYADEGSNDRATNVSTQCNEELINALEAAIREYRYTSAELRPRLPRLPMHNRNRALMAALDAQLSNYFDTCEDLTDTHSILYCAAVAACRVAHVKFPSDSRATRPKPVVPAWQHRIERRIGGARALIGKLICFREGNTRPRVIRFVRRAFAGTNISPQNYMARVTERIDFLKQKVYAWANRIRRYKRRVERYTQNRTFRSNERWVYRDWERPEQGVTDTCLPDDDAMCSFWRSIWSVPVSHTEGDWARDVERACDPIPEMGAITICPQDVACAVRPLPNWKSPGPDGLHNFWIKWFPRSHARLASQFQTALVSGSLPQFLTTGITHLLHKSGSTAEPKNYRPITCLPTVYKVLTSILKTKINKHIDSNSIMSASQNGCKSGSRGTKELLLIDMAISQQVRRSRKDLSTCWIDYRKAYDSVPHTWLMRVLELYKVDATLRTFLMSCMRTWRTVLRYPGCRNIQRNSEPIRIERGIFQGDSLSPLWFCLALNPLSTLLEDSGLGYRLRRGGQVISHLLYMDDLKLFAPNNSQLRELLKITETFSSSIRMEFGVDKCAVMHVKRGEIMESVGTQPTDSINLRALSASETYKYLGMSEALGINVTDMKQSLKERFFGRLKKVLNSLLSGGNKVRAFNGWVVPVLMYSFGILKWTQTELDALDQRVRTLLTANRLHHPRSSVMRLYIPRKCGGRGFLNAKTLHNREVCSLREYFLETDVGMHRDVVAADKGLTPLSLAKENWRKPVVLDTNDRLEVWKSKELHGRFFRALHGPDVDFQASVAWLRFGDLFGETEGFVFAIMDEVMMTNNYRRFIVKDGTVDICRACHRPGESIRHIISGCSRLANGEYLHRHNLVARIIHQQLALKYNLVESEVPYYRYMPDPVLENGHITLYWDRSIITDRTIVANKPDIVLVDRSERRAMIVDITIPHDENLVKAEKDKQIKYLDLAHEVVDMWEVDSAIIVPIVVTANGLIAKSLDQHLRRLSLGSWIKGLIQKAVLLDTARIVRKFLSLEP

SEQ ID NO: 11749 - protein, 1197 aa, Sesamia nonagrioides
MLTRSAARRARPPSPDSLPSSASPPPASSTTVSAVTTPAAAVASSSSDEYFSPPTTPPPVRRRGGRRPPDCLGPRGPSASDRVPAPGGSVQRMRWTQSINENVMRSYYGATEGGNNLTAYRVRMLSLFQVLEPAVNVSAQRLSDQVRVIQRNRMLDDTVLDRLRNEMQSSRVITHQSQSAEIPPQPTNYADEGSNDRATNVSTQCNEELRNALEAAIREYRFMSAELRPRLPRLPMHNRNRALMVALDAQLSNYFDTCENLTDTHSILYCAAVAACRVAHVKFSSDSRATRPKPVVPAWQHRIERRIGGARALIGKLICFREGNTRPRVMRFVRRAFSGTNTSPPNYMARITERIDFLKQKVYAWANRIRRYKRRVERYAQNRTFQSNQRCVYRDWERPEQGVADTCLPDDDAMCSFWRSIWSVPVSHTEGDWARDVERACDPIPEMGAITICPQDVARAVRPLPNWKSPGPDGLHNFWIKWFPRSHASLASQFQTALVSGSLPQFLTTGITHLLHKSGSTAEPKNYRPITCLPTVYKVLTSILKAKINNHIDSNSIMSVSQNGCRSGSRGTKELLLIDMAISQQVRHSRKDLSTCWIDYKKAYDSVPHTWLMRVLELYKVDTTLRTFLMTCMGQWRTVLRYPGCRNIQRNSEPIRIERGIFQGDSLSPLWFCLALNPLSTLLEDSGLGYRLRRGGQVISHLLYMDDLKLFAPNNLQLKELLKITETFSSAIRMEFGVDKCAVMHIKRGEIVESVGTQLTSSINLRALSASETYKYLGMSEALGINVTVMKQSLKERFFGRLKKVLNSLLSGGNKVRAFNGWVMPVLMYSFGILKWTQTELDALDQRVRTLLTANRLHHPRSSVMRLYIPRKCGGRGFLNAKTLHNREICSLREYFLETDVGMHQDVVVVDKGLTPLSLAKENWRKPVVLDTNDRMEVWKSKELHGRFFRALHGPDVDLQASVAWLRFGDLFGETEGFVCAIMDEVMMTNNYRRFIVKDGTVDICRACHRPGESIRHIISGCSRLANGEYLHRHNLVARIIHQQLALKYNLVESEVPYYRYMPDPVLENGHITLYWDRSIITDRTIVANKPDIVMVDRSERRAMIVDITIPHDENLVKAEKDKQIKYLDLAHEVVDMWEVDSAIIVPIVVTANGLIAKSLDQHLRRLSLGSWIKGLIQKAVLLDTARIVRKFLSLEP

SEQ ID NO: 11750 - protein, 1200 aa, Sesamia nonagrioides
MLTRSAARRARPPSPDSSPSSASPPPVSSPTVNAVMTPAAAVALSSSDEYFSPPTTPPPVRRRGGRRPPDCLGPRGPPASDRAPATGGNVQRMKWTQSINENVMRAYFGATEGGSNLTAYRGRMLSLFQVLEPAVNVSAQRLSDQVRVIQRNHMLDDVVLDHLRLESRNSYVTPASSLVAVQLNSVPSRPNLVDEEDDDEAISVTPQCNEKVRSALEDAFREYRSTPPELRPRLPRLPMHKKNKALVCALDSQLSNYLKDSKDLADTHSILYCGAVAICRVAHVKFPDSDRATRPKPAVPAWQCRIERRIGETRALIGKLISFREGNTRPRVMRFVRRAFSGTDVSTRDYLLRVTERIDFLKQKIYAWANRIRRYRRRVERYSQNRNFQSDERWVYRAWERSDQGVTDTCLPDDDATRSFWRNIWSVPVSHTEGGWTRDVERACDPVPEMGAITICPQDVARAVRPLPNWKSPGPDGLHNFWIKWFSGSHACLASQFQTALESGSLPQFLTTGITHLLHKSGSTAEPKNYRPITCLPTVYKVLTSILKAKINTHIDSNSIMSASQNGCRNGSRGTKELLLIDMAISQQVRRSRKDLSTCWIDYKKAYDSVPHTWLMRVLELYKVDATLRTFLMTCMSQWRTVLRYPGCRNIQRNSEPIRIERGIFQGDSLSPLWFCLALNPLSTLLDDSGLGYRLRRGGQVISHLLYMDDLKLFAHTNSQLKELLKITETFSSAIRMEFGVDKCAVMHVQRGEIVESVGTQLTGSINLRSLSASETYKYLGMSEALGINVTDMKQSLKERFFGRLKKVLNSLLSGGNKVRAFNGWVMPVLMYSFGILKWTQTELDALDQRVRTLLTANRLHHPRSSVMRLYIPRKCGGRGFLNAKTLHNREVCSLREYFLKTDVGMHRDVVAADKGLTPLSLAKENWRKPVVLDTNDRMEVWKSKELHGRFFRALHGPDVDFQASVAWLRFGDLFGETEGFVFAIMDEVMMTNNYRRFIVKDGTVDICRACHRPGESIRHIISGCSRLANGEYLHRHNLVARIIHQQLALKYNLVESEVPYYRYMPDPVLENGHITLYWDRSIITDRTIVANKPDIVLVDRSERRAMIVDITIPHDENLVKAEKDKQIKYLDLAHEVVDMWEVDSAIIVPIVVTANGLIAKSLDQHLRRLSLGSWIKGLIQKAVLLDTARIVRKFLSLEP

SEQ ID NO: 11751 - protein, 1197 aa, Sesamia nonagrioides
MLTRSAARRARPPSPDSLLGSASPPPVSSPTVSAVTTPAAAVALSSSDEYFSPPTTPPPVRRRGGRRPPDRLGPRGPSASDRVPAPGGSVQRMRWTQSINENVMRSYYGATEGGNNLTAYRVRMLSLFQVLEPAVNVSAQRLSDQVRVIQRNHMLDDTVLDRLRNEMQSSRVIAHQSQTAEIPPQSTNYADEGSNDRATNVSTQCNEELINALEAAIREYRSTSAELRPRLPRLPMHNRNRALMAALDAQLSNYFDTCEDLTDTHSILYCAAVAACRVAHVKFPSYSRATRPKPVVPAWQHRIERRIGGARALIGKLICFREGNTRPRVMRFVRRAFAGTNISPQNYMARVTERIDFLKQKVYAWANRIRRYKRRVERYTQNRTFQNNERWVYRDWERPEQGVTDTCLPDDDVMCSFWRSIWSVPVSHTEGDWARDVERACDLIPEMGAITICPQDVACAVRPLPNWKSPGPDGLHNFWIKWFPRSHARLASQFQTALVSGSLPQFLTTGITHLLHKSGSTAETKNYRPITCLPTVYKVLTSILKTKINKHIDSNSIMSASQNGCKSGSRGTKELLLIDMAISQQVRRSRKDLSTCWIDYRKAYDSVPHTWLMRVLELYKVDATLRTFLMSCMRTWRTVLRYPGCRNIQRNSEPIRIERGIFQGDSLSPLWFCLALNPLSTLLEDSGLGYRLRRGGQVISHLLYMDDLKLFAPNNSQLRELLKITETFSSSIRMEFGVDKCAVMHVKRGEIMESVGTQLTGSINLRALSASETYKYLGMSEALGINVTDMKQSLKERFFGRLKKVLNSLLSGGNKVRAFNGWVMPVLMYSFGILKWTQTELDALDQRVRTLLTANRLHHPRSSVMRLYIPRKCGGRGFLNAKALHNREVCSLREYFLETDVGMHRDVVAADKGLTPLSLAKENWRKPVVLDTNDRLEVWKSKELHGRFFRALHGPDVDFQASVAWLRFGDLFGETEGFVFAIMDEVMMTNNYRRFIVKDGTVDICRACHRPGESIRHIISGCSRLANGEYLHRHNLVARIIHQQLALKYKLVESEVPYYRYMPDPVLENGHITLYWDRSIITDRTIVANKPDIVLVDRSERRAMIVDITIPHDENLVKAEKDKQIKYLDLAHEVVDMWEVDSAIIVPIVVTANGLIAKSLDQHLRRLSLGSWIKGLIQKAVLLDTARIVRKFLSLEP

SEQ ID NO: 11752 - protein, 1200 aa, Sesamia nonagrioides
MLTRSAARRARPPSSDSLLGSASSPPVSSATASAVTTPAAAVASSSSDEYFSPPTTPPPARRRGGRRPPDRLGPRGPSASDRVPAPGGSVQRMRWTQSINENVMRSYYGATEGGNNLTAYRVRMLSLFQVLEPAVNVSAQRLSDQVRVIQRNHMLDDVVLDRLRLESRNSHVTPASSLVAVQLNSVSPRPNHVDEEDDDRAISVSPQCNEKLRSALEDAFREYRSIPPELRPRLPRLPMHKKNKALVCALDSQLSNYLKDSRDLNDTHSILYCGAVAICRVAHVKFPDSDRATRPKSAVPAWQCRIERRIGETRALIGKLISFREGNTRPRVMRFVRRAFSGTDISTRDYLFRVTERIDFFKQKIYAWANRIRRYRRRVERYSQNRNFHSDERRVYRAWERSDQGVTDTCLPHDDAMSSFWRNIWSVPVSHTEGVWTRDVERACDPIPEMGAITICPQDVARAVRPLPNWKSPGPDGLHNFWIKWFSRSHALLASQFQTALESGSLPQFLTTGITHLLHKSGSTAEPKNYRPITCLPTVYKVLTSILKAKINTHIDSNSIMSASQNGCGNGSRGTKELLLIDMVISQQVRRSRKDLSTCWIDYKKAYDSVPHTWLMRVLELYKVHATLRTFLLTCMAQWRTVLLYPGCRNIQRNSEPIRIERGIFQGDSLSPLWFCLALNPLSTLLENSGLGYRLKRDGQVISHLLYMDDLKLFAPNDLQLRELLKITQTFSSAIRMEFGVDKCAVMHVQRGEIVESVGTQLTGSINLRSLSAAETYKYLGMSEALGINVTDMKQSLKERFFGRLKKVLNSLLSGGNKVRAFNGWVMPVLMYSFGILKWTQTELDALDQRVRTLLTANRLHHPRSSVMRLYIPRKCGGRGFLNAKALHNREICSLREYFLKTDVGMHRDVVAVDKGLTPLSLAKENCRKPVVLETNDRMEVWQSKELHGRFFRALHGPDVDFQASVAWLRFGDLFGETEGFVCAIMDEVMMTNNYRRFIVKDGTVDIGRACHRPGESIRHIISGCSRLANGEYLHRHNLVARIIHQQLALKYNLVESEVPYYRYMPDPVLENGHITLYWDRSIITDRTIVANKPDIVMVDRSERRAMIVDITIPHDENLVKAEKDKQIKYLDLAHEVVDMWEVDSAIIVPIVVTANGLIAKSLDQHLRRLSLGSWIKGLIQKAVLLDTARIVRKFLSLEP

SEQ ID NO: 11753 - protein, 1200 aa, Sesamia nonagrioides
MLTRSAARRARPPSPDSLLGSASPPPVSSATASAVTTPAAAVASSSSDEYFSPPTTPTPARRRGGRRPPDRLGPRGPSASDRVPAPGGSVQRMRWTQSINENVMRSYYGATEGGNNLTAYRVRMLSLFQVLEPAVNVSAQRLSDQVRVIQRNHMLDDVVLDRLRLESRNSHVTPASSLVAVQLNSVSPRPNHVDEEDDDRAISVSPQCNEKLRSALEDAFCEYRSIPPELRPRLPRLPMHKKNKALVCALDSQLSNYLKDSKDLNDTHSILYCGAVAICRVAHVKFPDSDRATRPKSAVPAWQCRIERRIGETRALIGKLISFREGNTRPRVMRFVRRAFSGTDTSTRDYLFRVTERIDFFKQKIYAWANRIRRYKRRVERYSQNCNFQSDERRVYRAWERSDQGVTDTCLPDDDATCSFWRNIWSVPVSHTEGSWTRVVERACDPVPEMGAITICPQDVAHAVRPLPNWKSPGPDGLHNFWIKWFTRSHACLASQFQTALESGSLPQFLTTGVTHLLHKSGSTAEPKNYRPITCLPTVYKVLTSILKSKINTHIDSNSIMSASQNGCRSGSRGTKELLLIDMAISQQVRRSRKDLSTCWIDYKKAYDSVPHTWLMRVLELYKVDATLRTFLMTCMRTWRTVLRYPGCRNIQRNSEPIRIERGIFQGDSLSPLWFCLALNPLSTLLEDSGLGYRLRRGGQVISHLLYMDDLKLFAHTDSQLKELLKITETFSSSIRMEFGVDKCAVMHVKRGEIMEPVGTQLTSSINLRALSASETYKYLGMSEALGINVTDMKQSLKERFFGRLKKVLNSLLSGGNKVRAFNGWVMPVLMYSFGILKWTQTELDALDRRVRTLLTANRLHHPRSSVMRLYIPRKCGGRGFLNAKTLHNREICSLREYFLTTDVGMHRDVVAVDKGLTPLSLAKENWRKPVVLDTNDRMEVWKSKELHGRFFTALHGPDVDLQASVAWLRFGDLFGETEGFVCAIMDEVMMTNNYRRFIVKDGTVDICRACHRPGESIRHIISGCSRLANGEYLHRHNLVARIIHQQLALKYNLVESEVPYYRYTPDPVLENDLITLYWDRSIITDRTIVANKPDIVLVDRSERRAMIVDITIPYDENLVKAEKDKQIKYLDLAHEVVDMWEVDSAIIVPIVVTANGLIAKSLDQHLRRLSLGSWIKGLIQKAVLLDTARIVRKFLSLKP

SEQ ID NO: 11754 - protein, 1201 aa, Sesamia nonagrioides
MLTRSAARKCARPPSPDSLLSSASPPPVSSPTVSAVTTPAAAVASSSSDEYFSPPTTPPPVRRRGGRRPPDRLGPRGPSASDRVPAPGGSVQRMRWTQSINENVMRSYYGATEGGNNLTAYRVRMLSLFQVLEPAVNVSAQRLSDQVRVIQRNHMLDDVVLDRLRLESRNSHVTPASSLVAVQLNSVSPRPNRVDEEDDDRAISVSPQCIEKLRSALEDAFCEYRSTPPELRPRLPRLPMHKKNKALVCALDSQLSYYLKDSKDLTDTHSILYCGAVAICRVAHVKFPDSDRATRPKSAVPAWQCRIERRIGETRALIGKLTSFREGNTRPRVMRFVRRAFSGTDTSTRDYLFRVTERIDFFKQKIYAWANRIRRYKRRVERYSQNRNFQSDERRVYRAWERSDQGVTDTCLPDDDAMCSFWRNIWSVPVSHTEGSWTRVVERACDPVPEMGAITICPQDVARAVRPLPNWKSPGPDGLHNFWIKWFSGSHARLASQFQTALESGSLPQFLTTGVTHLLHKSGSTAEPKNYRPITCLPTVYKVLTSILKSKINTHIDSNSIMSASQNGCRSGSRGTKELLLIDMAISQQVRRSRKDLSTCWIDYKKAYDSVPHTWLMRVLELYKVDATLRTFLMTCMRTWRTVLRYPGCRNIQRNSEPIRIERGIFQGDSLSPLWFCLALNPLSTLLEDSGLGYRLRRGGQVISHLLYMDDLKLFAHTDSQLKELLKITETFSSSIRMEFGVDKCAVMHVKRGEIMESVGTQLTSSINLRALSASETYKYLGMSEALGINVTDMKQSLKERFFGRLKKVLNSLLSGGNKVRAFNGWVMPVLMYSFGILKWTQTELDALDQRVRTLLTANRLHHPRSSVMRLYIPRKCGGRGFLNAKTLHNREVCSLREYFLETDVGMHRDVVAADKGLTPLSLAKENWRKPVVLDTNDRLEVWKSKELHGRFFRALHGPDVDFRASVAWLRFGDLFGETEGFVFAIMDEVMMTNNYRRFIVKDGTVDICRACHRPGESIRHIISGCSRLANGEYLHRHNLVARIIHQQLVLKYNLVESEVPYYRYMPDPVLENGHITLYWDRSIITDRTIVANKPDIVLVDRSERRAMIVDITIPHDENLVKAEKDKQIKYLDLAHEVVDMWEVDSAIIVPIVVTANGLIAKSLDQHLRRLSLGSWIKGLIQKAVLLDTARIVRKFLSLGP

SEQ ID NO: 11755 - protein, 1197 aa, Sesamia nonagrioides
MLTRSAARRARPPSPDSLLSSASPPPVSSPTVSAVTTPAAAVASSSSDEYFSPPTTPPPVRRRGGRRPPDCLGPRGPSASDRVPAPGGSVQRMRWTQSINENVMRSYYGATEGGTNLTAYRVRMLSLFQVLEPAVNVSAQRLSDQVRVIQRNHMLDDTVLDRLRNEMQSSRIIAHQSQSAEIPPQPTNYADEGSNDRATNVSTQCNEELRNALEAAIREYRSISAELRPRLPRLPMHNRNRALMAALDAQLSNYFDTCEDLTDTHSILYCAAVAACRVARVKFPSDSRATRPKPVVPAWQHRIERRIGGARALIGKLICFREGNTRPRVMRFVRRAFSGTNTSPQNYMARVTERIDFLKQKVYAWANRIRRYKRRVERYTQNRTFQSNERRVYRDWERPEQGVTDTCLPDDDAMCSFWRSIWSVPVSHTEGDWARDVERACDPIPEMGAITICPQDVAHAVRPLPNWKSPGPDGLHNFWIKWFPRSHARLASQFQTALVSGSLPQFLTTGITHLLHKSGSTAEPKNYRPITCLPTVYKVLTSILKTKINKHIDSNSILSASQNGRRSGSRGTKELLLIDMAISQQVRRSRKDLSTCWIDYKKAYDSVPHTWLMRVLELYKVDATLRTFLMTCMRTWRTVLRYPGCRNIQRNSEPIRIERGIFQGDSLSPLWFCLALNPLSTLLEDSGLGYRLRRGGQVISHLLYMDDLKLFAPNNSQLNELLKITEIFSSSIRMEFGVDKCAVMHVKRGEIMEPVGTQLTSSINLRALSASETYKYLGMSEALGINVTGMKQSLKERFFGRLKKVLNSLLSGGNKVRAFNGWVMPVLMYSFGILKWTQTELDALDQRVRTLLTATRLHHPRSSVMRLYIPRKCGGRGFLNAKTLHNREICSLRDYFLETDVGMHRDVVAADKGLTPLSLAKENWRKPVVLDTNDRMEVWKSKELHGRFFRALHGPDVDFQASVAWLRFGDLFGETEGFVFAIMDEVMMTNNYRRFIVKDGTVDICRACHRPGESIRHIISGCSRLANGEYLHRHNLVARIIHQQLALKYKLVESEVPYYRYMPDPVLENGHITLYWDRSIITDRTIIANKPDIVLVDRSERRAMIVDITIPHDENLVKAEKDKQTKYLDLAHEVVDMWEVDSAIIVPIVVTANGLIAKSLDQHLRRLSLGSWIKGLIQKAVLLDTARIVRKFLSLEP

SEQ ID NO: 11756 - protein, 975 aa, Apamea monoglypha
MSPELRPRLPRLPMHNKNRALVAVLDAQLSSYFDVCEDLTDTHSILYCAAVAACRVAHVKFISDSRATRPKPAIPPWQCRIERRIGGARALIGKLICFREGNTRPRVMRFVRRAFSGTDISSQDYLSRVTERIDFLKQKVYAWANRIRRYKRRVDRYTQNRTFQSDERWVYRGWERPDQGVADTCLPDDDAMYSFWRSIWSVPVSHTEGDWAREVERACDPIPEMEAITICAQDVARAVRPLPNWKSPGPDGLHNFWVKWLTRSHARLASQFQIALESGSLPQFLTTGVTHLLHKSASTAEPKNYRPITCLPTVYKVLTSILRAKINKHIDTNSIMSASQNGCKNGSRGTKELLLIDMAISQQVRRSRKDLSTCWIDYKKAYDSVPHTWLMRVLELYKVDTTPRTFLMTCMGQWRTVLRYPGCRNIQRNSEPIRIERGIFQGDSLSPLWFCLALNPLSTLLEDSGLGYRLRRGGQVISHLLYMDDLKLFAPNNLQLMELLKITETFSSAIRMEFGVDKCAVMHVKRGEIVESVGTQLSDSTNLRALSESETYKYLGMSEALGINITDMKQSLKERFFGRLKKVLNSLLSGGNKVRAFNSWVMPVLMYSFGILKWTQTELDALDRRVRTLLTANRLHHPRSSVMRLYIPRKCGGRGFLNAKTLHNREICSLREYFLETDVAMHRDVVAVDKGLTPLSLAKENWRKPVVLDTNDRMEVWQSKELHGRFYRALHGPDVDLLASVAWLRFGDLFGETEGFVCAIMDEVMMTNNYRRFIVKDGTVDICRACHRPGESIRHIISGCSRLANGEYLHRHNLVARIIHQQLALKYNLVESEVPYYRYVPDPVLENGNITLYWDRSIITDRTIVANKPDIVVVDRSERRAMIVDITVPHDENLVKAEKDKQIKYLDLAREVVDMWHVDSAIIVPIVVTANGLIAKSLDQHLRRLSLGSWIKGLIQKAVLLDTARIVRRFLSLEP

SEQ ID NO: 11757 - protein, 1200 aa, Apamea monoglypha
MMMLTRSAARRARPPPPDSSLSSASPPPVPSLTVSAVTTPAAVVASSSSDEYFSPPTTPPPARRRGGRRPPDGLGPRGPPASDRVPALGGSVQRMRWTQSINENVMRSYYGATEGGNNLTAYRVRMLSLFQVLEPAVNVTAQRLSDQVRVIQRNHMLDDTVLDRLRNEMQSSHVIAPQSQTAAVLPQSNTSHADEGSNDRATNVSIQCNDELRNALEGAIREYRFMSPELRPRLPRLPMHNKNRALVAVLDAQLSSYFDACEDLTDTHSILYCAAVAACRVAHVKFASDSRATRPKPAIPPWQCRIERRIGGARALIGKLICFREGNTRPRVMRFVRRAFSGTDISSQDYLSHVTERIDFLKQKVYAWANRIRRYKRRVDRYTQNRTFQSDERWVYRGWERPDQGVADTCLPDDDAMYSFWRSIWSVPVSHTEGDWAREVERACDPIPEMEAITICAQDVARAVRPLPNWKSPGPDGLHNFWIKWFTRSHARLASQFQIALESGSLPQFLTTGVTHLLHKSASTAEPKNYRPITCLPTVYKVLTSILRAKINKHIDTNSIMSASQNGCKNGSRGTKELLLIDMAISQQVRRSRKDLSTCWIDYKKAYDSVPHTWLMRVLELYKVDTTLRTFLMTCMGQWRTVLRYPGCRNIQRNSEPIRIERGIFQGDSLSPLWFCLALNPLSTLLEDSGLGYRLRRGGQVISHLLYMDDLKLFAPNNLQLMELLKITETFSSAIRMEFGVDKCAVMHVKRGEIVESVGTQLSDSTNLRALSASETYKYLGMSEALGINVTDMKQSLKERFFGRLKKVLNSLLSGGNKVRAFNSWVMPVLMYSFGILKWTQTELDALDRRVRTLLTANRMHHPRSSVMRLYIPRKCGGRGFLNAKTLHNREICSLREYFLETDVGMHRDVVAVDKGLTPLSLAKENWRKPVVLDTNDRLEVWQSKELHGRFYRALHGPDVDLLASVAWLRFGDLFGETEGFVCAIMDEVMMTNNYRRFIVKDGTVDICRACHRPGESIRHIISGCSRLANGEYLHRHNLVARIIHQQLALKYSLVESEVPYYRYVPDPVLENGHITLYWDRSIITDRTIVANKPDIVVVDRSERRAMIVDITVPHDENLVKAEKDKQIKYLDLAREVVDMWDVDSAIIVPIVVTANGLIAKSLDQHLRRLSLGSWIKGLIQKAVLLDTARIVRRFLSLEP

SEQ ID NO: 11758 - protein, 1032 aa, Apamea monoglypha
MQSSHVIAPQSQTAAVLPQSNTSHADEGSNDRATNVSIQCNEELRNALEGAIREYRFMSPELRPRLPRLPMHNKNRALVAVLDAQLSSHFDACEDLTDTHSILYCAAVAACRVAHVKFDSDSRATRPKPAIPAWQCRIERRIGGARALIGKLICFREGNTRPRVMRFVRRAFLGTDISSQDYLSRVTERIDFLKQKVYAWANRIRRYKRRVERYTQNRTFQSDERWVYRGWERPDQSVADTCLPDDDAMCSFWRSIWSAPVSHTEGDWTGKIERACELIPEMGAITICPQDVARAVRPLPNWKSPGPDGLHNFWIKWFQRSHAPLAAQFQSALESGLLPQFITTGITHLLHKSGSTADPKNYRPITCLPTIYKVLTSILRAKINKHIDSNSIMSVSQNGCRNGSRGTKELLLIDMAISQQVRRSRKDLSTCWIDYKKAYDSMPHTWLMRVLELYKVDTTLRTFLMTCMGQWRTVLRYPGCRNIQRNSEPIRIERGIFQGDSLSPLWFCLALNPLSTLLDDSGLGYRLRRGGQVISHLLYMDDLKLFAPNNLQLMKLLKITETFSSAIRMEFGVDKCAVMHVKRGEIVESVGTQLSDFTNLRALSAAETYKYLGMSEALGINVTDMKQSLKERFFGRLKKVFNSLLSGGNKVRAFNSWVMPVLMYSFGILKWTQTELEALDRRVRTLLTANRMHHPRSSVMRLYIPRKCGGRGFLNAKTLHNREICSLREYFLETDVGMHRDVVAVDKGLTPLSLAKENWRKPVVLDTNDRMEVWQSKELHGRFYRALHGPDVDLLASVAWLRFGDLFGETEGFVCAIMDEVMMTNNHRRYIVKDGTVDICRACHRPGESIRHIISGCSRLANGEYLHRHNLVARIIHQQLALKYSLVESEVPYYRYVPDPVLENGNITLYWDRSIITDRTIVANKPDIVVVDRSERRAMIVDITVPHDENLVKAEKDKQIKYLDLAREVVDMWDVDSAIIVPIVVSANGLIAKSLDQHLRRLSLGSWIKGLIQKAVLLDTARIVRRFLSLEP

SEQ ID NO: 11759 - protein, 1197 aa, Furcula furcula
MLTRSKVAQQRPPDSSPCSASQPPAPSTDGTPPAAVASSESDEYFSPPSSPPPVRRRRGRPPRELGRLGQPAPNRVLAPGGVVRRMKWTSSINESVMRAYYEATEGGTNLTAYRDRMLSLFQVLEPAVNVSAQRLSDQVRAIQRGHMLDDTVLDRLRSVVQGSRVAPCIPSQAVAPVVDTAPAPRLAANSDDDRDDTTTNVSTQYINLLRSTLEDVVREYRSMPQSLRPRLPRLPMHKRNRALVCALDSLLSSYFDSSEDLADAHSLLYCAAMTACRVARVKLPNTDAATRPKPAVPAWQCRIERRIGEARVLIGKLTCFREGNTRPRVMRFVRRAFSGTGIGPREYVSRITERIDFLKQKVCAWANRIRRYRARVDRYSQNNMFQRDQRWVYRSWERPSQTGGEAQRPDDDAMIRFWRNIWSVPVTHSEGDWIRDVEQVCEPIPEMGAITIRPQDVADAVRPLPNWKAPGPDGLHNFWLKWLRSSHACLASLFQSAVESGSLPDFLTTGITHLLHKANSTTDPKNYRPITCLPTVYKTLTSILRAKIYRHVEGNSIMSASQNGCKSGARGTKELLLIDMAICQQARRNRKDLSTCWIDYKKAYDSVPHTWLMRVLELYKVNTTLRTFLASYMRQWRTVLLYPGSRQTLGDGEPIRIERGIFQGDSLSPLWFCLALNPLSTLLKSSGLGCRLRRRGQVISHLLYMDDLKLFAPTELQLMGLLKVTETFSNSIRMEFGVDKCAVMHVKRGRLVESRSVQLSDSTDLRTLSAIETYKYLGMSQALGINETDMKQSLRERFLGRLRKVLKSLLSGGNRVRAYNGWVMPVLICSFGILKWTQTELDTLDRTVRTLLTTYRMHHPHSSVMRLYIPRKCGGRGFLNAKTLHNREIYNLREYFLHCGGEMQTDVVAVDNGLTPLSLAKGNWRKPVVLTTGDREAVWQSKELHGRFYRALHGPDVDFSASVAWLRFGDLFGETEGFVCAIMDEVVMTNNYRKYILRDGTIDNCRACHRPGESLRHIISGCSRLANGEYLHRHNQVARIIHQQLALKYRLVTSEVPYYRYVPEPVLEDGHITLYWDRSIITDRTIVANKPDIVLIDRTERRAMIVDVTVPHDENLVKAEKDKECKYLDLAHEVVDMWDIDRAIIVPIVVSVHGLMAKSLDKHLKRLTLDGWIKGQMQKAVLLETARIVRKFLSLEP

SEQ ID NO: 11760 - protein, 1200 aa, Furcula furcula
MLTRSRNKARLRPPDSSPRSASQSPQLNQEANGTPAPVASSESDEYFSPPTSPPPVRRRRGRPPRELGLLEQPAPNRVLAPGGVVRRMRWTSSINENVMRAYYEATEGGTSLTAYRNRMLSLFQALEPAVNVSAQRLSDQVRAIQRSHMLDGAVLDRLRSEVQGSRVAPCTSSSQAVAPVVNTAPAPRLVAISDDDRDDITTNVSTNISTQLRSTLEDVVREYRTMPCGLRPRLPRLPMHKRNRALVCALDSLLSSYFDSSEDLADAHSLLYCAAMTACRVARVKLQNTDAATRPRPAVPAWQCRIERRIGEARVLIGKLTCFREGNTRPRVMRFVRRAFSGTGIDPREYLSRVTERIDFLKQKVCAWARRIRRYRARADRYFQNNMFQRDQRWVYRSWERPSQTEGDVRRPDDDAMATFWRNIWSVPVTHSEGDWIGDVEQVCEPLPEMGAITIWPQDVTDAVRLLPNWKAPGPDGLHNFWLKSIRSSHICLASLFQSALESGSLPEFMTTGITHLLHKTNSTTDPKNYRPITCLPTVYKTLTSILRTKSYRHVEDNSIMSASQNGCRSGARGTKELLLIDMAICQQARRNRKDLSTCWIDYKKAYDSVPHTWLMRVLELYKVNATLRTFLASCMRQWRTVLRYPGSRQTLGDGEPIRIERGIFQGDSLSPLWFCLALNPLSTLLKSSGLGYRLRRGGQVISHLLYMDDLKLFAPTELQLMGLLRVTETFSNSIRMEFGVDKCAVMHVKRGRIVESRSVQLSDSTDLKTLSATETYKYLGMSQALGINETDMKQSLRDRFLGRLRKVLKSLLSGGNRVRAYNGWVMPVLMYSFGILKWTQTELDTLDRTVRTLLTTYRMHHPRSSVMRLYIPRKCGGRGFLNAKTLHNREIYNLREYFLHCGGEMHTDVVAVDNGLTPLSLAKGNWRKPVVLTTGDRDAVWQIKELHGRFYRALHGPDVDFSASVAWLRFGDLFGETEGFVCAIMDEVVMTNNYRKYILRDGTIDICRACHRPGESLRHIISGCSRLANGEYLHRHNQVARIIHQQLALRYRLVTSEVPYYRYVPEPVLEDGHITLYWDRSIITDRTIVANRPDIVLIDRTERRAMIVDVTVPHDENLVKAEKDKECKYLDLAHEVVDMWDIDKAIIVPIVVSAHGLIAKSLDKHLKRLTLDGWIMGQIQKAVLLETARIVRRFLSLEP

SEQ ID NO: 11761 - protein, 1196 aa, Furcula furcula
MLTRHKARLRPPDSSPRSASQPLAPSTGGPPAAVASSESDEYFSPPSSPPPVCRRRGRPPRDLGLLGQPAPNRVLVPGGVVRRMKWTLSINENVMRAYYEATEGGTNLTAYRDRMLSLFQTLEPAVNVSAQRLSDQVRAIQRGHMLDDAVLDRLRSEVQGSRVVPCIPSSQAVAPAVNTAPAPRLAATSGDDRDDMSTNISTNVSTQLRSTLEDVVREYRTMPQGLRPRLPRLPMHKRNRALVCALDSLLSSYFDSSEDLADAHSLLYCAAMTACRVARVKFPNSDAATRPRPAVPAWQCRIERRIGEARVLIGKLTCFREGNTRPRVMRFVRRAFSGTGIDPREYFSCVTERIDFLKQKVCAWANRIRRYRARVDRYSQNNMFQRDQRWVYRSWERPSQIGGEVQRPDDDAMIRFWRNIWSVPVTHSEGDWIRDVEQVCEPIPEMGAITIRPQDVADAVRPLPNWKAPGPDGLHNFWLKWLRSSHACLASLFQSAVESGSLPEFLTTGITHLLHKTNSTADPKNYRPITCLPTVYKTLTSILRAKIYRHVEGNSIMSASQNGCRSGARGTKELLLIDMAICQQARRNRRDLSTCWIDYKKAYDSVPHTWLVRVLELYKVNTTLRTFLASCMRQWRTVLLYPGSRQTLGDGEPIRIERGIFQGDSLSPLWFCLALNPLSTLLRSSGLGYRLRRGGQVISHLLYMDDLKLFAPTEVQLMGLLKVTETFSSSIRMEFGVDKCAVMHVKRGRLVESRSIQLSDSTDLRTLSATETYKYLGMSQALGINETDMKQSLRERFLGRLRKVLKSLLSGGNRVRAYNGWVMPVLMYSFGILKWTQTELDTLDRTVRTLLTAYRMHHPRSSVMRLYIPRKCGGRGFLNAKTLHNREIYNLREYFLHCGGEMHTDVVAVDSGLTPLSLAKGNWRRPVVLTTGDREAVWQSKELHGRFYRALHGPDVDFSASVAWLRFGDLFGETEGSVCAIMDEVVMTNNYRKYILRDGTIDICRACHRPGESLRHIISGCSRLANGEYLHRHNQVARIIHQQLALKYRLVTSEVPYYRYVPEPVLEDGHITLYWDRSIITDRSIVANRPDIVLIDRTERRAMIVDVTVPHDENLVKAEKDKECKYLDLAHEVVDLWDIDKAIIVPIVVSAHGLMAKSLDKHLKRLTLDGWIKGQMQKAVLLETARIVRKFLSLEP

SEQ ID NO: 11762 - protein, 868 aa, Arctia plantaginis
MRFVKQAFLGTTIGPQQYMSCVTERIDFLKQKIYAWANRLRRYKKRIDRYNQNRMFQRNEKWVYRKWEEPEPCVSHGHLPDENVTHTFWRNIWSVPVTHIEGDWLRDVRRSCESITPMEPVIIDKDDVSCAVRSLPNWKSPGLDGLHNFWLKWFRSSHACLASQFQAALDSGSLPQFLTTGITHLLYKSGSVMDPKNFRPITCLPTMYKLLTSILRLKITLHINNNSIMSVSQNGCRSGSRGTKDLLIIDRAISQQVRRNRKSLATCWIDYKKAYDSVPHTWLLRVLELYKIDTTLCTFLKSCMGQWRTALRYPGCRQTTVIDAPIKIERGIFQGDSLSPLWFCLALNPLSTLLEGSGLGYRLQKDDQVISHLLYMDDLKLLAPTKLQLSALLKVTENFSNSIKMEFGVDKCAVMYVKKGEIVESEGIELSDSTKLRSLSATETYKYLGISQSLGIPESDMKQTLQERFFGRLKKVLKSLLSLGNKVRACNGWVMPILMYSFGILKWTQTELDALDRRVRTLLTAFRMHHPRSSVMRLYIPRKLGGRGLLNIKTLHNREICNLREYFLHTDVGMHRNVVAVDIGFTPLALAKENWRKPVVFSTNDRREVWKGKELHGRFYRALNGSDIDFKASTTWLRYGDLFGETEGFVCAIMDEVIMTNNYRKYILKDGTVDICRACHRPGESIRHIISGCSRLANGEYLHRHNQVARIVHQQLALKYHLVNLEVPYYRYVPDPVLENGRATLYWDRSIIADRTIVANKPDIVVIDRLERRAMIVDIAVPHDENLVKVEKEKQIKYLDLSHEIVDMWNVDSVIIVPIVVSAHGLIAKSLDQHLKRLTLDGWIKGLIQKAVLLDTARIVRRFLSLQS

SEQ ID NO: 11763 - protein, 962 aa, Amphipyra berbera
MNKKNRALMCALDSLLSSYFDNSEILEDTHSILYCAAVAACRVAHAKFDNNDRATRPKPAVPAWQCRIERRINEARALIGKLICFREGNTRPRVMRFVRRAFSGTDINPRDYLSRVTERIDFLKQKVYAWANRIRRYKRRVERYTQNRMFHSDERWVYRTWERPDHDVSDTHLPDNDVMNTFWRNIWSMPVTHIEGDWMQEVQRACEPIEEMGDITIVPQDVTSAVRPMANWKSPGPDGLHNFWLKWLRSSHARLASQFQSSLESGSFPEFLTTGVTHLLHKSGSTAEPKNYRPITCLPTVYKLLTSILRAKINSHIINNSIMSVSQNGCKNGSRGTKELLLIDMAISQQVRRSRKDLSTCWIDYKKAYDSVPHTWLMRVLELYKVNTTLCAFLTSCMGQWRTVLHYPGCRQIQGRGEPIRIERGIFQGDSLSPLWFCLALNPLSTLLEGSGLGYRLRRGGQVISHLLYMDDLKLFAPNNLQLLKLLKVTETFSNSIRMEFGVDKCAVMHVKRGGIMESVGTQLSDSIHLRSLSSTETYKYLGMSEALGINETDMKQSLRERFYGRLKKVLKSLLSGGNKVRAFNGWVMPVLMYSFGILKWTQTELDALDRRVRTLLTAYRMHHPRSSVMRLYIPRKCGGRGFLNAKTLHNREVCSLREYFLQADVGMHRDVVAVDKGFTPLSLAKENWRKPVVLDTNGRREVWQSKELHGRFYRALHGPDVDFLASVAWLRFGDLFGETEGFVCAIMDEVMMTNNYRKYIVKDGTVDICRACHCPGESIRHIISGCSRLANGEYLHRHNLVARIIHQQLALKYNLVDAEVPYYKYVPDPVLENGHITLYWDRSIITDRTIVANKPDIVVIDRSERLAMIVDITVPHDENLVKAEKDKEIKYQDLAHEVVDMWEVDSAVIVPIVVTANGLIAKSLDQHLTRLALGSWIKGLIQKAVLLDTARIVRKFLSLRP

SEQ ID NO: 11764 - protein, 1004 aa, Amphipyra berbera
MFLGMIIIIILRNEQLRSALELAIREYRFTPPNIRPRIPRLPMHRKNRALMCALDSLLSSYFDNSENLEDTHSILYCAAIAACRVAHAKFDNNDKATRPKPAVPAWQCRIERRINEARALIGKLICFREGNTRPRVMRFVRRAFSGTDINPRDYMSRVTERIDFLKQKVYAWANRIRRYKRRVERYTQNRMFHSDERWVYRTWERPDHDVSDAHPPDNDVMNTFWRNIWSMPVTHTEGDWMQEVQRACEPIKEMGDITIVPQDVTSAVRPMANWKSPGPDGLHNFWIKWLRSSHARLASQFQSSLESGSLPEFLTTGVTHLLHKSGSTAEPKNYRPITCLPTVYKLLTSILRAKINSHIINNSIMSVSQNGCKNGSRGTKELLLIDMAISQQVRRSRKDLSTCWIDYKKAYDSVPHTWLMRVLELYKVNTTLCAFLTSCMGQWRTVLHYPGCRQIQGRGEPIRIERGIFQGDSLSPLWFCLALNPLSTLLEGSGLGYRLRRGGQVISHLLYMDDLKLFAPNNLQLMKLLKVTETFSNSIRMEFGVDKCAVMHVKRGGIMESVGTQLSDSIHLRSLSSTETYKYLGMSEALGINETDMKQSLRERFYGRLKKVLKSLLSGGNKVRAFNGWVMPVLMYSFGILKWTQTELDALDRRVRTLLTAYRMHHPRSSVMRLYIPRKCGGRGFLNAKTLHNREVCSLREYFLQADVGMHRDVVAVDKGFTPLSLAKENWRKPVVLDTNGRREVWQSKELHGRFYRALHGPDVDFLASVAWLRFGDLFGETEGFVCAIMDEVMMTNNYRKYIVKDGTVDICRACHCPGESIRHIISGCSRLANGEYLHRHNLVARIIHQQLALKYNLVDAEVPYYKYVPDPVLENGHITLYWDRSIITDRTIVANKPDIVVIDRSERLAMIVDITVPHDENLVKAEKDKEIKYQDLVHEVVDMWEVDSAVIVPIVVTANGLIAKSLDQHLTRLALGSWIKGLMQKAVLLDTARIVRKFLSLRP

SEQ ID NO: 11765 - protein, 1205 aa, Amphipyra berbera
MLTRSRAKALTETTRPRSSAPSLSSASQPPDSSIVSDVTPAAAVASSSSDEYFSPPTSPPPARRRGRGRPPDSLRPRGPLASDRVPAAGGSVQRMRWTPTMNENCMRAYFGATEGGTNLTAYRGRMLSLFQVLEPTVNVSAQRLSDQVRVIQRDHRLTDAALDRLRSEVQSNAIISLQSQTAAQPRTPTVVPPLPTHANEESDDRVTNVSTQCNEQLRSALELAIREYRFTPPNIRPRIPRLPMHRKNRALMCALDSLLSSYFDNSENLEDTHSILYCAAVAACRVAHAKFDNNDKATRPKPAVPAWQCRIERRINEARALIGKLICFREGNTRPRVMRFVRRAFSGTDINPRDYMSRVTERIDFLKQKVYAWANRIRRYKRRVERYTQNRMFHSDERWVYRTWERPDHDVSDAHPPDNDVMNTFWRNIWSMPVTHTEGDWMQEVQRACEPIKEMGDITIVPQDVTSAVRPMANWKSPGPDGLHNFWIKWLRSSHARLASQFQSSLESGSLPEFLTTGVTHLLHKSGSTAEPKNYRPITCLPTVYKLLTSILRAKINSHILYNSIMSVSQNGCKNGFRGTKELLLIDMAISQQVRRSRKDLSTCWIDYKKAYDSVPHTWLMRVLELYKVNTTLCAFLTSCMGQWRTVLHYPGCRQIQGRGEPIRIERGIFQGDSLSPLWFCLALNPLSTLLEGSGLGYRLRRGGQVISHLLYMDDLKLFAPNNLQLMKLLKVTETFSNSIRMEFGVDKCAVMHVKRGGIMESVGTQLSDSIHLRSLSSTETYKYLGMSEALGINETDMKQSLRERFYGRLKKVLKSLLSGGNKVRAFNGWVMPVLMYSFGILKWTQTELDALDRRVRTLLTAYRMHHPRSSVMRLYIPRKCGGRGFLNAKTLHNREVCSLREYFLQADVGMHRDVVAVDKGFTPLSLAKENWRKPVVLDTNGRREVWQSKELHGRFYRALHGPDVDFLASVAWLRFGDLFGETEGFVCAIMDEVMMTNNYRKYIVKDGTVDICRACHCPGESIRHIISGCSRLANGEYLHRHNLVARIIHQQLALKYNLVDAEVPYYKYVPDPVLENGHITLYWDRSIITDRTIVANKPDIVVIDRTERLTMIVDITVPHDENLVKAEKDKEIKYQDLAHEVVDMWEVDSAVIVPIVVTANGLIAKSLDHHLTRLSLGSWVKGLIQKAVLLDTARIVRKFLSLRP

SEQ ID NO: 11766 - protein, 1205 aa, Amphipyra berbera
MLTRSRSKLQDPKTRPRPLASSLSSASQPPDSSIVSDVTPAAAVASSSSDEYFSPPSSPPPPRRRGRGRPPACMGPRGPPASDRVPAPGGSVQRMRWTQSMNENCMRAYFGATEGGTNLTAYRGRMLSLFQVLEPAVNVSAQRLSDQVRVIQRDHRLTDAALDKLRSEVQSNRIISPQSQTVAQPQAPTVVLPPPTHADEESDDRVTNVSTQCNERLRSALELAIQEYRFTPPNLRPRIPRLPMNKKNRALMCALDSLLSSYFDNSESLEDTHSILYCAAVAACRVAHAKFDNNDRATRPKPAVPAWQCRIERRINEARALIGKLICFREGNTRPRVMRFVRRAFSGTDINPRDYMSRVTERIDFLKQKVYAWANRIRRYKRRVERYTQNRMFHSDERWVYRTWERPDHDVSDTHLPDNDVMNTFWRNIWSMPVTHIEGDWMQEVQRACEPIEEMGDITIVPQDVTSAVRPMANWKSPGPDGLHNFWLKWLRSSHARLASHFQSSLESGSFPEFLTTGVTHLLHKSGSTAEPKNYRPITCLPTVYKLLTSILRAKINSHIINNSIMSVSQNGCKNGSRGTKELLLIDMAISQQVRRSRKDLSTCWIDYKKAYDSVPHTWLMRVLELYKVNTTLCAFLTSCMGQWRTVLHYPGCRQIQGRGEPIRIERGIFQGDSLSPLWFCLALNPLSTLLEGSGLGYRLRRGGQVISHLLYMDDLKLFAPNNLQLVKLLKVTETFSNSIRMEFGVDKCAVMHVKRGGIMESVGTQLSDSIHLRSLSSTETYKYLGMSEALGINETDMKQSLRERFYGRLKKVLKSLLSGGNKVRAFNGWVMPVLMYSFGILKWTQTELDALDRRVRTLLTAYRMHHPRSSVMRLYIPRKCGGRGFLNAKTLHNREVCSLREYFLHADVGMHRDVVAVDKGFTPLSLAKENWRKPVVLDTNGRREVWQSKELHGRFYRALHGPDVDFLASVAWLRFGDLFGETEGFVCAIMDEVILTNNYRKYIVKDGTVDICRACHCPGESIRHIISGCSRLANGEYLHRHNLVARIIHQQLALKYNLVDAEVPYYKYVPDPVLENGHITLYWDRSIITDRTIVANKPDIVVIDRSERLAMIVDITVPHDENLVKAEKDKEIKYQDLAHEVVDMWEVDSAVIVPIVVTANGLIAKSLDQHLTRLALGSWIGGLIQKAVLLDTARIVRKFLSLRP

SEQ ID NO: 11767 - protein, 1205 aa, Amphipyra berbera
MLTRSRAKALTETTRPRSSAPSLSSASQPPDSSIVSDVTPAAAVASSSSDEYFSPPTSPPPARRRGRGRPPDSLRPRGPLASDRVPAAGGSVQRMRWTPTMNENCMRAYFGATEGGTNLIAYRGRMLSLFQVLEPTVNVSAQRLSDQVRVIQRDHRLTDAALDRLRSEVQSNAIISLQSQTAAQPRTPTVVPPLPTHGNEESDDRVTNVSTQCNEQLRSALELAIQEYRFTPPNIRPRIPRLPMHRKNRALMCALDSLLSSYFDNSENLEDTHSILYCAAVAACRVAHAKFDNSDKATRPKRAVPAWQCRIERRINEARALIGKLICFREGNTRPRVMRFVRRAFSGTDINPRDYMSRVTERIDFLKQKVYAWANRIRRYKRRVERYTQNRMFHSDERWVYRTWERPDHDVNDTHPPDNDVMNTFWRNIWSMPVTHTEGDWMQEVQRACEPIEEMGDITIVPQDVTSAVRPMANWKSPGPDGLHNFWIKWLRSSHARLASQFQSSLESGSLPEFLTTGVTHLLHKSGSTAEPKNYRPITCLPTVYKLLTSILRAKINSHIINNSIMSVSQNGCKNGSRGTKELLLIDMAISQQVRRSRKDLSTCWIDFKKAYDSVPHTWLMRVLELYKVNTTLCAFLTSCMGQWRTVLHYPGCRQIQGRGEPIRIERGIFQGDSLSPLWFCLALNPLSTLLEGSGLGYRLRRGGQVISHLLYMDDLKLFAPNNLQLMKLLKVTETFSNSIRMEFGVDKCAVMHVKRGGIMESVGTQLSDSIHLRSLSSTETYKYLGMSEALGINETDMKQSLRERFYGRLKKVLKSLLSGGNKVRAFNGWVMPVLMYSFGILKWTQTELDALDRRVRTLLTAYRMHHPRSSVMRLYIPRKCGGRGFLNAKTLHNREVCSLREYFLQADVGMHRDVVAVDKGFTPLSLAKENWRKPVVLDTNGRREVWQSKELHGRFYRALHGPDVDFLASVAWLRFGDLFGETEGFVCAIMDEVILTNNYRKYIVKDGTVDICRACHCPGESIRHIISGCSRLANGEYLHRHNLVAKIIHQQLALKYNLVDAEVPYYKYVPDPVLENGHITLYWDRSIITDRTIVANKPDIVVIDRSERLAMIVDITVPHDENLVKAEKDKEIKYQDLAHEVVDMWEVDSAVIVPIVVTANGLIAKSLDQHLTRLALGSWIKGLMQKAVLLDTARIVRKFLSLRP

SEQ ID NO: 11768 - protein, 1205 aa, Amphipyra berbera
MLTRSRAKALTETTRPRSSAPSLSSASQPPDSSIVSDVTPAAAVASSSSDEYFSPPTSPPPARRRGRGRPPDSLRPRGPLASDRVPAAGGSVQRMRWTPTMNENCMRAYFGATEGGTNLTAYRGRMLSLFQVLEPTVNVSAQRLSDQVRVIQRDHRLTDAALDRLRSEVQSNAIISLQSQTAAQPRTPTVVPPLPTHANEESDDRVTNVSTQCNEQLRSALELAIREYRFTPPNIRPRIPRLPMHRKNRALMCALDSLLSSYFDNSENLEDTHSILYCAAVAACRVAHAKFDNNDKATRPKPAVPAWQCRIERRINEARALIGKLICFREGNTRPRVMRFVRRAFSGTDINPRDYMSRVTERIDFLKQKVYAWANRIRRYKRRVERYTQNRMFHSDERWVYRTWERPDHDVSDAHPPDNDVMNTFWRNIWSMPVSHTEGDWMQEVQRACEPIKEMGDITIVPQDVTSAVRPMANWKSPGPDGLHNFWIKWLRSSHARLASQFQSSLESGSLPEFLTTGVTHLLHKSGSTAEPKNYRPITCLPTVYKLLTSILRAKINSHILYNSIMSVSQNGCKNGSRGTKELLLIDMAISQQVRRSRKDLSTCWIDYKKAYDSVPHTWLMRVLELYKVNTTLCAFLTSCMGQWRTVLHYPGCRQIQGRGEPIRIERGIFQGDSLSPLWFCLALNPLSTLLEGSGLGYRLRRGGQVISHLLYMDDLKLFAPKNLQLMKLLKVTETFSNSIRMEFGVDKCAVMYVKRGGIMESVGTQLSDSIHLRSLSSTETYKYLGMSEALGINETDMKQSLRERFYGRLKKVLKSLLSGGNKVRAFNGWVMPVLMYSFGILKWTQTELDALDRRVRTLLTAYRMHHPRSSVMRLYIPRKCGGRGFLNAKTLHNREVCSLREYFLQADVGMHRDVVAVDKGFTPLSLAKENWRKPVVLDTNGRREVWQSKELHGCFYRALHGPEVDFLASVAWLRFGDLFGETEGFVCAIMDEVMMTNNYRKYIVKDGTVDICRACHCPGESIRHIISGCSRLANGEYLHRHNLVARIIHQQLALKYNLVDAEVPYYKYVPDPVLENGHITLYWDRSIITDRTIVANKPDIVVIDRTERLTMIVDITVPHDENLVKAEKDKEIKYQDLAHEVVDMWEVDSAVIVPIVVTANGLIAKSLDHHLTRLSLGSWVKGLIQKAVLLDTARIVRKFLSLRP

SEQ ID NO: 11769 - protein, 868 aa, Amphipyra berbera
MRFVRRAFSGTEINPRDYMSCVTERIDFLKQKVYAWANRIRRYKRRVERYTQNRMFHSDERWVYRTWERPDHDVSDTHLPDNDVMNTFWRNIWSMPVTHIEGDWMQEVQRACEPIEEMGDITIVPQDVTSAVRPMANWKSPGPDGLHNFWLKWLRSSHARLASQFQSSLESGSFPEFLTTGVTHLLHKSGSTAEPKNYRPITCLPTVYKLLTSILRAKINSHIINNSIMSVSQNGCKNGSRGTKELLLIDMAISQQVRRSRKDLSTCWIDYKKAYDSVPHTWLMRVLELYKVNTTLCAFLASCMGQWRTVLHYPGCRQIQGRGEPIRIERGIFQGDSLSPLWFCLALNPLSTLLEGSGLGYRLRRGGQVISHLLYMDDLKLFAPNNLQLVKLLKVTETFSNSIRMEFGVDKCAVMHVKRGGIMESVGTQLSDSIHLRSLSSTETYKYLGMSEALGINETDMKQSLRERFYGRLKKVLKSLLSGGNKVRAFNGWVMPVLMYSFGILKWTQTELDALDRRVRTLLTAYRMHHPRSSVMRLYIPRKCGGRGFLNAKTLHNREVCSLREYFLHADVGMHRDVVAVDKGFTPLSLAKENWRKPVVLDTNGRREVWQSKELHGRFYRALHGPDVDFLASVAWLRFGDLFGETEGFVCAIMDEVILTNNYRKYIVKDGTVDICRACHCPGESIRHIISGCSRLANGEYLHRHNLVARIIHQQLALKYNLVDAEVLYYKYVPDPVLENGHITLYWDRSIITDRTIVANKPDIVVIDRSERLAMIVDITVPHDENLVKAEKDKEIKYQDLAHEVVDMWEVDSAVIVPIVVTANGLIAKSLDQHLTRLALGSWIKGLIQKAVLLDTARIVRRFLSLRP

SEQ ID NO: 11770 - protein, 1106 aa, Noctua janthe
MRWTQSINANVMRAYYGATEGGNNLTAYRVRMLSLFQVLEPAVNVSAQRLSDQVRVIQRNGMLDDTVLDRLRTEMQSSHVIATPPQTVVPPQSTIIPTHDNNVSNDMVTNVSTQCNEEMRCALEGAIREYRFMQPDLRPRVPRLPMHNKNRVLVAVLDSQLSNYFDNCEDLTDAHSVLYCAAVAACRVAHVKFSDDRATRPKPAVPSWQYRIERRIGEARALIGKLICFREGNTRPRVMRFVRRAFSGTDISARDYMSRVTERIDFLKQKVYAWANRIRRYKRRVDRYTQNSTFQRDERWVYRAWERPDQGVADTRLPDDDAMCSFWRSIWSVPVSHTEGEWTREVERACDLVPEMGAITISPQDVVRAVRPLPNWKSPGPDGLHNFWIKWFTRSHARLAILFQSALESGSLPEFLTTGITHLLHKSGSTAEPKNYRPITCLPTVYKVLTSILRAKINKHIDDNSVLSASQNGCRNGSRGTKELLLIDMAISQQVRRSRKDLSTCWIDYKKAYDSVPHTWLMRVLELYKVDSTLRIFLMSCMGQWRTVLRYPGCRQIQRNSEPIRIERGIFQVDSLSPLWFCLALNPLSTLLEDSGLGYRLRRGGQVISHLLYMDDLKLFAPNDLQLMELLKVTETFSSAIRMEFGVDKCAVMHVKRGEIVESVGTQLSDSINLRSLSATETYKYLGMSEALGINVADMKQSLKERFFGRLKKVFNSLLSGGNKVRAFNGWVMPVLMYSFGILKWTQTELDALDRRVRTLLTAYRMNHPRSSVMRLYIPRRCGGRGFLNAKTLHNREICSLREYFLETDVGMHRDVVAVDKGLTPLSLAKENWRKPVVLDTNDRMEVWQSKELHGRFFRALHGPDVDLPASVAWLRSGDLFGETEGFVCAIMDEVMMTNNYRRFIVKDGTVDICQACHRPGESIRHIISGCSRLANGEYLHRHNLVARIIHQQLALKYNLVESEVPYYKYVPDPVLENGSITLYWDRSIVTDRTIVANKPDIVVVDRSERRAMIVDITVPHDGNLVKAEKDKQIKYLDLAHEVVDMWDVDSAIIVPIVVSAHGLIAKSLDQYLRRLSLGSWIKGLIQKAVLLDTARIVRRFLSLEP

SEQ ID NO: 11771 - protein, 1197 aa, Noctua janthe
MLTRSATRRARLSPPDPSLSSASPPPESSPIVSAVTPAVAVASSSSDEYFSPPTTPPPVRRRGGRRPPDGLGPRGPPASDRVPAPGGSVPRMRWTQSINANVMRAYYGATEGGNNLTAYRVRMLSLFQVLEPAVNVSAQRLSDQVRVIQRNGMLDDTVLDRLRTEMQSSHVIATPPQTVVPPQSTIIPTHDNNVSNDMVTNVSTQCNEEMRCALEGAIREYRFMQPDLRPRVPRLPMHNKNKVLVAVLDSQLSNYFDNCENLTDAHSVLYCAAVAACRVAHVKFSDDRATRPNPAVPSWQYRIERRIGEARALIGKLICFREGNTRPRVMRFVRRAFSGTDISARDYMSRVTERIDFLKQKVYAWANRIRRYKRRVDRYTQNRTFQRDERWVYRAWERPDQGVADTHLPDDDAMCSFWRSIWSVPVSHTEGEWTREVERACDLVPEMGAITISPQDVVRAVRPLPNWKSPGPDGLHNFWIKWFTRSHARLAILFQSALESGSLPEFLTTGITHLLHKSGSTAEPKNYRPIACLPTVYKVLTSILRAKINKHIDDNSVMSASQNGCRNGSRGTKELLLIDMAISQQVRRSRRDLSTCWIDYKKAYDSVPHTWLMRVLELYKVDSTLRIFLMSCMGQWRTVLRYPGCRQIQRNSEPIRIERGIFQGDSLSPLWFCLALNPLSTLLEDSGLGYRLRRGGQVISHLLYMDDLKLFAPNDLQLMELLKVTETFSSAIRMEFGVDKCAVMHVKRGEIVESVGTQLSDSINLRSLSATETYKYLGMSEALGINVADMKQSLKERFFGRLKKVFNSLLSGGNKVRAFNGWVMPVLMYSFGILKWTQTELDALDRRVRTLLTTYRMHHPRSSVMRLYIPRRCGGRGFLNAKTLHNREIYSLREYFLETDVGMHRDVVAVDKGLTPLSLAKENWRKPVVLDTNDRMEVWQSKELHGRFFRALHGPDVDLPASVAWLRSGDLFGETEGFVCAIMDEVMMTNNYRRFIVKDGTVDICRACHRPGESIRHIISGCSRLANGEYLHRHNLVARIIHQQLALKYNLVESEVPYYKYVPDPVLENGNITLYWDRSIVTDRTIVANKPDIVVVDRSERRAMIVDITVPHDGNLVKAEKDKQIKYLDLAHEVVDMWDVDSAIIVPIVVSAHGLIAKSLDQYLRRLSLGSWIKGLIQKAVLLDTARIVRRFLSLEP

SEQ ID NO: 11772 - protein, 864 aa, Noctua janthe
MRFVRRAFSGTDISARDYMSRVTERIDFLKQKVYAWANRIRRYKRRVDRYTQNRTFQRDERWVYRAWERPDQGVADTRLPDDDAMCSFWRSIWSVPVSHTEGEWTREVERACDLVPEMGAITISPQDVVRAVRPLPNWKSPGPDGLHNFWIKWFTRSHARLAILFQSALESGSLPEFLTTGITHLLHKSGSTAEPKNYRPITCLPTVYKVLTSILRAKINKHIDDNSVMSASQNGSRGTKELLLIDMAISQQVRRSRRDLSTCWIDYKKAYDSVPHTWLMRVLELYKVDSTLRIFLMSCMGQWRTVLRYPGCRQIQRNSEPIRIERGIFQGDSLSPLWFCLALNPLSTLLEDSGLGYRLRRGGQVISHLLYMDDLKLFAPNDFQLMELLKVTETFSSAIRMEFGVDKCAVMHVKRGEIVESVGTQLSDSINLRSLSATETYKYLGMSEALGINVADMKQSLKERFFGRLKKVFNSLLSGGNKVRAFNGWVMPVLMYSFGILKWTQTELDALDRRVRTLLTAYRMHHPRSSVMRLYIPRRCGGRGFLNAKTLHNREICSLREYFLETDVGMHRDVVAVDKGLTPLSLAKENWRKPVVLDTNDRMEVWQSKELHGRFFRALHGPDVDLPASVAWLRSGDLFGETEGFVCAIMDEVMMTNNYRRFIVKDGTVDICRACHRPGESIRHIISGCSRLANGEYLHRHNLVARIIHQQLALKYNLVESEVPYYKYVPDPVLENGSITLYWDRSIVTDRTIVANKPDIVVVDRSERRAMIVDITVPHDGNLVKPEKDKQIKYLDLAHEVVDMWDVDSAIIVPIVVSAHGLIAKSLDQYLRRLSLGSWIKGLIQKAVLLDTARIVRRFLSLEP

SEQ ID NO: 11773 - protein, 1197 aa, Noctua janthe
MLTRSAARRARLSPTDPSLSSASPPPESRPVVSAVTPAVAVASSSSDEYFSPPTTPPPVRRRGGHRPPDGLGPRGPSASDRVPAPGGSVPRMRWTQSINANVMRAYYGATEGGNNLTAYRVRMLSLFQVLEPAVNVSAQRLSDQVRVIQRNGMLDDTVLDRLRTEMQSSHVIATPPQTVVPPQSTIIPTHDNNVSNDMVTNVSTQCNEEMRCALEGAIREYRFMQPDLRPRVPRLPMHNKNRVLVAVLDSQLSNYFDNCEDLTDAHSVLYCAAVAACRVAHVKFSDDRATRTKPAVPSWQYRIERRIGEARALIGKLICFREGNTRPRVMRFVRRAFSGTDISPRDYMSRVTERIDFLKQKVYAWANRIRRYKRRVDRYTQNRTFQRDERWVYRAWERPDQGVADTRLPDDDAMCSFWRSIWSVPVSHTEGEWTREVERACDLVPEMGAITISPQDIVRAVRPLPNWKSPGPDGLHNFWIKWFTRSHACLAILFQSALESGSLPEFLTTGITHLLHKSGSTAEPKNYRPITCLPTVYKVLTSILRAKINKHIDDNSVMSASQNGCRNGSRGTKELLLIDMAISQQVRRSRRDLSTCWIDYKKAYDSVPHTWLMRVLELYKVDSTLRIFLMSCMGQWRTVLRYPGCRQIQRNSEPIRIKRGIFQGDSLSPLWFCLALNPLSTLLEDSGLGYRLRRGGQVISHLLYMDDLKLFAPNDLQLMELLKVTETFSSAIRMEFGVDKCAVMHVKRGEIVESVGTQLSDSINLRSLSATETYKYLGMSEALGINVADMKQSLKERFFGRLKKVFNSLLSGGNKVRAFNGWIMPVLMYSFGILKWTQTELDALDRRVRTLLTAYRMHHPRSSVMRLYIPRRCGGRGFLNAKTLHNREICSLREYFLETDVGMHRDVVAVDKGLTPLSLAKENWRKPVVLDTNDRMEVWQSKELHGRFFRALHGPDVDLPASVAWLRSGDLFGETEGFVCAIMDEVMMTNNYRRFIVKDGTVDICRACHRPGESIRHIISGCSRLANGEYLHRHNLVARIIHQQLALKYNLVESEVPYYKYVPDPVLENGSITLYWDRSIVTDRTIVANKPDIVVVDRSERRAMIVDITVPHDGNLVKAEKNKQIKYLDLAHEVVDMWDVDSAIIVPIVVSAHGLIAKSLDQYLRRLSLGSWIKGLIQKAVLLDTARIVRRFLSLEP

SEQ ID NO: 11774 - protein, 990 aa, Noctua janthe
MRCALEGAIREYRFMQPDLRPRVPRLPMHNKNRVLVAVLDSQLSNYFDNCEDLTDAHSVLYCAAVAACRVAHVKFSDDRATRPKPAVPSWQYRIERQIGEARALIGKLICFREGNTRPRVMRFVRRAFSGTDISARDYMSRVTERIDFLKQKVYAWANRIRRYKRRVDRYTQNRTFQRDERWVYRAWERPDQGVADTRLPDDDAMCSFWRSIWSVPVSHTEGEWTREVERACDLVPEMGAITISPQDVVRAVRPLPNWKSPGPDGLHNFWIKWFTRSHARLAILFQSALESGSLPEFLTTGITHLLHKSGSTAEPKNYRPITCLPTVYKVLTSILRAKINKHIDDNSVMSASQNGCRNGSRGTKELLLIDMAISQQVRRSRRDLSTCWIDYKKAYDSVPHTWLMRVLELYKVDSTLRIFLMSCMGQWRTVLRYPGCRQIQRNSEPIRIERGIFQGDSLSPLWFCLALNPLSTLLEDSGLGYRLRRGGQVISHLLYMDDLKLFAPNDLQLMELLKVTETFSSAIRMEFGVDKCAVMHVKRGEIVESVGTQLSDSINLRSLSATETYKYLGMSEALGINVADMKQSLKERFFGRLKKVFNSLLSGGNKVRAFNGWVMPVLMYSFGILKWTQTELDALDRRVRTLLTAYRMHHPRSSVMRLYIPRRCGGRGFLNAKTLHNREICSLREYFLETDVGMHRDVVAVDKGLTPLSLAKENWCKPVVLDTNDRMEVWQSKELHGRFFRALHGPDVDLPASVAWLRSGDLFEETEGFVCAIMDEIMMTNNYRRFIVKDGTVDICRACHRPGESIRHIISGCSRLANGEYSYLHRHNLVARIIHQQLALKYNLVESEVPYYKYVPDPVLENGSITLYWDRSIVTDRTIVANKPDIVVVDRSERRAMIVDITVPHDGNLVKAEKDKQIKYLDLAHEVVDMWDVDSAIIVPIVVSAHGLIAKSLDQYLRRLSLGSWIKGLIQKAVLLDTARIVRRFLSLEP

SEQ ID NO: 11775 - protein, 1200 aa, Mythimna ferrago
MLTRSRARSQITQPTSSGSSLSSASQPPGPAPAVSPEIPVAAVASSSSDEYFSPPTTPPPARRRGRGRPPACLGPRGPPASDRVLAAGGSVQRMRWTQSINENVMRSYFGATEGGTNLTAYRGRMLSLFQVLEPAVNVSAQRLSDQVRVIQRNRMLDDAVLDRLRLESRNGRVSPISPPAAVQRQPSVSPRPDHVGEDDDDEAISVSTQGNARLRSALEDAFREYRSIPPELRPRLPRLPMHRKNRALVCALDSQLSNCFDSSEDLSDTHSILYCAAAAACRVAHVKIPNNDRATRPAKPAWQCRIERRIGETRALIGKLICFREGNIRPRVMRFVRRAFSGTDISPRDYLPRITERIDFLKQKVYAWANRIRRYKRRVERYTQNHTFQSNERWVYRAWERPDQSVIDTRLPDDDAMYSFWRSIWSVPVNHTEGDWTREIERECELIPEMGAINISPQDVACAVRPLPNWKSPGPDGLHNFWLKWFQSSHARLASQFQSALESGSLPQFLTTGITHLLHKSGSTAEPKNYRPITCLPTVYKVLTSILRAKINNHIETNSIMSASQNGCRNGSRGTKELLLIDVAISQQVRRSRRDLSTCWIDYKKAYDSVPHTWLMRVLELYKVDATLRAFLMSCMGQWRTVLHYPGCRRVSENSEPLRIERGIFQGDSLSPLWFCLALNPLSTLLEGSGLGYRLRREGQVISHLLYMDDLKLFASNNLQLMELLKVTETFSSAIRMEFGLDKCAVMHVKRGEIMESVGTQLSDSIHLRSLCSTETYKYLGMSEALGINAADVKQSLRERFFGRLNKVLNSLLSGGNKVRAFNGWVMPVLMYSFGILKWTQTELDALDRRVRTLLTANRMHHPRSSVMRLYIPRKCGGRGFLNAKTLHNREVCSLREYFLETDVGMHRDVVAVDKGLTPLSLASENWRKPIVMDTNERKEVWKGKELHGRFYRALHGPDVDLLASVSWLRFGNLFGETEGFVFAIMDEVMMTNNYRKYIVKDGTVDICRACHRPGESIRHIISGCSHLANGDYLHRHNLVARIIHQQLALKYNLVESEVPYYKYVPDPVLENGSVTLYWDRSIITDRTIVANKPDIVVIDRLERRTMIVDIAVPHDENLVKAEKDKQTKYLDLAREVVDMWEVDRAIIVPIVVTANGLIAKSLDQHLRRLSLGSWIKGLIQKAVLLDTARIVRRFLSQEP

SEQ ID NO: 11776 - protein, 1200 aa, Mythimna ferrago
MLTRSRARQQQTHPTSSDSSFSSASQPPGPAPAVSPVIPVAAVASSSSDEYFSPPTTPPPARRRGRGRPPACLGPRGPPASGGVPAAGGSVQRMRWTQSINENVMRSYFGATEGGTNLTAYRGRMLSLFQVLEPAVNVSAQRLSDQVRIIQRNRMLDDAVLDRLRLESRNGRVSPVSPPAAVQLQPSVSPRPDHVGEDDDDGAISVSTQCNARLRSALEDAFREYRSIPPELRPRLPRLPMHRKNRALVCALDSQLSNCFDSSEDLTDTHSILYCAAAAACRVAHVKIPNSDRATRPVKPAWQCRIERRIGEARALIGKLICFREGNTRPRVMRFVRRAFSGTDVSPRDYLPRITERIDFLRQKVYAWANRIRRYKRRVERYTQNRAFQSNERWVYRAWERPDQSVIDTRLPDDEAMYSFWRSIWSVPVSHTEGDWTRGVERECELIPEMGAITISPQDVARAVRPLPNWKSPGPDGLHNFWLKWFKSSHARLASQFQSALESGSLPQFLTTGITHLLHKSGSTAEPKNYRPITCLPTVYKVLTSILRAKINSHIETNSIMSASQNGCRNGSRGTKELLLIDVAISQQVRRSRRDLSTCLIDYKKAYDSVPHTWLMRVLELYKIDVTLRTFLMSCMGQWRTVLHYPGCRRVSENSEPLRIERGIFQGDSLSPLWFCLALNPLSTLLEGSGLGYRLRREGQVISHLLYMDDLKLFASNNLQLMELLKVNETFSSAIRMEFGLDKCAVMHVKRGEIMESVGTQLSDSIHLRSLSSTETYKYLGMSEALGINAADVKQSLRERFFCRLNKVLKSLLSGGNKVRAFNGWVMPVLMYSFGILKWTQTELDALDRRVRTLLTANRMHHPRSSVMRLYIPRKCGGRGFLNTKTLHNREVCSLREYFLETDVGMHRDVVAVDKGLTPLSLASENWRKPIVMDTNERKEVWKGKELHGRFYRALHGPDVDLLTSVSWLRFGNLFGETEGFVFAIMDEVMMTNNYRKYIVKDGTVDICRACHRPGESIRHIISGCSHLANGDYLHRHNLVARIIHQQLALKYNLVVSEVPYYRYVPDPVLENGSVTLYWDRSIITDRTIVANKPDIVVIDRLERRTMIVDIAVPHDENLVKAEKDKQTKYLDLAREVVDMWEVDRAIIVPIVVTANGLIAKSLDQHLRRLSLGSWIKGLIQKAVLLDTARIVRRFLSQEP

SEQ ID NO: 11777 - protein, 1200 aa, Mythimna ferrago
MLTRAAARRARPPPPASSLSSASPPPEPSLNASAVTPAATVASSSSDEFYSPPTSPPPARRRRGRRPPSSLGPRGPPASDRVPAPGGSVQRMRWTQSINENVMRSYYGATEGGNNLTAYRVRMLSLFQVLEPAVNVSAQRLSDQVRVILRNHMLDDSVLDRLRTEMSDRVITPPSQPVVPVVVPPSSHISFHTDEVSTDMVTNVSTQCNNELRSALECAIREYRNIPPELRPRIPRLPMCNKNRALVAALDSQLSNYFDDCEDLTETHSIMYCAAVAACRVAHVKFPDSDEATRPKSAVPAWQCRIERRIGGARALIGKLICFREGNTRPRVMRFVRRAFSGTNISPRDYMSRVTERIDFLKQKVYAWANRIRRYKRRVERYTQNRTFRSNERWVYRAWERPDQGVTGAHLPEDDAMCSFWRSIWSVPVSHTEGDWTREVERACDPIPQMGAIDISPQDVARAVRPLPNWKSPGPDGLHNFWIKWFTRSHARLAYQFQSALESGSLPQFLTTGITHLLHKSGSTAEPKNYRPITCLPTVYKVLTSILRSKINSHIDENSIMSPSQNGCRNGSRGTKELLLIDMTISQQVRRSRKDLSTCWIDYKKAYDSVPHTWLMRVLELYKVDATLCTFLMSCMRQWRTVLRYPGCRNIQRNSEPVRIERGIFQGDSLSPLWFCLALNPLSTLLENSGLGYRLKRGGQVISHLLYMDDLKLFAPNNLQLMELLKVTETFSSAIRMEFGVDKCAVMHIKRGEIVESVGTQLSDSIHLRSLSPTETYKYLGMSEALGINATDMKQSLRERFFGRLKKVLNSLLSGGNKVRAFNGWVMPVLMYAFGVLKWTQTELDALDRKVRTLLTAYRMHHPRSSVMRLYIPRKCGGRGFLNAKTLHNREVCSLREYFLAADVGMHRDVVAVDKGLTPLSLANENWRKPVVLDTNVRKEVWQSKELHGRFFRALHGPDVDQLASVAWLRVGDLFGETEGFVCAIMDEVIMTNNYRRFIVKDGTVDICRACHRPGESIRHIISGCSRLANGEYLHRHNLVARIIHQQLALKYSLVESEVPYYRYVPDPVLDSGDITLYWDRSIITDRTIVANKPDIVVVDRSERRAMIVDISVPHDENLVKAEKDKQIKYIDLAREVVDMWEVDSAIIVPIVVSANGLIAKSLDQHLRRLSLGDWIKGLIQKAVLLDTARIVRRFLSLEP

SEQ ID NO: 11778 - protein, 1200 aa, Mythimna ferrago
MLTRAAARRARPPPPASSLSSASPPPDPSPTVSAVTPAVAAASSSSDEYYSPPTTPPPARRRGGRRPPACFGPQGPPASDRVPATGGSVPRMRWTQSTNENVMRAYYGATEGGNNLTAYRVRMLSLFQVLELAVNVSAQRLSDQVRVIQRNHLLDDTVLDRLRTEMSNHVIAPSSQPVVPVMVPPSNHVANPADVESTDMVIQVSTQCTNELRSALECAIREYRNMPSVLRPRLPRLPMHNKNKALVAALDMQLTNYFDNCKDLTDAHSIMYCAAVAACRVAHVKFPNSDVATRPKPAVPAWQCRIERRIGEARALIGKLICFREGNTRPRVMRFVRRAFSGTDICPRDYMLRVTERIDFLKQKVYAWANRIRRYKRRVERYTQNRAFQSNERWVYRAWERPDQGVTDTRLPDDDAMCSFWRNIWSVPVSHTEGGWTREVEQACEPITEMGAITISPQDVARAVRPLPNWKSPGPDGLHNFWIKWLQRSHACLASQYQAALESSSLPEFLTTGVTHLLHKSGSTAEPKNYRPITCLPTVYKVLTSILRHKINNHIDNNSIMSASQNGCRKGSRGTKELLLIDMAISQQVRRSRKDLSTCWIDYKKAYDSVPHTWLMRVLELYKIDATLRTFLMSCMRQWRTVLRYPGCRNIQRSSEPVRIERGIFQGDSLSPLWFCLALNPLSTLLENSGLGYQLKRGGQVTSHLLYMDDLKLFAPNKLQLMELLKVTETFSSAIRMEFGVDKCAVMHVKRGEIVESVSTQLSDSISLRSLSATETYKYLGMSEALGINATDMKQSLRERFFGRLKKVFNSLLSGGNKVRAFNGWVMPVLMYSFGVLKWTQIELDALDRRVRSLLTANRMHHPRSSVMRLYIPRKCGGRGFLNAKTLHNREVCSLREYFLAADVGMHRDVVAVDKGLTPLSLANENWRKPVVLDTNDRKEVWQSKELHGRFFRALHGPDVDQLASVAWLRVGDLFGETEGFVCAIMDEVIMTKNYRRFIVKDGTVDICRACHRPGESIRHIISGCSRLANGEYLHRHNLVARIIHQQLALKYSLVESEVPYYRYVPDPVLDNGDITMYWDRSIITDRTIVANKPDIVVVEQSERRAMIVDISVSHDENLVKAEKDKQIKYIDLAREVVDMWDVDSAIIVPIVVSGNGLIAKSLDQHLRRLALGSWIKGLIQRAVLLDTARIVRRFLSLEP

SEQ ID NO: 11779 - protein, 1200 aa, Mythimna ferrago
MLTRSRAQQLNTQLTTSGPSLSSASQPPGPAPAVSLEIPVAAVASSSSDEYFSPPTTPPPARRRGRGRPPACLGPRGPPASDRVPAAGGSVQRMRWTQSINENVMRSYFGATEGGTNLTAYRGRMLSLFQVLEPAVNVSAQRLSDQVRVIQRNRMLDDAVLDRLRLESRNGRVSPVSPPAAVQRQPSVSPRPDHVGEDDDDGAISVSTQCNVRLRSALEDAFREYRSIPPELRPRLPRLPMHRKNRALVCALDSQLSNCFDSSEDLTDTHSILYCAAAAACRVAHVKIPNSDRATRPAKPAWQCRIERRIGEARALIGKLICFREGNTRPRVMRFVRRAFSGTDISPRDYLPRITERIDFLRQKVYAWANRIRRYKRRVERYTQNRAFQSNERWVYRAWERPDQSVIDTRLPDDDAMYSFWCSIWSVPVNHTEGDWTRKVERECELLPEMGAVTISPQDVARAVRPLPNWKSPGPDGLHNFWLKWFKSSHARLASQFQSALESGSLPQFLTTGITHLLHKSGSTAEPKNYRPITCLPTVYKVLTSILRAKINSHIETNSIMSASQNGCRNGSRGTKELLLIDVAISQQVRRSRRDLSTCWIDYKKAYDSVPHTWLMRVLELYKIDVTLRTFLMSCMGQWRTVLHYPGCRRVSENSEPLRIERGIFQGDSLSPLWFCLALNPLSTLLEGSGVGYRLRREGQVISHLLYMDDLKLFASNNLQLMELLKVTETFSSAIRMEFGLDKCAVMHVKRGEIMESVGTQLSDSIHLRSLCSTETYKYLGMSEALGINAADVKQSLRERFFGRLNKVLKSLLSGGNKVRAFNGWVMPVLMYSFGILKWTQTELDALDRRVRTLLTANRMHHPRSSVMRLYIPRKCGGRGFLNAKTLHNREVCSLREYFLETDVGMHRDVVAVDKGLTPLSLANENWRKPIVMDTNERKELWKGKELHGRFYRALHGPDVDLLASVSWLRFGDLFGETEGFVFAIMDEVMMTNNYRKYIVKDGTVDICRACHRPGESIRHIISGCSHLANGDYLHRHNLVARIIHQQLALKYNLVESEVPYYRYVPDPVLENGSVTLYWDRSIITDRTIVANKPDIVVIDRLERRTMIVDIAVPHDENLVKAEKDKQTKYLDLAREVVDMWEVDRAIIVPIVVTANGLIAKSLDQHLRRLSLGSWIKGLIQKAVLLDTARIVRRFLSQEP

SEQ ID NO: 11780 - protein, 1200 aa, Mythimna ferrago
MLTRAAARRARPPPPASSLSSASPPPEPSPIVSAVTPAVAAASSSSDEYYSPPTTPPPTRRRGGRRPPDCLGPRGPPASDRVPAPGGSVQRMRWTQSINENVMRSYYGATEGGNNLTAYRVRMLSLFQVLEPAVNVSAQRLSDQVRVILRNHMLDDTVLDRLRTEMSDRVITPPSQPVVPAVVPPSSYISFHTDEVSSDTVTNVSNQCNSELRSALECAIREYRNIPPELRPRIPRLPMCNKNRALVAALDSQLSNYFDDCEDLTDTHSIMYCAAVAACRVAHVKFPNSDVATRPKPAVPAWQCRIERRIGGARALIGKLICFREGNTRPRVMRFVRRAFSGTDISPRDYMSRVTERIDFLKQKVYAWANRIRRYKRRVERYTQNRTFRSNERWVYRAWERPDQGVTDARLPDDDAMSSFWRSIWSVPVSHTEGDWTREVERACDPIPQMGAIDISPQDVARAVRPLPNWKSPGPDGLHNFWIKWFTRSHARLAYQFQSALESGSLPQFLTTGITHLLHKSGSTAEPKNYRPITCLPTVYKVLTSILRSKINSHIDENSIMSPSQNGCRNGSRGTKELLLIDMTISQQVRRSRKDLSTCWIDYRKAYDSVPHTWLMRVLELYKIDTTLRTFLMSCMRQWSTVLHYPGCRNIQRNSEPVRIERGIFQGDSLSPLWFCLALNPLSTLLENSGLGYRLKRGGQVISHLLYMDDLKLFAPNNLQLMELLKVTEIFSSAIRMEFGVDKCAVMHVKRGEVVESVSTQLTDSINLRSLSPTETYKYLGMSEALGISITGMKQSLRERFFGRLKKVFNSLLSGGNKVRAFNGWVMPVLMYSFGVLKWTQTELDALDRRVRTLLTAYRMHHPRSSVMRLYIPRKCGGRGFLNAKTLHNREVCSLREYFLAADVGMHRDVVAVDKGLTPLSLANENWRKPIVLDTNDRREVWQSKELHGRFFRALHGPDVDQLASVAWLRFGDLFGETEGFVCAIMDEVIMTNNYRRFIVKDGTVDICRACHRPGESIRHIISGCSRLANGEYLHRHNLVARIIHQQLALKYSLVESEVPYYRYEPDPVLDNGHITLYWDRPIITDRTIVANKPDIVVVDRSESRAMIVDISVPHDENLVKAEKDKQIKYIDLAREVVDMWEVDSAVIVPIVVSANGLIAKSLDQHLRRLSLGDWIKGLIQKAVLLDTARIVRRFLSLEP

SEQ ID NO: 11781 - protein, 1192 aa, Eilema sororculum
MLTRAQANRNRSAPTTSPDSSLSSAAQPPAVEPAASSSSSSDEFFSPPTSPTPVRRPGRGRPPTCLGPRRPPASNRAPATGGDVHRMRWTTSINENVMRAYFAATEGGTNLSAYRTRMLPLFQALEPSINVSAQRLSDQVRVIQRNRMLNETVLETLRLECLRNICVTPAPAPAPASTVEINDDTCVAPDDTPIPVSIQYNEEIKEALECALREYRSMPVHVRPRLPRLPIHRRNIALVSALDSLLPRYLENSENLGDTHSILYCTAVAACRMAGAKFPNKDPAIRLKSAIPAWQCRIERRVAEARVLIGKLICFRSGNTRPRVMRYVTRAFAGTNISPQDYTSRVTERIDFLKQKVYAWANRIRRYKKRVDRYTVNRMFQRDQRWVYRSWERTEESVDDVRRPDAEATNAFWRSIWSVPVNHTEGDWMREVERACETIPEMEKMNIDAIDVDCAVRSLSNWKSPGPDGLHNFWLKWLRSSHVVLASQFQSAVESGTLPAFMMTGVTHLLHKTGSTLEPNNYRPITCLPTVYKLLTSILRAKINNHINNNSIMCASQNGCRNGARGTKELLLIDMAISQQARRNHKDLTACWIDYKKAFDSVPHTWLLRVLELYKVNTTLCTFLRSCMGQWRTVLFYPGCRQALGSGEPITIERGIFQGDSLSPLWFCLALNPLSTLLVNSGLGYRLRREGQMVSHLFYMDDLKLFAHTNPQLIALLKVTETFSNSIKMAFGVDKCAVIHVKRGRVVESEGIQLSDSTNLRSLLVTETYKYLGMSQALCINEVDMKQMLQERFFGRLKKVLNSLLSGGNKVRACNSWVMPLLMYSFGILKWTQTELDTIDRKVRTQLTAFRMHHPRSSVMRLYIPRKCGGRGFLNAKTLHNREVCNLRDYFLTSNVDMHRDVVNVDTGLTPLGLAKENWRRPTIVSTDSRREVWQSKELHGRFYRALHRPEVDLLASVSWLRFSDLFGETEGFVCAIADEVIKTNNYRKYIMRDGTIDICRACHQPGESLRHITSGCSRLANGEYLHRHNQVARIIHQRLALKYNLVEVEVPYYKYVPEPVLENSHITLYWDRSIITDRTVVANKPDIVVIDRSERRALIVDVTIPHDENLVKAEKDKQVKYLDLAHEVVDMWNVGSAIIVPIVVSVNGLIAKSLDQHLKRLGLDGWVKGQMQKAVLLDAARIVRKFLSLEP

SEQ ID NO: 11782 - protein, 1186 aa, Eilema sororculum
MHCNIIRCGCIGYFQIRSAAQLPAVEPAASSSSSSDEFFSPPTSPTPVRRPGRGRPPTCLGPRRPPASNRAPAAGGNVHRMRWTTSINENVMRAYFAATEGGTNLSAYRTRMLPLFQALEPTINTSAQRLSDQVRVIQRNRLLNETVLETLRLECLRNICVTPAPAPAPASTAEINDDAYVAPDDTPIPVSIQYNEEIKEALECALREYRSMPVHVRPRLPRLPIHRRNIALVSALDSLLPRYLENSENLGDTHSILYCTAVAACRMAGAKFPIKDPAIRPKPAIPAWQCRIERRVTEARVLIGKLICFRSGNTRPRVMRYVTRAFAGTDISPLDYTSRVTERIDFLKQKVYAWANRIRRYKKRVDRYTLNCMFQRDQRWVYRSWERTEESVDDVRRPDAEATNAFWRSIWSVPVSHTEGDWMREVERACETIPEMQEINIDAIDVDCAVRPLSNWKSPGPDGLHNFWLKWLRSSHVVLASQFQSAVESGTLPAFMTTGVTHLLHKTGSTLEPNNYRPITCLPTVYKLLTSILRAKINNHINNNSIMCASQNGCRNGARGTKELLLIDMTISQQARRNRKDLAACWIDYKKAFDSVPHTWLLRVLELYKVNTTLCTFLRSCMGQWRTVLFYPGCRQALGSGEPITIERGIFQGDSLSPLWFCLALNPLSTLLVNSGLGYRLRREGQMVSHLFYMDDLKLFAHTNPQLIALLKVTETFSNSIKMAFGVDKCAVIHVKRGRVVESEGIQLSDSTNLRSLLVTETYKYLGMSQTLCINEADMKQMLQDRFFGRLKKVLNSLLSGGNKVRACNSWVMPLLMYSFGILKWTQTELDTIDRKVRAQLTAFRMHHPRSSVMRLYIPRKCGGRGFLNAKTFHNREVCNLRDYFLKSNVDMHRDVVNVDTGLTPLGLAKENWRRPTIVSTDSRREVWQSKELHGRFYRALHRPEVDLLASVSWLRFSDLFGETEGFVCAIADEVIKTNNYRKYIMRDGTIDICRACHQPGESLRHITSGCSRLANGEYLHRHNQVARIIHQRLALKYNLVEVEVPYYRYVPEPVLENSHITLYWDRSIITDRTVVANKPDIVVIDRSERRALIVDVTIPHDENLVKAEKDKQVKYLDLAHEVVDMWNVDSAIIVPIVVSVNGLIAKSLDQHLKRLGLDGWVKGQMQKAVLLDTARIVRKFLSLEP

SEQ ID NO: 11783 - protein, 1192 aa, Eilema sororculum
MLTRAQAKRHRNAPTTSPDSSLSSAAQPPAVEPAASSSSSSDEFFSPPTSPTPVRRPGRGRPPTCLGPRRPPASSGAPATGGDVHRMRWTTSINENVMRAYFAATEGGTNLSAYRTRMLPLFQALEPSINTSAQRLSDQVRVIQRNRMLNETVLETLRLECLRNICVTPAPAPAPASTAERNDDTRVAPDDTPIPVSIQYNEEIKEALECALREYRSMPVHVRPRLPRLPIHRRNIALVSALDSLLPRYLENSENLGDTHSILYCTAVAACRMAGAKFPIKDPAIRPKFTIPAWQCRIERRVAEARVLIGKLICFRSGNTRPRVMRYVTRAFAGTDISPQDYTSRVTERIDFLKQKVCAWANRIRRYKKRVDRYTVNRMFQRDQRWVYRSWERTDESVDDVRRPDAEATNAFWRSIWSVPVSHTEGDWMREVERACETIPEMEEIYIDATDVDCAVRSLSNWKSPGPDGLHNFWLKWLRSSHVVLASQFQSAIESGTLPAFMTTGVTHLLHKTGSTLEPNNYRPITCLPTVYKLLTSILRAKINNHINNNSIMCASQNGCRNGARGTKELLLIDMAISQQARRNRKDLTACWIDYKKAFDSVPHTWLLRVLELYKVNTTLCTFLRSCMRQWRTVLFYPGCRQALGGGVPITIERGIFQGDSLSPLWFCLALNPLSALLVNSGLGYRLRREGQVVSHLFYMDDLKLFAHTNPQLIALLKVTETFSNSNKMAFGVDKCAVIHVKRGRVVESEGIQLSDSTNLRSLLVTETYKYLGMSQALCINEVDMKQLLQERFFGRLKKVLNSLLSGGNKVRACNSWVMPLLMYSFGILKWTQTELDTIDRKVRTQLTAFRMHHPRSSVMRLYIPRKCGGRGFLNAKTLHNREVCNLRDYFLKSNVDMHRDVVNVDTGLTPLGLAKENWRRPTIVSTDSRREVWQSKELHGRFYRALHRPEVDLLASVAWLRFSDLFGETEGFVCAIADEVIKTNNYRKYIMRDGTIDICRACHQPGESLRHITSGCSRLANGEYLHRHNQVARIIHQRLALKYNLVEVEVPYYRYVPEPVQENSHITLYWDRSIITDRTVVANKPDIVVIDRSERRALIVDVTIPHDENLVKAETDKQVKYLDLAHEVVDMWNVDSAIIVPIVVSVNGLIAKSLDQHLKRLGLNGWVKGQMQKAVLLDTARIVRKFLSLEP

SEQ ID NO: 11784 - protein, 975 aa, Ptilodon capucinus
MPNHLRPRIPRLPMHKGNRAIVGALDSLLSIYFDSSDNLADTHSILYCAAITVCRVARVKVFNTDTTTRPKPAVPAWQCRIERRISEARALIGKLSCFREGNTRPRVMRFVKRAFAGTDVSPREYISRVTERIDFLKQKIYAWANRIRRYKARVDRYSQNSMFQRNQRWVYRSWERPNEPVSELQRPDDNAMTTFWRDIWSVPVTHYEGNWIGDVERMCEPIKEMEAISIGPLDVANAVRSLPNWKAPGPDGLHNFWLKWLRSSHVRLASQFQSALQSGSLPEFITTGVTHLLHKTGSTTDPKNYRPITCLPTIYKTLTSILRAKIARHVEDNSIMSASQNGCRSGSRGTKELLLIDMTICQQARRNRKDLSTCWIDYKKAYDTVPHTWLVRVLELYKIDTTLRTFLESCMRQWKTVLLCPGSRQILGNGEPIRIERGIFQGDSLSPLWFCLALNPLSTLLEESGFGFRLRRGGQVISHLLYMDDLKLFAPTALQLSGLLKVTETFSNSIRMEFGVDKCAVMHAKQGRMVESEGIQLSDSIQLRSLAATETYKYLGMSQGLGISETDMKQLLRDRFLGRLKKVLKSLLSGGNKVRAYNGWVMPVLIYSFGILKWTQTELDALDRTVRTTLTAYRMHHPRSSVMRLYIPRKCGGRGFLNVKTLHNREICSLREYFLRADGEMHVDVVAVDNGLTPLSLAKENWRKPVVLTTDDRRVVWQGKELHGRYYRALHGPDVDLAASVAWLRFGDLFGETEGFVCAIMDEVVMTNNYRRYILRDGTIDICRACHRPGESLRHIISGCSRLANGQYLHRHNQVARIVHQQLALKYRLVTSEVPYYRYEPQPVLEEGHITLYWDRSIITDRTIVANKPDIVLIDRQERRAMIIDITVPHDENLVKAEKDKESKYLDLAHEVVDMWDIDAAIIVPIVVSAHGLLAKSLDKHLKRLALGSWIKGQIQKAVLLETARIVRKFLSLEP

SEQ ID NO: 11785 - protein, 1050 aa, Agrochola circellaris
MLDDAVLDRLRLESRNNRVTPASPLVAVQLQNSPSATPRADHVGEEDDDGVISVSSQCNARLRNALEDAFRDYRSTPPGLRPRLPRLPMHKKNKALVCTLDSLLSNYFDGSKDLADTHSILYCAAVAACRVAHVKFPSSDRAPRPKPAVPAWQCRIERRIGEARVLIGKLICFREGNTRPRVMRFVKRAFSGTDTSSRDYLARVTERIDFLKQKICAWANRIRRYRRRVERYTQNRTFQSDERWVYRAWERLDQGVIDTRLPDDDAMCSFWRSIWSAPVNHTEGDWTGKIERACERIPEMGAITISPQDVACAVRPLPNWKSPGPDGLHNFWIKWFQRSHARLASQSQSALESGSLPQFLTTGITHLLHKSGSTAEPKNYRPITCLPTVYKVFTSILRTKINKHIDTNSIMSASQNGCKNGSRGTKELLLIDMAISQQVRRSRRDLSTCWIDYKKAYDSVPHTWLMRVLELYKVDATLRTFLISCMGQWRTVLRYPGCRQIQRNSEPIRIERGIFQGDSLSPLWFCLALNPLSTLLEDSGLGYRLRRGGQVISHLLYMDDLKLFAPNNLQLVELLKVTETFSSAIRMEFGVDKCAVMHVKRGGIVESGGTQLSDSIHLRSLSSIETYKYLGMSEALGINTADMKQSLRERFFNRLNKVLNSLLSGGNKVRAFNGWVMPVLMYSFGILKWTQTELDALDRRVRTLLTVNRMHHPRSSVMRLYIPRKCGGRGFLNAKTLHNREVCSLREYFLEADVGMHRDVVSVDKGLTPLSLANENWRKPIVLDTKDRREVWQSKELHGRFYRALHGPDVDLLASVSWLRFGDLFGETEGFVFAIMDEVMMTNNYRKYIVKDGTVDICRACHRPGESIRHIISGCSRLANGDYLHRHNLVARIIHQLLALKYSLVESEVPYYRYMPDPVLENGNITLYWDRSIITDRTIVANKPDIVVIDRLERRTMIIDIAVPHDENLVKAEKDKQIKYLDLAREVVDMWDVDTAVIVPIVVTANGIIAKSLDQHLRRLSLGSWIKGLIQKAVLLDTARIVRRFLSQEP

SEQ ID NO: 11786 - protein, 868 aa, Agrochola circellaris
MRFVKRAFSGTDTSSRDYLTRVTERIDFLKQKICAWANRIRRYRRRVERYTQNRTFQSDERWVYRAWERLDQGVIDTRLPDDDAMCSFWRSIWSAPVNHTEGDWTGKIERACERIPEMGAINISPQDVACAVRPLPNWKSPGPDGLHNFWIKWLQRSHARLASQFQSALESGSLPQFLTTGITHLLHKSGSTAEPKNYRPITCLPTVYKVFTSILRTKINKHIDTNSIMSASQNGCKNGSRGTKELLLIDMAINQQVRRSRRDLSTCWIDYKKAYDSVPHTWLMRVLELYKVDATLRTFLISCMGQWRTVLRYPGCRQIQRNSEPIRIERGIFQGDSLSPLWFCLALNPLSTLLEDSGLGYRLRRGGQVISHLLYMDDLKLFAPNNLQLVELLKVTETFSSAIRMEFGVDKCAVMHVKRGGIVESGGTQLPDSIHLRSLSSIETYKYLGMSEALGINTADMKQSLEERFFDRLNKVLNSLLSGGNKVRAFNGWVMPVLMYSFGILKWTQTELDALDRRVRTLLTVNRMHHPRSSVMRLYIPRKCGGRGFLNAKTLHNREVCSLREYFLEADVGMHRDVVSVDKGLTPLSLSNENWRKPIVLDTNDRREVWQSKELHGRFYRALHGPDVDLLASVSWLRFGDLFGETEGFVFAIMDEVMMTNNYRKYIVKDGTVDICRACHRPGESIRHIISGCSRLANGDYLHRHNLVARIIHQQLALKYNLVESEVPYYKYVPDPVLENGNITLYWDRSIITDRTIVANKPDIVVIDRLERRTMIIDIAVPHDENLVKAEKDKQIKYLDLAREVVDMWDVDTAVIVPIVVTANGVIAKSLDQHLRRLSLGSWIKGLIQKAVLLDTARIVRRFLSQEP

SEQ ID NO: 11787 - protein, 1210 aa, Hydraecia micacea
MLTRSRARRLPTTHPTSSGSSLSSASQLPEPAPDVSPISPAAAVASSSSDEYFSPPTTPPPVCRRGRGRPPASLGLRGPPASERVPAPGGSVQRMRWTQTVNENVMRAYFGATEGGSNLTAYRGRMLSLYIYLYYLFQVLEPAVNVSAQRLSDQVRVIQRNHMLDNVVLDRLRLESRNSHVTPASSLVAVQLQPSVPLRPDCVDVEDDDEAISVSSQCNARLRSALEDAFREYRSIPPGLRPRLPRLPMHKKNKALVCALDSQLSNCFNDSKDLADTHSILYCAAVAACRVAHVKFPNSDRAPRPKPAVPAWQCRIECRIGEARALIGKLICFREGNTRPRVMRFVRRAFSGTNISSRDYLSRVTERIDFLKQKICAWANRIRRYRRRVERYTQNRRFQSDERWVYRAWERPDQGVTDTRLPDDDAMCSFWRNIWSVPVSHTEGDWTGKIERACDLIPEMEALIISPQDVARAVRPLPNWKSPGPDGLHNFWIKWFKRSHDRLASQFQSALESGSLPQFLTTGITHLLYKSGSTADPKNYRPITCLPTVYKVLTSILRTKINKHIDTNSIMSVSQNGCKNGSRGTKELLLIDMTINQQVRRSRKDLSTCWIDYKKAYDSVPHTWLMRVLELYKVDTTLCTFLMSCMGQWRTVLRYPGCRNIQRNSEPIRIERGIFQGDSLSPLWFCLALNPLSTLLEDSGLGYRLRRGGQVISHLLYMDDLKLFAPNNLQLMELLKITETFSSAIRMEFGVDKCAVMHVKRGEIVESVGNQLSDSTNLRALSASDTYKYLGMSEALGINVTDMKQSLKERFFGRLKKVFNSLLSGGNKVRAFNDWVMPVLMYSFGILKWTQTELDALDRKVRTLLTANRMHHPRSSVMRLYIPRKCGGRGFLNAKTLHNREICSLREYFLETDVGMHRDVVVVDNGLTPLSLGKENWRKPVVLDTNDRMEVWQSKELHGRFFRALHGPDVDLLASVAWLRFGDLFGETEGFVCAIMDEVMMTNNYRRFIVKDGTVDICRACHRPGESIRHIISGCSRLANGEYLHRHNLVARIIHQQLALKYSLVESEVPYYRYVPDPVLENGNITLYWDRSIITDRTIVANKPDIVVMDRLERRAMIVDITIPHDENLVKAEKDKQIKYLDLAREVVDMWDVDSAIIVPIVVTANGLIAKSLDQHLRRLSLASWIKGLIQKAVLLDTARIVRRFLSLEP

SEQ ID NO: 11788 - protein, 868 aa, Hydraecia micacea
MRFVRRAFSGTDISSRDYLSRVTERIDFLKQKICAWANRIRRYRRRVERYTQNRKFQSDERWVYRAWERPDQGVTDTRLPDDDAMCSFWRNIWSVPVSHTEGDWTGKIERACDLIPEMEALIISPQDVARAVRPLPNWKSPGPDGLHNFWIKWFKRSHDRLASQFQSALESGSLPQFLTTGITHLLYKSGSTADPKNYRPITCLPTVYKVLTSILRTKINKHIDTNSIMSVSQNGCKNGSRGTKELLLIDMTINQQVRRSRKDLSTCWIDYKKAYDSVPHTWLMRVLELYKVDTTLCTFLMSCMGQWRTVLRYPGCRNIQRNSEPIRIERGIFQGDSLSPLWFCLALNPLSTLLEDSGLGYRLRRGGQVISHLLYMDDLKLFAPNNLQLMELLKITETFSSAIRMEFGVDKCAVMHVKRGEIVESVGNQLSDSTNLRALSASDTYKYLGMSEALGINVTDMKQSLKERFFGRLKKVFNSLLSGGNKVRAFNDWVMPVLMYSFGILKWTQTELDALDRKVRTLLTANRMHHPRSSVMRLYIPRKCGGRGFLNAKTLHNREICSLREYFLETDVGMHRDVVVVDNGLTPLSLGKENWRKPVVLDTNDRMEVWQSKELHGRFFRALHGPDVDLLASVAWLRFGDLFGETEGFVCAIMDEVMMTNNYRRFIVKDGTVDICRACHRPGESIRHIISGCSRLANGEYLHRHNLVARIIHQQLALKYSLVESEVPYYRYVPDPVLENGNITLYWDRSIITDRTIVANKPDIVVMDRLERRAMIVDITIPHDENLVKAEKDKQIKYLDLAREVVDMWDVDSAIIVPIVVTANGLIAKSLDQHLRRLSLASWIKGLIQKAVLLDTARIVRRFLSLEP

SEQ ID NO: 11789 - protein, 1203 aa, Hydraecia micacea
MLTRSRARRLPTTHPTSSGSSLSSASQLPEPAPDVSPVSPAAAVASSSSDEYFSPPTTPPPVCRRGRGRPPASLGLRGPPASERVPAPGGSVQRMRWTQTVNENVMRAYFGATEGGSNLTAYRGRMLSLFQVLEPAVNVSAQRLSDQVRVIQRNHMLDNVVLDRLRLESRNSHVTPASSLVAVQLQPSVPLRPDCVDVEDDDEAISVSSQCNARLRSALEDAFREYRSIPPGLRPRLPRLPMHKKNKTLVCALDSQLSNCFNDSKDLADTHSILYCAAVAACRVAHVKFPNSNRAPRPKPAVPAWQCRIECRIGEARALIGKLICFREGNTRPRVMRFVRRAFSGTDISSRDYLSRVTERIDFLKQKICAWANRIRRYRRRVERYTQNRRFQSDERWVYRAWERPDQGVTDTRLPDDDAMCSFWRNIWSVPVSHTEGDWTGKIERACDLIPEMEALIISPQDVARAVRPLPNWKSPGPDGLHNFWIKWFKRSHDRLASQFQSALESGSLPQFLTTGITHLLYKSGSTADPKNYRPITCLPTVYKVLTSILRTKINKHIDTNSIMSVSQNGCKNGSRGTKELLLIDMTINQQVRRSRKDLSTCWIDYKKAYDSVPHTWLMRVLELYKVDTTLCTFLMSCMGQWRTVLRYPGCRNIQRNSEPIRIERGIFQGDSLSPLWFCLALNPLSTLLEDSGLGYRLRRGGQVISHLLYMDDLKLFAPNNLQLMELLKITETFSSAIRMEFGVDKCAVMHVKRGEIVESVGNQLSDSTNLRALSASDTYKYLGMSEALGINVTDMKQSLKERFFGRLKKVFNSLLSGGNKVRAFNDWVMPVLMYSFGILKWTQTELDALDRKVRTLLTANRMHHPRSSVMRLYIPRKCGGRGFLNAKTLHNREICSLREYFLETDVGMHRDVVVVDNGLTPLSLGKENWRKPVVLDTNDRMEVWQSKELHGRFFRALHGPDVDLLASVAWLRFGDLFGETEGFVCAIMDEVMMTNNYRRFIVKDGTVDICRACHRPGESIRHIISGCSRLANGEYLHRHNLVARIIHQQLALKYSLVESEVPYYRYVPDPVLENGNITLYWDRSIITDRTIVANKPDIVVMDRLERRAMIVDITIPHDENLVKAEKDKQIKYLDLAREVVDMWDVDSAIIVPIVVTANGLIAKSLDQHLRRLSLASWIKGLIQKAVLLDTARIVRRFLSLEP

SEQ ID NO: 11790 - protein, 1205 aa, Amphipyra tragopoginis
MLTRSRAKTQQSTHLPPSASSLSSAAQPPEPASIVSDVTPAAAVASSSSDEYFSPATTPPPARRRGRGRPPACLGSRGPPASDRVPAPGGSVQRMRWTQSMNENCMRAYFGATEGGTNLTAYRGRMLSLFQALEPAVNVSAQRLSDQVRVIQRDHRLDDAALDRLRNEMQNSHVTPLPAQIRTQPLVPPAVPLEPNHGDEEEEDRAISAGTQCSELMRSALEDALREFRSTPPELRPRLPRLPMHNKNRALVCALDLLLSNVFESSEDLGDTHSILYCAAVAACRVAHVKFPNDNRATRPKSAVPAWQCRIERRIDEARVLIGKLTCFREGNRRPRVMRFVRRAFSGTDIGPGEYVSRITERIDFLKQKVYAWANRIRRYRRRVDRYTQNRIFQSDQRWVYRTWERPDQGVSDAHLPDNDVMNAFWRNIWSVPVTHTEGDWMQEVQRACEPIQEMGAVTIGPQDVASAVRPMPNWKSPGPDGLHNFWIKWLRSSHARLASQFQSSLESGSLPSFLTTGVTHLLFKSGSTAEPKNYRPITCLPTVYKLLTSILRAKLNHHIDSNAIMCATQNGCKNGSRGTKELLLIDMAISQQVRRSRKDLSTCWIDYKKAYDSVPHTWLMRVLELYKINATLRTFLMSCMGQWRTVLHYPGCRQIQGNGELIRIERGIFQGDSLSPLWFCLALNPLSTLLEGSGLGYRLRRGGQVISHLLYMDDLKLFAPNYLQLLELLKVTETFSNSIRMEFGVDKCAVMHVKRGRIMESVGTQLSDFIHLRSLSSTETYKYLGMSEALGIKEADMKQSLRERFFGRLIKVLKSLLSGGNKVRAFNGWVMPVLMYSFGILRWTQTELDALDRRVRTLLTAYRMHHPRSSVMRLYIPRKCGGRGFLNAKTLHNREVCSLREYFSQADVGMHRDVVAVDKGLTPLSLAKENWRKPVVLDTNGRRDVWRSKELHGRFYRALHGPDVDFLASVAWLRFGDLFGETEGFVCAIMDEVMMTNNYRKYIVKDGTVDICRACHCPGESIRHIVSGCSRLANGEYLHRHNLVARIIHQQLALKYNLVDTEVPYYRYVPDPVLENGHVTLYWDRSIITDRTIVANKPDIVVIDRLERRTMIVDSTVLHDENLVKAENDKKIKYLDLAHEVVDMWDVDSAVIVPIVVTANGLIAKSLDQHLMRLSLGSWIKGLIQKAVLLDTARIVRKFLSLEP

SEQ ID NO: 11791 - protein, 1222 aa, Amphipyra tragopoginis
MLTRSRSRIARPPPPDSPLSSASQPPESSPTVSAVTPAAAVASSSSDEYFSPPTSPIPVRRQGRRRPPNSLGPRGPPAPSRVLATGGCVQRMKWTQKINENVMRAYYGSTEGGTNLTAYRVRMLTLFQELEPAINVSAQRLSDQVRVIQRNHRLDDAALDRLRSEVQNSRVTPVPSQTAVHQVNISVVPPRSDSVDGDMDGRAVTVCSQYNDRLRSALEDAIREYRANPELRPRLPRLPMHNKNRALVCALDSLLSSYFESSEDLGDTHSILYCAAVAACRVANVKFNKSERATRPKPAVPAWQCRIERRIDGARALIGKLICFREGNTRPRVMRFVRRAFSGTGISPREFMSRVTERIDFLKQKVCAWASRIRRYKRRVERYTQNRMFQCDQRWVYRAWERPDQGVSDGRLPDDEAMSSFWRSVWSVPVTHTEGDWTRDIERACEPIEEMGEILISPQDVASAARPLPNWKSPGPDGLHNFWIKWLRSSHARLASQFQSSLESGSLPQFLTTGVTHLLHKSGSTAEPKNYRPITCLPTVYKLLTSILRSKINTHIENNSVMSSSQNGCRNGSRGTKELLLIDMAISQQVRRSRKNLSTCWIDYKKAYDSVPHTWLTRVLELYKINATLRTFLTSCMGQWRTVLRYPGCRQIRGSGEPIRIERGIFQGDSLSPLWFCLALNPLSTLLEGSGLGYPLRRGGQVVSHLLYMDDLKLFAPTKLQLVELLKVTETFSNSIRMEFGVDKCAVMHVRRGGIMESEGLQLSDSIHLRSLSANDTYKYLGMSEGLGISEADMKQSLKERFFRRLKKVLKSLLSGGNKVRAFNGWVMPVLMYSFGILKWTQTELDALDRRVRTLLTANRMHHPRSSVMRLYIPRKCGGRGLLNAKTLHNREVCSLREYFLHADAGMHRDVVAVDKGLTPLSLAKENWRKPVVLSTNDRREVWQSKELHGRFYRALHGPDVDFLASVSWLRFGDLFGETEGFVCAIMDEVIMTNNYRKYIVRDGTVDICRACHCPGESLRHIISGCSRLANGEYLHRHNQVARIIHQQLALKYNLVESEVPYYKYVPDPVLEKGHITLYWDRSIITDRTIVANKPDIVVIDRSERRTMIVDVTIPHDENLVKAEKDKQIKYLDLAHEVVSMWDVESATIVPIVVTAGSWPNGQEPRPTPQEALVRWLDQGPDTESSPPRYGAYCEGVPVSGALTTGSLDPAPDAGGSLFLYF

SEQ ID NO: 11792 - protein, 1206 aa, Amphipyra tragopoginis
MLTRSRAKAQNTRPPSSASSLSSASQPPEPASIVSDVTPAAAVASSSSDEYFSPATSPSPPPARRRGRGRPPTCLGPRGPPASDRVPAPGGSVQRMRWTQSMNENCMRAYFGATEGGTNLTAYRGRMLSLFQALEPAVNVSAQRLSDQVRVIQRDHRLDDAALDRLRSEMQNSHAAPLPSQIRTQTLVPPAVPLESNYADEEGEDRAISAGTQYSEIMRGALEDALREFRSTPPELRPRLPRLPMHNKNRALVCALDSLLPNVFESSEDLGDTQSILYCAAVSACRVAHVKFPNDNRATRPKSAAPAWQCRIERRIDEARVLIGKLTCFREGNRRPRVMRFVRRAFSGTDIGPGEYASRVTERIDFLKQKVYAWANRIRRCRRRVDRYTQNRIFQSDQRWVYRTWERPDQGVSDTHLPDNDVMNAFWRNIWSVPVTHTEGDWMQEVQRACEPIQEMGAVTIGPQDVTSAVRPMPNWKSPGPDGLHNFWIKWLRSSHARLASQFQSSLESGSLPAFLTTGITHLLFKSGSTAEPKNYRPITCLPTVYKLLTSILRAKLNHHIDSNAIMCATQNGCKNGSRGTKELLLIDMAISQQVRRSRKDLSTCWIDYKKAYDSVPRTWLMRVMELYKVNATLRTFLMSCMGQWRTVLHYPGCRQIQGNGELIRIERGIFQGDSLSPLWFCLALNPLSTLLEGSGLGYRLRRGGQVISHLLYMDDLKLFAPNNLQLMELLKVTETFSNSIRMEFGVDKCAVMHVKRGRIMESVGTQLSDSIHLRSLSSTETYKYLGMAEALGINEADMKQSLRERFFGRLIKVLKSLLSGGNKVRAFNGWVMPVLMYSFGILRWTQTELDALDRRVRTLLTAYRMHHPRSSVMRLYIPRKCGGRGFLNAKTLHNREVCSLREYFSQADVGMHRDVVAVDKGLTPLSLAKENWRKPVVLDAKGRMEVWRSKELHGRFYRALHGPDVDFLASVAWLRFGDLFGETEGFVCAIMDEVMMTNNYRKYVVKDGTVDICRACHCPGESIRHIVSGCSRLANGEYLHRHNLVARIIHQQLALKYNLVDTEVPYYKYVPDPVLENGHVTLYWDRSIITDRTIVANKPDIVVIDRLERRTMIVDITVPHDENLVKAENDKKIKYLDLAHEVVDMWDVDSAVIVPIVVTANGLIAKSLDQHLMRLSLGSWIKGLIQKAVLLDTARIVRRFLSLEP

SEQ ID NO: 11793 - protein, 1079 aa, Amphipyra tragopoginis
MLSLFQVLEPAINVSTQRLSDQVRVIQRNRRLDDTVLERLRSETQNNRTVTSPAQSAVQPQLPAVPPRPSHADGEGDGEVIEVSNQCSDELRSALEGAILEYRTTPPELRPRLPRLPMHKKNRALVCALDSLLSNYFDGSEDLADTHSILYCAAIAACRVAHVKFTESDRATRPKPVVPAWQCRIERRIGGARALIGKLICFREGNTRPRVMRFVRRAFSGTDISPRDYMSRITERIDFLKQKVYAWANRIRRYKRRVERYTQNRTFQSDQRRVFRTWERPDPSGSDVRLPDDEAMGSFWRSIWSVPIAHTEGDWMRDIERACEPIPEMGAIIISPQDVAGAARPLPNWKSPGPDGLHNFWLKWLRSSHACLASQFQSSLESGSLPQFLTTGAIHLLYKSGSTAEPKNYRPITCLPTVYKLLTSILRVKISNHIDNNSILSPSQNGCRSGSRGTKELLLIDMTISQQVRRSRKDLSTCWIDYKKAYDSVPHTWLMRVLELYKINTTLRTFLMSCMSQWRTVLRYPGCREIRGRGEPIRIERGIFQGDSLSPLWFCLALNPLSTLLEGTRLGYRLRREGQVISHLLYMDDLKLFAPTDLRLMELLKVTENFSSSIRMEFGVDKCAVMHVKRGGIVESEGIQISNSIQLRSLSPTETYKYLGMSEALGISEADMRQSLRERFFGRLNKVLRSLLSGGNKVRAFNGWVMPVLMYSFGILKWTQTDLEALDRRVRALLTVHRMHHPRSSVMRLYIPRKCGGRGFLNAKTLHNREVCSLREYFLQAEGEMHRDVVAVDKGLTPLALAKENWRKPAVLSTNDREEVWQSKELHGRFYRALHGPDVDFPASVSWLRFGDLFGESEGFVCAIMDEVMMTNNYRKYIVKDGTVDICRACHRPGESIRHIVSGCSRLANGEYLHRHNLVARIIHQQLALKYNLVESEVPYYRYVPDPVLENGHATLYWDRSIITDRTIVANKPDIVVIDRSERRTMIVDITVPHDENLVKAEKDKQIKYLDLAHEVVGMWDVDSAVVVPIVVTANGLIAKSLDQHLKRLSLGGWIKGLLQKAVLLDTARIVRRFLSLEP

SEQ ID NO: 11794 - protein, 1207 aa, Amphipyra tragopoginis
MLTRSRAKTLQRTHPTPSASSLSSASQPPEPASIVSDVTPAAAVASSSSDEYFSPATSPSPPPARRRGRGRPPTCLGPRGPPASDRVPAPGGSVQRMRWTQSMNENCMRAYFGATEGGTNLTAYRGRMLSLFQTLEPAVNVSAQRLSDQVRVIQRDHRLDDAALGRLRDEMQNSHATPPPSQIRTQPLVPPAVPLQPNHADEEEQDRAISAGTQYSEIMRSALEDALREFRSTPPELRPRLPRLPMHNKNRALVCALDSLLSNVLESSKDIGDTHSILYCAAVAACRVAHVKFPNDNRATRPKSTVPAWQCRIERRIDEARVLIGKLTCFREGNIRPRVMRFVRRAFSGTDVSPGEYVSRVTERIDFLKQKVYAWANRIRRYRRRVDRYTQNRIFQSDQRWVYRTWERPDQGVSDTHLPDNDVINAFWRNIWSVPVTHTEGDWMQEVQRACEPIQEMGAVTIGPQDVTSAVRPMPNWKSPGPDGLHNFWIKWLRSSHARLASQFQSSLESGSLPSFLTTGVTHLLFKSGSTAEPKNYRPITCLPTVYKLLTSILRAKINNHIDNNAIMSDSQNGCRNGSRGTKELLLIDMAISQQVRRSRKDLSTCWIDYKKAYDSVPHTWLMRVLELYKINATLRTFLMSCMGQWRTVLHYPGCRQIQGNGELIRIERGIFQGDSLSPLWFCLALNPLSTLLEGSGLGYRLRRGGQVISHLLYMDDLKLFAPNNLQLVELLKVTETFSNSIRMEFGVDKCAVMHVKRGRIMESVGTQLSDAIHLRSLSSTETYKYLGMSEALGINEADMKQSLKERFFGRLIKVLKSLLSGGNKVRAFNGWVMPVLMYSFGILRWTQTELDALDRRVRTLLTAYRMHHPRSSVMRLYIPRKCGGRGFLNAKTLHNREVCSLREYFSQADVGMHRDVVAVDKGLTPLSLAKENWRKPVVLDTNGRREVWRSKELHGRFYRALHGPDVDFLASVAWLRFGDLFGETEGFVCAIMDEVMMTNNYRKYIVKDGTVDICRACHCPGESIRHIVSGCSRLANGEYLHRHNLVARIIHQQLALKYNLVDTEVPYYKYVPDPVLENGHVTLYWDRSIITDRTIVANKPDIVVIDRLERRTVIVDIAVPHDENLVKAENDKKIKYLDLAHEVVDMWDVDSAVIVPIVVTANGLIAKSLDQHLMRLSLGSWIKGLIQKAVLLDTARIVRKFLSLEP

SEQ ID NO: 11795 - protein, 1204 aa, Amphipyra tragopoginis
MLTRSRAKALSTHLPPSASSLSSASQPPEPASIVSVVTPAAAGASSSSDEYFSPATTPPPARRRGRGRPPACLGPRGPPASGGVPAPGGSVQRMRWTQSMNENCMRAYFGATEGGTNLTAYRGRMLSLFQALEPAVNVSAQRLSDQVRVIQRGHMLDDTVLDRLRSEVQSSPVISPSSQVLAQQQNLAAAFPRPNHAGEEDDDRATNVSTQYNEELRSALEDAMREYRYTRSDLRPRIPRLPMNRKNRALVCALDSLLSNYFDGSEDLGDTHSILYCAAVAACRVAHVKFIDNERATRPKNAVPAWQCRIERRIAEARALIGKLICFREGNIRPRVMRFVRRAFSGTDVSPREYMSRVTERIDFLKQKVCAWANRIRRYRRRVDRYTQNRLFQSDERWVYRTWERPDQRVSDTHLPDNDVMNAFWRNIWSVPVTHTEGDWMQEVQRACEPIQEMGDIIISPQDVASAVRPMSNWKSPGPDGLHNFWLKWLRSSHARLASQFQSSLESGSLPQFLTTGVTHLLHKSGSTAEPKNYRPITCLPTVYKVLTSILRAKINNHIDNNSIMSASQNGCRNGSRGTKELLLIDMAISQQVRRSRKDLSTCWIDYKKAYDSVPHTWLMRVLELYKVNTTLCAFLTSCMGQWRTVLHYPGCRQIQRMGEPIRIERGIFQGDSLSPLWFCLALNPLSTLLEGSGLGYRLRRGGQVISHLLYMDDLKLFAPNNLQLLELLKVTETFSNSIRMEFGVDKCAVMHVKRGRIMESVGTQLSDSIHLRSLSSTETYKYLGMSEALGVNETGMKQSLKERFFGRLKKVFNSLLSGGNKVRAFNGWVMPVLMYSFGILKWTQTELDALDRKVRSLLTANRMHHPRSSVMRLYIPRKCGGRGFLNAKTLHNREVCSLREYFSQADVGMHRDVVAVDKGFTPLSLAKEKWRKPVVLDTNDRREVWRSKELHGRFYRALHGPDVDFLASVAWLRFGDLFGETEGFVCAIMDEVMMTNNYRKYIVKDGTVDICRACHCPGESIRHIVSGCSRLANGEYLHRHNLVARIIHQQLALKYNLVDSEVPYYKYVPDPVLENGHVTLYWDRSIITDRTIVANKPDIVVIDRSERLTMIVDITVPHDENLVKAEKDKEIKYQDLAHEVVAMWDVDSAIIVPIVVTANGLIAKSLDQHLKRLSLGSWIKGLIQKAVLLDTARIVRKFLSLRP

SEQ ID NO: 11796 - protein, 1201 aa, Amphipyra tragopoginis
MLTRARTREARPPPPDSPLSSASQPPESSPTVSAVTPAAAVASSSSDEYFSPPTSPTPVRRQGRRRPPNSLGPRGPPAPSRVLATGGCVQRMKWTQSINENVMRAYYGSTEGGTNLTAYRVRMLTLFQELEPAINVSAQRLSDQVRVIQRNHRLDDAALDRLRLEVQNSRVTPVPSQTAVHHININVVPPRSDCVDGDVDDRAVTVSSQYNDRLRSALEDAIREYRANPELRPRLPRLPMHNKNRALVCALDSLLSSYFESSEDLVDTHSILYCAAVAACRVANVKFNNSERATRPKPAIPAWQCRIERRIDGARALIGKLICFREGNTRPRVMRFVRRAFSGTGISPREYMSQVTERIDFLKQKVCAWASRIRRYKRRVERYAQNRMFQCDQRWVYRAWERPDQGVSDGRLPDDDAMSSFWRSIWSAPVTHTEGDWTRDIERACEPIEEMGEILISPQDVASAARPLPNWKSPGPDGLHNFWIKWLRSSHARLASQFQSSLESGSLPQFLTTGVTHLLHKSGSTAEPKNYRPITCLPTVYKLLTSILRTKINTHVENNSIMSPSQNGCRNGSRGTKELLLIDMAISQQVRRSRKNLSTCWIDYKKAYDSVPHTWLMRVLELYKINATLRTFLTSCMRQWRTVLRYPGCRPILGSGEPISIERGIFQGDSLSPLWFCLALNPLSTLLEGSGLGYPLRRGGQVVSHLLYMDDLKLFAPTKLQLVELLKVTETFSNSIRMEFGVDKCAVMHVRRGGIMESEGLQLSDSIHLRSLSANDTYKYLGMSEGLGISEADMKQSLRERFFGRLKKVLKSLLSGGNKVRAFNGWVMPVLMYSFGILKWTQTELDALDRRVRTLLTANRMHHPRSSVMRLYIPRKCGGRGLLNAKTLHNREVCSLREYFLHADAGMHRDVVAVDKGLTPLNLAKENWRKPVVLSTNDRREVWQSKELHGRFYRALHGPDVDFLASVSWLRFGDLFGETEGFVCAIMDEVIMTNNYRKYIVKDGTVDICRACHCPGESLRHIISGCSRLANGEYLHRHNQVARIIHQQLALRYNLVESEVPYYKYVPDPVLENGHITLYWDRSIITDRTIVANKPDIVVIDRSERRTMIVDVTIPHDENLVKAEKDKQIKYLDLAHEVVNMWDVDSATIVPIVVTANGLMAKSLDQHLKRLSLGGWIKGLIQKAVLLDTARIVRRFLSLEP

SEQ ID NO: 11797 - protein, 977 aa, Noctua pronuba
MSPDLRPRLPRLPMNKKNRALVCALDALLPNFIESSANLCDTHSILYCTAVAACRVANVKFPNTDSATRPKSAVPVWQCRIERRINEARALIGKLICFREGNTRPRVMRFVRRAFSGTDISPREYMSRVTERIDFLKQKIYAWANRIRRYRRRVDRYTQNRMFQSDERWVYRTWERPVTIQGVTDAHLPENDAMSAFWRSIWSVPVSHTEGDWMRVVEQACDSIPEMEAISISPLDVARAVRPLPNWKSPGPDGLHNFWIKWLQRSHACLASQFQSSLETGSLPSFFTTGVTHLLHKSGSTAEPKNYRPITCLPTVYKVLTSILRVKIVRHIDSNSIMSVSQNGCRNGSRGTKELLLIDMAISQQVRRSRRDLSTCWIDYKKAYDSVPHTWLRRVLELYKIDATLRTFLVSCMGQWSTVLLYPGCRQVLGNDEPIRIERGIFQGDSLSPLWFCLALNPLSTLLEDSGLGYRLRRGGQVISHLLYMDDLKIFAPSNLQLMELLKVTETFSSAIRMEFGVDKCAVMHVKRGEIMESVGTQLSDSIYLRSLSSTETYKYLGMSEALGINAADMKQSLKERFFGRLSKVLKSLLSGGNKVRAFNGWVMPVLMYSYGILKWTQTELDALDRKVRTLLTANRMHHPRSSVMRLYIPWKCGGRGFLNAKTLHNREVCSLREYFLETDVGMHRDVVSVDKGLTPLSLANENWRKPVVLDTNDRKEVWQSKELHGRFFRALHGPDVDLLASVSWLRFGDLFGETEGFVCAIMDEVIMTNNYRKYIVKDGMVDIRRACHRPGESIRHIVSGCSRLANGEYLHRHNLVARIIHQQLALQYNLVGTEVPYYKYVPDPVLENGHATLYWDRSIITDRTILANKPDIVVIDRRERRAMIVDITVPHDENLVKAENDKKIKYLDLAHEVVDMWDVDSAIIVPIVVTVNGLIAKSLDQHLRRLSLRGWVKGLIQKAVLLDTARIVRRFLSLEP

SEQ ID NO: 11798 - protein, 1200 aa, Tinea trinotella
MLTRSRARNQSAQLTSSGSSLSSASQPPGSTPTVSQVISVAAVASSSSDECFSPPTTPPSAHRRGGGRPPASLEPRGPSASGGVPATSGRVQRMRWTQSINENVMRSYFGATEGGSSLTAYRGRMLTLFQVLEPAVNVSAQRLSDQVRVIQRNRMLDDVVLDRLRLESRSSHVSPVSPPVAVQLQPSALPRPNNIEENDDDVTISVSNQYNEQLRSALEDAFREYRSTPPGLRPRIPRLPMHKKNRALVCALDSQLVNHFKSSKDLADTHSILYCAAVAVCRVAHVKFPNNDRAARLAVPAWQCRIERRIGEARALIGKLISFREGNTRPRVMRFVRRAFSGTDISSRDYQTRVTERIDFLKQKIYAWANRIRRYKRRVERYTQNRTFQSNERWVYRAWERPDQDVSDMCLPDDDAMSLFWRNIWSVPVGHTEGEWTREVERACDFIPEMGAIIISPQDVACAVRPLSNWKSPGLDGLHNFWIKCFQRSHARLAAQFQSALELGSLPQFLTTGITHLLHKSGSTAEPKNYRPITCLPTVYKVLTSILRAKIDKHIDTNCIMSASQNGCRSGSRGTKELLLIDVAISQQVRRSRRDLSTCWIDYKKAYDSVPHTWLMRVLELYKVDAALRTFLVSCMGQWRTVLHYPGCRRILGNGEPIKIERGIFQGDSLSPLWFCLALNPLSTLLDGSGQGYRLRRDGQVISHLLYMDDLKLFAPNNLQLMKLLKVTETFSSAISMEFGVDKCAIMHVKRGEIMESVGTQLSDSIHLRSLCSTETYKYLGMSEALGINAVDVKQSLRDRFFGRLNKVLNSLLSGGNKVRAFNGWVMPVLMYSFGILKWTQTELDALDRRVRTLLTANRMHHPRSSVMRLYIPRKCGGRGFLNAKTLHNREVCSLREYFLKTDVGMHRDVVAVDKGLTSLSLANENWRKPVVLDANDRREVWQSKELHGRFYRALHGPDVDFLASVSWLRFGDLFGETEGFVCAIMDEVMMTNNYRKYIVKDGTVDICRACHRPGESIRHIISGCSRLANGDYLHRHNLVARIIHQQLALKYNLVESEVPYYRYVPDPVLENGNITLYWDRSIITDRTIVANKPDIVVIDRLERRTIIVDVAVPHDENLVKAEKDKQIKYLDLAREVVDMWEVDTAIIVPIVVTANGLIAKSLDEHLKRLSLGSWIKRLIQKAVLLDTARIVRRFLSQEP

SEQ ID NO: 11799 - protein, 1200 aa, Tinea trinotella
MLTRSRARNQSAQLTSSGSSLSSASQPPRSTPTVSPVISVAAVASSSSDECFSPPTTPPSARRRGGGRPPASLEPRGPSASGGVPATSGRVQRMRWTQSINENVMRSYFGATEGGISLTAYRGRMLTLFQVLEPAVNVSAQRLSDQVRVIQRNRMLDDVVLDRLRLESRSSHVSPVSPPVAVQLQPSALPRPNNIEENDDDVTISVSNQYNEQLRSALEDAFREYRSTPPGLRPRIPRLPMHKKNRALVCALDSQLVNHFKSSKDLADNQSILYCAAVAVCRVAHVQFPNNDRAARLAVPAWQCRIERRIGEARALIGKLISFREGNTRPRVMRFVRRAFSGTDISSRDYQTRVTERIDFLKQKIYAWANRIRRYKRRVERYTQNRTFQSNERWVYRAWERPDQDVSDMCLPDDDAMSLFWRNIWSVPVGHTEGEWTREVERACDLIPEMGAIIISPQDVACAVRPLSNWKSPGLDGLHNFWIKYFQRSHARLAAQFQSALELGSLPQFLTTGITHLLHKSGSTAEPKNYRPITCLPTVYKVLTSILRAKIDKHIDTNCIMSASQNGCRSGSRGTKELLLIDVAISQQVRRSRRDLSTCWIDYKKAYDSVPHTWLMRVLELYKVDAALRTFLVSCMGQWRTVLHYPGCRRILGNGEPIKIERGIFQGDSLSPLWFCLALNPLSTLLDGSGQGYRLRRDGQVISHLLYMDDLKLFAPNNLQLMKLLKVTETFSSAISMEFGVDKCAIMHVKRGEIMESVGTQLSDSIHLRSLCSTETYKYLGMSEALGINAVDVKQSLRDRFFGRLNKVLNSLLSGGNKVRAFNGWVMPVLMYSFGILKWTQTELDALDRRVRTLLTANRMHHPRSSVMRLYIPRKCGGRGFLNAKTLHNREVCSLREYFLKTDVGMHRDVVAVDKGLTSLSLANENWRKPVVLDANDRREVWQSKELHGRFYRALHGPDVDFLASVSWLRFGDLFGETEGFVCAIMDEVMMTNNYRKYIVKDGTVDICRACHRPGESIRHIISGCSRLANGDYLHRHNLVARIIHQQLALKYNLVESEVPYYRYVPDPVLENGNITLYWDRSIITDRTIVANKPDIVVIDRLERRTIIVDVAVPHDENLVKAEKDKQIKYLDLAREVVDMWEVDTAIIVPIVVTANGLIAKSLDEHLKRLSLGSWIKRLIQKAVLLDTARIVRRFLSQEP

SEQ ID NO: 11800 - protein, 868 aa, Autographa pulchrina
MRFVRRAFTGTNISPSEYTARVTERIDFFKQKVCAWASRIRRYKCRVDRFHQNRMFQRDQRWVFRTWERPVLGMDDRRLPDEDATNSFWRNIWSVPVSHSEGVWMRDVEESCEPIQEMRAITIGPQDVANAIRPMSNWKAPGPDGLQNFWLKWFRSSHGCLASQFQYAIESDALPQFFTTGSTHLLHKTGSTTDPKNYRPITCLPTIYKLLTSILRVKINEHIDSHSIMSASQNGCRNGSRGTKELLLIDMTICQQVRRSKKNLSTCWIDYKKAYDSVPHSWLMRVLELYKINTTLRAFLSSCMRRWTTVLRYPGCRDIQQSGEPIRIERGIFQGDSLSPLWFCLALNPLSTLLENSRLGYSLRRGSQVISHLLYMDDLKLFASNELQLMGLLKITESFSNSIRMEFGVDKCAVMHVKQGGIVESQGIQISDSINLRSLSAADTYKYLGMSEALGIDVADMKQSLLTRFFGRLNKVLKSLLSGGNRVRAFNGWVMPVLMYSFGILKWTQTELDALDRRVRTLLTANRMHHPRSSVMRLYIPRKRGGRGFLNAKTLHNREVCNLREYFLQVDVGMHRDVVVVDKGFTPLSLGKENWHKPVVLSVKDRRDVWQSKELHGRFYRSLHGPDVDFLASVAWLRFGDLFGETEGFVCAIMDEVIMTNNYRKYIIKDGTVDICRACHCPGESIRHIISGCSRLANGEYLHRHNQVARIIHQQLALRYKLVEAEVPYYRYVPDPVLDNGHVTLYWDRSIITDRTIVANKPDIVVIDRSERRAMIVDVTIPHDENLVKAEKEKQMKYLDLAHEVVDMWEVDSAIIVPIVITANGIIAKSLDQHLKRLSLGIWVKGLIQKAVLLDTARIVRRFLSLEP

SEQ ID NO: 11801 - protein, 962 aa, Autographa pulchrina
MHNRNKAIMGVLDSLLLVYFGSSEDLSDTHSILYCAALAACRVANVKINNINLDTRPKPAVPAWQCRIERRVAEARALIGKLIAFKDGNSRPRVMRFVRRAFTGTNISLSEYTARVTERIDFFKQKVCAWASRIRRYKCRVDRFHQNRMFQRDQRWVFRTWERPVLGMDDRRLPDEDATNSFWRNIWSVPVSHSEGVWMRDVEESCEPIQEMRAITIGPQDVANAIRSMSNWKAPGPDGLQNFWLKWFRSSHGCLASQFQYAIESDALPQFFTTGSTHLLHKTGSTTDPKNYRPITCLPTIYKLLTSILRVKINEHIDSHSIMSASQNGCRNGSRGTKELLLIDMTICQQVRRSKKNLSTCWIDYKKAYDSVPHSWLMRVLELYKINTTLRAFLSSCMRRWTTVLRYPGCRDIQQSGEPIRIERGIFQGDSLSPLWFCLALNPLSTLLENSRLGYSLRRGSQVISHLLYMDDLKLFASNELQLMGLLKITESFSNSIRMEFGVDKCAVMHVKQGGIVESQGIQLSDSINLRSLSAADTYKYLGMSEALGIDVADMKQSLLTRFFGRLNKVLKSLLSGGNRVRAFNGWVMPVLMYSFGILKWTQTELDALDRRVRTLLTANRMHHPRSSVMRLYIPRKCGSRGFLNAKTLHNREVCNLREYFLQVNVGMHRDVVVVDKGFTPLSLGKENWHKPVVLSVKDRRDVWQSKELHGRFYRSLHGPDVDFLASVAWLRFGDLFGETEGFVCAIMDEVIMTNNYRKYIIKDGTVDICRACHCPGESIRHIISGCSRLANGEYLHRHNQVARIIHQQLALRYKLVEAEVPYYRYVPDPVLDNGHVTLYWDRSIITDRTIVANKPDIVVIDRSERRAMIVDVTIPHDENLVKAEKEKQMKYLDLAHEVVDMWEVDSAIIVPIVITANGIIAKSLDQHLKRLSLGIWVKGLIQKAVLLDTARIVRRFLSLEP

SEQ ID NO: 11802 - protein, 1198 aa, Ochropleura plecta
MLTRSAHARSARHPPLGSSLSSASPPPEPSLVVSAVTPAVAVASSSSDEYFSPPTTPPPVRRRGRHRPPDGLGPRGPPASDRVPALGGSVQRMRWTQSINENVMRSYYGATEGGNNLTAYRVRMLSLFQVLEPAVNVSAQRLSDQVRVIQRNRMLDDTVLDRLRTEMQSSQVITSSSQVVVPPQSHQVVNRANEVSNGMATNVSTQCSEEMRSTLEGATREYRYMSPELRPRLPRLPMHNKNRALVAALDSQLSSYFDNCENLTDAHSILYCAAVAACRVAHVKFPDDRATRRKPAIPFWQCRIERRIGAARALIGKLICFREGNTRPRVMRFVRRAFAGTDISPPDYMSRIAERIDFLKQKVYAWANRIRRYKRRVERYTQNRTFQSDERWVYRAWERPDQGVSDTHLPDDDAMCLFWRSIWSVPVSHTEGEWTREVERACDPIPEMGVLTISPQDVACAVRPLPNWKSPGPDGLHNFWIKWIQRSHVRLAALFQSALESGSLPKFLTTGITHLLHKSGSTAEPKNYRPITCLPTLYKVLTSILRAKITKHIDDNSIMSASQNGCRNGSRGTKELLLIDMAISQQVRRSRRHLSTCWIDYKKAYDSVPHTWLMRVLEMYKVDATLRTFLSSCLRQWSTVLRYPGCRQFQMNSEPIRIERGIFQGDSLSPLWFCLALNPLSTLLENSGLGYRLRRGGQVISHLLYMDDLKLFAPNDLQLMELLKVTETFSSAIRMEFGVDKCAVMHVKRGEIVESVGTQLSDSINLRSLSATETYKYLGMSEALGINGADMKQSLKERFFGRLRKVLNSLLSGGNKVRAFNGGVMPVLMYSFGILKWTQTELDTLDRKVRTLLTAFRMHHPRSSVMRLYIPRSCGGRGFLNAKTLHNREICSLREYFLETDVGMHRDVVAVDKGLTPLSLAKENWRKPVVLDTNDRREVWQSKELHGRFFRALHGPDVDQSASVAWLRSGDLFGETEGFVCAIMDEVMMTNNYRRFIVKDGTVDICRACHRPGESIRHIISGCSRLANGEYLHRHNLVARIIHQQLALKYNLVELEVPYYRYEPDPVLEHGNITLYWDRSIITDRTIVANKPDIVVVDRSERRAMIIDITVPHDENLVKAEKDKQIKYIDLAREVVDMWDVDSAIIVPIVVTANGLIAKSLDQHLRRLSLGSWIKGLKQKAVLLDTARIVRRFLSLEP

SEQ ID NO: 11803 - protein, 1045 aa, Ochropleura plecta
MLDDTVLDRLRTEMQSSQVITSSSQAVVPPQSHQLVSHADEVSNDMATNVSTQCNEEMRIALEGAIREYRYISPELRPRLPRLPMHNKNRALVAVLDSQLSNYFDNCENLTDAHSILYCAAVAACRVAHVKFPDDGATRPKPAVPFWQCRIERRIGVARALIGKLICFREGNTRPRVMRFVRRAFAGTDISPPDYMSHIIERIDFLKQKVYAWANRIRRYKRRVERYTLNRTFQSDERWVYRAWERPDQGVSDTHLPDDDAMCLFWRNIWSVPVSHTEGEWTREVERACDPIPEMGALTISPQDVDCAVRPLPNWKSPGPDGLHNFWLKWIQRSHARLATLFQTALESGSLPKFLTTGITHLLHKSGSTTEPKNYRPITCLPTIYKVLTSILRAKITKHIDDNSIMSASQNGCRNGSRGTKELLLIDMAISQQVRRSRRHLSTCWIDYKKAYDSVPHTWLMRVLELYKVDATLRTFLSSCMRQWNTVLRYPGCRQIQRNSEPIRIERGIFQGDSLSPLWFCLALNPLSTLLEDSGLGYRLRRGGRVISHLLYMDDLKLFAPNDSQLMELLKVTETFSSAISMEFGVDKCAVMHVKRGEIVESVGTQLSDSIHLRSLSANETYKYLGMSEALGINVADMKQSLKERFFGRLRKVFNSLLSGGNKVRAFNGWVMPVLMYSFGILKWTQTELDALDRKVRTLLTAYRMHHPRSSVMRLYIPRSCGGRGFLNAKTLHNREICSLREYFLEADVGMHRDVVTVDKGFTPLSLAKENWRKPVVLDTNDRREVWQSKELHGRFFRALHGPDVDQPASVAWLRSGDLFEETEGFVCAIMDEVMMTNNYRRFIVKDGTVDICRACHRPGESIRHIISGCSRLANGEYLHRHNLVARIIHQQLALKYSLVESEVPYYRYEPDPVLEHGNITLYWDRSIITDRTIVANKPDIVVVDRSERRAMIVDITVPHDENLVKAEKDKQIKYIDLAREVVDMWDVDSAIIVPIVVSANGLIAKSLDQHLRRLSLGSWIKGLIQKAVLLDTARIVRRFLSLEP

SEQ ID NO: 11804 - protein, 1000 aa, Ochropleura plecta
MATNVSTQCSEEMRSALEGAIREYRYMSPELRPRLPRLPMHNKNRALVAVLDSQLSNYFDNCENLTDAHSILYCAAVAACRVAHVKFPDDGATRPKPAVPFWQCRIERRIGVARTLIGKLICFKEGNTRPRVMRFVRRAFAGTDISPPDYMSRITERIDFLKQKVYAWANRIRRYKRRVERYTLNRTFQSDERWVYRAWERPDQGVSDTHLPDDDAMCLFWRSIWSVPVSHTEGEWTREVERACDPIPEMGALTISPQDVACAIRPLPNWKSPGPDGLHNFWIKSIQRSHTCLATLFQTALESGSLPKFLTTGITHLLHKSGSTAEPKNYRPITCLPTLYKVLTSILRAKITKHIDDNSIMSASQNGCRNGSRGTKELLLIDMAISQQVRRSRRHLSTCWIDYKKAYDSVPHTWLMRVLEMYKVDATLRTFLISCMRQWSTVLRYPGCRQIQRNSEPIRIERGIFQGDSLSPLWFCLALNPLSTLLENSGLGYRLRRGGQVISHLLYMDDLKLFAPNDLQLMELLKVTETFSSAIRMEFGVDKCAVMHVKRGEIMESVGTQLSDSTNLRSLSATETYKYLGMSEALGINVADMKQSLKERFFGRLRKVFNSLLSGGNKVRAFNGWVMPVLMYSFGILKWTQTELDALDRKVRTLLTAFRMHHPRSSVMRLYIPRSCGGRGFLNAKTLHNREICSLREYFLETDVGMHRDVVAVDKGLTPLSLAKENWHKPVVLDTNDRKEVWQSKELHGRFFRALHGPDVDQSASVAWLRSGDLFGETEGFVCAIMDEVMMTNNYRRFIVKDGTVDICRACHRPGESIRHIISGCSRLANGEYLHRHNLVARIIHQQLALKYNLVESEVPYYRYEPDPVLEHGNITLYWDRSIITDRTIVANKPDIVVVDRSERRAMIVDITVPHDENLVKAEKDKQIKYIDLAREVVDMWDVDSAIIVPIVVSANGLIAKSLDQHLRRLSLGSWIKGLIQRAVLLDTARIVRRFLSLEP

SEQ ID NO: 11805 - protein, 1161 aa, Hecatera dysodea
MLTRAAARRARLPPPASSLSSASPPPEPSPTVSAATPAVAVASSSSDEYFSPPTSPPPARRRRGRRPPDGLGPRGPPFSDRVPAPGGSVQRMRWTQTINENVMRSYYGATEGGTNLTAYRGRMLSLFQVLEPAVNVSAQRLSDQVRVILRNRMLDDSVLDRLRMEICSSHVITPSPQTVAQPQLIQIPSHGDEESDDRVTNVSTQCNEELRSALESAIREFRYVSPELRPRIPRLPMHNKNRALVAALDSQLSNYFDNCEDLTDAHSIMYCAAVAACRVAHVKMPNDRVTRPKPAIPAWQCRIERRIGGARALIGKLICFREGNTRPRVMRFVTRAFSGTEISPLDYLSRVTERIDFLKQKVYAWANRIRRYKRRVERYTQNRTFRSNERWVYKAWERPDQDVTDTRLPDDDAMCSFWRNIWSAPVSHTEGDWIREVERACDPLPDMGAIIISPQDVARAVRPLPNWKSPGPDGLHTFWIKWLHSSHACLASRYQASLESGSLPEFLMTGITHLLHKSGSTAEPKNYRPITCLPTVYKVLTSILRDKINQHINSNNIMSASQNGCRNGSRGTKELLLIDIAISQQVRRSRKDLSTCWIDYKKAYDSVPHTWLLRVLELYKIDATLRTFLMSCMGQWRTVLRYPGCRHVQRNSEPIRIERGIFQGDSLSPLWFCLALNPLSTLLGNSGLGYRLKRGGQVISHLLYMDDLKLFAPTNLQLMELLKVTETFSSAIRMEFGVDKCAIMHVKRGEIMESVGSQLSDSINLRCLSSTETYKYLGMSEALGINVTDMKQSLKERFFGRLKKAFNSLLSGGNKVRAFNGWVMPVLMYSFGVLKWTQTELDALDRRVRTLLTAYRMHHPRSSVMRLYIPRKCGGRGFLNAKTLHNREICSLREYFLAVEVGMHRDVVAVDKGLTPLSLANENWRKPAVLDTNDRRAVWQSKELHGRFFRALHGPDVDQLASVAWLRFGDLFGETEGFVCAIMDEVIMTNNYRRFIVKDGTVDICRACHRPGESIRHIVSGCSRLANGEYLHRHNLVARIIHQQLALKYSLVNSEVPYYRYVPDPVLDSGNITLYWDRSIITDRTIVANKPDIVVVDRIERRTMIVDITVPHDENLVKAEKDKQIKYLDLAREVVDMWDVDSAIIVPIVVSANGLIAKSLD

SEQ ID NO: 11806 - protein, 1200 aa, Hecatera dysodea
MLTRSRTRCQNTRLTPSDSSLSSASQPPGPTPAVSPEIPVAAVASSSSDEYFSPPTTPPPARRRGRGRPPTSLGPRGPPASDRVPAIGGSVQRMRWTHSINENVMRSYFGATEGGTNLTAYRGRMLSLFQVLEPAVNVSAQRLSDQVRVIQRNRMLDDAVLDRLRLESRSSRVSPASPPAAVQIQPSISPRPDHVSEDVDDGTISVSTQCNERLRSALEDAFREYRSTPPELRPRLPRLPMHNKNRALVCALDSQLSIYFDSSENLTDTHSILYCGAAAACRVAHVKLPNSDRVARPAVPAWQCRIERRIAEARALIGKLICFREGNTRRRVMRFVRRAFSGTDISPRDYLTRVTERIDFLKQKVYAWANRIRRYKRRVERYTQNRIFQNNERWVYRAWERPDQGVTDTRLPDDEAMLSFWRNIWSVPVSHTEGDWTREVERACDSIPEMGAINIIPQDVARAVRPLPNWKFPGPDGLHNFWIKWLTRSHARLASQFQSALESRSLPQFFTTGITHLLHKSGSTAEPKNYRPITCLPTVYKVLTSILRAKINDHIESNSIMSTSQNGCRSGARGTKELLLIDVAISQQVRRSRKDLSTCWIDYKKAYDSVPHTWLMRVLELYKVDAVLRAFLMSCMGQWRTVLHYPGCRQTQANSEPIRIERGIFQGDSLSPLWFCLALNPLSTLLEGSGQGYRLRRGGQVISHLLYMDDLKLFAPNNLQLMKLLKVTETFSSDISMEFGVDKCAVMHVKRGEIMESVGTQLSDSIHLRSLCSTETYKYLGMSEALGINATSVKQSLKERFFGRLNKVLNSLLSGGNKVRAFNGWVMPVLMYSFGILKWTQTELDALDRRVRSLLTANRMHHPRSSVMRLYIPRKCGGRGFLNAKTLHNREVCSLREYFLEADVGMHRDVVAVDKGFTPLSLANENWRKPVVLDTNDRREVWQSKELHGRFYRVLHGPDVDFLASVAWLRFGDLFGETEGFICAITDEVMMTNNYRKYIVKDGTVDICRACHRPGESIRHIISGCSSLANGDYLHRHNLVARIIHQQLALKYNLVESEVPYYRYAPDPVLENGNCTLYWDRSIITDRTIVANKPDIVVIDRLERRAMIVDIAVPHDENLVKAEKDKQSKYLDLAREVVDMWDVNTAVIVPIVVTANGIIAKSLDQHLKRLSLGSWIKGLIQKAVLLDTARIVRRFLSREP

SEQ ID NO: 11807 - protein, 868 aa, Hecatera dysodea
MRFVRRAFSGTDISPLDYLSCVTERIDFLKQKVYAWASRIRRYKRRVERYTQNRTFRSNERWVYKAWERPDQNVTDMHPPDDDAMCSFWRNIWSVPVSHTEGDWIREVERACDPLPEMGAIIISPQDVARAVRPLPNWKSPGPDGLHNFWIKWLQRSHACLASRYQAALESGSLPEFLMTGVTHLLHKSASTTEPKNYRPITCLPTVYKVLTSILRDKINQHINSNNIMSASQNGCRNGSRGTKELLLIDMAICQQVRRSRKDLSTCWIEYKKAYDSVPHTWLMRVLELYKIDATLRTFLMSCMGQWRTVLRYPGCRHIQRNSEPIRIERGIFQGDSLSPLWFCLALNPLSTLLENSGLGYRLKRGGQVISHLLYMDDLKLFAPTNLQLMELLNVTETFSNAIRMEFGVDKCAVMHVKRGEIMESVGTQLSDSINLRSLSSTETYKYLGMSEALGINVTDMKQSLRERFFGRLKKVFNSLLSGGNKVRAFNGWVMPILMYSFGVLKWTQTELDALDRRVRTLLTAYRMHHPRSSVMRLYIPRKCGGRGFLYAKTLHNREICSLREYFLAVDAGMHRDVVAVDKGLTPLSLANENWRKPAVLDTNDRRAVWQSKELHGRFFRALHGPDVDQLASVAWLRFGDLFGETEGFVCAIMDKVIMTNNYRRFIVKDGTVDICRACHRPGESIRHIISGCSRLANEEYLHRHNLVAGIIHQQLALKYSLVESEVPYYKYVPDPVLDNGNITLYWDRSIITDRTILANKPDIVIVDRIERRAMIVDITVPHDENLVKAEKNKQIKYLDLAREVVDMWEVDAAIIVPIVVSANGLIAKSLDQHLRRLTLGGWIKGLIQKAVLLDTARIVRRFLSLEP

SEQ ID NO: 11808 - protein, 1200 aa, Mythimna impura
MLTRSRAKKANTHPTSSGSSLSSASQPPGPAPTVSPEIPVAAVASSSSDEYFSPPTTPPPARRRGRGRPPASLGPRGPPASDRVLAAGGSVQRMRWTQSINENVMRSYFGATEGGSNLTAYRGRMLSLFQVLEPAVNVSAQRLSDQVRVIQRNRMLDDAVLDRLRLESRSSRVSPASPQAAVQLQSNVSLRPDHVGEDDDDGAISVSNQCNVRLRSALEDAFREYRFTPAELRPRLPRLPMHKKNRALVCALDSQLSNCFESSEDLTDTHSILYCAAVAACRVARVKFPNSDRVTRPAVPAWQCRIERRIGEARALIGKLICFREGNTRPRVMRFVRRAFSGTNISPRDYLPHITERIDFLKQKVYAWANRIRRYKRRVERYTQNRTFQRNERWVYRAWERPDQGVIDTRLPDDDAMCSFWRSIWSVPVSHTEGDWTREIERTCDLIPEMEPITISPQDVARAVRPLPNWKSPGPDGLHNFWLKWFQRSHARLASQFQSALESGSLPQFLTTGITHLLHKSGSTAEPKNYRPITCLPTVYKVLTSILRAKINSHIETNSIMSASQNGCRNGSRGTKELLLIDVAISQQVRRSRRDLSTCWIDYKKAYDSVPHTWLMRVLELYKVDATLRTFLMSCMRQWRTALHYPGCRQIRESSEPIRIERGIFQGDSLSPLWFCLALNPLSTLLEGSGLGYRLKRGGQVISHLLYMDDLKLFASNNLQLMELLKVTETFSSAIRMEFGLDKCAVMHVKRGEIMESVGTQLSDSIYIRSLCSTETYKYLGMSEALGINAADVKQSLKERFFGRLNKVLNSLLSGGNKVRAFNGWVMPVLMYSFGILKWTQTELDALDRRVRSLLTANRMHHPRSSVMRLYIPRKCGGRGFLNAKTLHNREICSLREYFLKTDVGMHRDVVAVDKGLTPLSLVNENWRKPTVMDTNERRAVWQGKELHGRFYRALHGPDVDLLASVSWLRFGNLFGETEGFVFAIMDEVMMTNNYRKYIVKDGTVDICRACHRPGESIRHIISGCSHLANGDYLHRHNLVARIIHQQLALKYNLVESEVPYYRYVPDPVLENGSVTLYWDRSIITDRTIVANKPDIVVIDRLERRTMIVDIAVPHDENLVKAEKDKQTKYLDLAREVVDMWEVDRAVIVPIVVTANGLIAKSLEQHLRRLSLGSWIKGLIQKAVLLDTARIVRRFLSQEP

SEQ ID NO: 11809 - protein, 1142 aa, Mythimna impura
MLTRAAARRARPPPPASSLSSASPPPESSPTVSAVTPAVAVASSSSDEYFSPPTSPPPARRRRGRRPPSGLGSRGPPASDRVPAPGGSVQRMRWTQSINENVMRAYYGAAEGGNNLTAYRVRMLSLFQVLEPAVNVSAQRLSDQVRVIQRNHMLDDTVLDRLRTEMSNHAIAPSSQSVVPVMVPPSYHLSDHADEEITDMVTHVSTQCNNELRSALECAIREYRNMTLELRQRLPRLPMHNKNKALVAALELSNYFDDCKDLTDTHSIMYCAAVAACRVAHVKFPNCDVATRPKPAVPAWQCRIERRIGGARALIGKLICFREGNTRPRVMRFVRRAFSGTDISPRDYMSRVTECIDFLKQKVYAWANRIRKYKRRVERYTQNRTFRSNERWVYRAWERPDQGVTDACLPDDDAMSSFWRSIWSVPVSHTEGDWTREVERACDPIPQMGAIDISPQDVARAVRPLPNWKSPGPDGLHNFWIKWFTRSHARLAYQFQSALESGSLPQFLTTGITHLLHKSGSTAEPKNYRPITCLPTVYKVLTSILRSKINSHIDKNLIMSPSQNGCRNGSRGTKELLLIDMTISQQVRRSRKDLSTCWIDYKKAFDSVPHTWLMRVLELYKIDTTLRTFLMSCMRQWSTVLRYPGWRHTQRNSEPVRIERGIFQGDSLSPLWFCLALNPLSTLLENSGLGYRLKRGGQVISHLLYMDDLKLFAPNNLQLMELLEVTETFSSAIRIEFGVDKCAVMHVKRGEVVESVGTQLTDSINLRSLSPTETYKYLGMSEALGINITDMKQSLKERFFGRLKKVLNSLLSGGNKVRAFIGWVMPVLMYSFGVLKWTQTELDALDRRVRTLLTAYRMHHPRSSVMRLYIPRKCGGRGFLNAKTLHNREVCSLREYFLAADVGMHRDVVAVDKGLTPLSLANENWRKPVVLDTNDRREVWQSKELHGRFFRALHGPGVDQLASVAWLRFGDLFGETEGFVCAIMDEVIMTNNYRRFIVKDGTVDICRACHRPGESIRHIISGCSRLANGEYLHRHNLIARIIHQQLALKYSLVESEVPYYRYEPDPVLDNGHITLYWDRSIITDRTIVANKPDKVMVDRSERRAMIVDISVPHDENLVKAEKDKQIKYIDLAREVVDMWDVD

SEQ ID NO: 11810 - protein, 1200 aa, Mythimna impura
MLTRAAARRARPPPPASSLSSASPPPEPCLTVSAVTPAVAAASSSSDEYYSPPTTPPPTRRRGERRPPACLGSRGPPASDRVPATGGCVSRMRWTQSINENVMRAYYGATEGGNNLTAYRVRMLSLFQVLEPAVNVSAQRLSDQVRVIQRNHMLDDTVLDRLRTEMGSHAIASSSQTAVPSQVSPSNHLPNHADEESTDMVTHVSTQCSNELRSALECAIREYRNMPLELRPRLPRLPMCNKNKALVAALDSQLSNYFDDCEDLTDTHSIMYCAAVAACRVAHVKFPNSDVATRPKPAVPAWQCRIERRIGGARALIGKLICFREGNTRPRVMRFVRRAFSGTDISPRDYMSCVTERIDFLKQKVYAWANRIRRYKRRVERYTQNHTFRSNERWVYRAWEQPDQSVTDTRLPDDDAMSSFWRNIWSVPVSHTEGGWTREVERACEPIPEMGAITISPQDVARAVRPLPNWKSPGPDGLHNFWIKWLQRSHARLASQYQTALESGSLPEFLTTGVTHLLHKSGSTAEPKNYRPITCLPTVYKVLTSILRAKINHHVDNNAIMSASQNGCRNGSRGTKELLLIDMAISQQVRRSQKDLSTCWIDYKKAYDSVPHTWLMRVLELYKIDTTLRTFLMSCMRQWRTVLRYSGCRHIQRNSEPVRIERGIFQGDSLSPLWFCLALNPLSTLLENSGLGYRLKRGGQVISHLLYMDDLKLFAPNNLQLMELLKVTETFSSAIRMEFGVDKCAVMHVKREEIVESVGTQLSDSINLRSLSPTETYKYLGMSEALGINATDMKQTLRERFFGRLKKVFNSLLSGGNKVRAFNGWVMPVLMYSFGVLKWTQTELDALDRRVRTLLTAYRMHHPRSSVMRLYIPRKCGGRGFLNAKTLHNREVCSLREYFLAADVGMHRDVVAVDKGLTPLSLANESWRKPVVLDTNDRREVWQSKELHGRFFRALHGSDVDQLASVAWLRVGDLFGETEGFVCAIMDEVIMTNNYRRFIVKDGTVDICRACHRPGESIRHIISGCSRLANGEYLHIHNLVARIIHQQLALKYSLVESEVPYYRYMPDPVLDNGDITLYWDRSIITDRTIVANKPDIVVVDRRERRTMIVDISVPHDENLVKAEKDKQIKYIDLAREVVDMWDVDSAIIVPIVVSANGLIAKSLDQHLRRLALGGWIKGLIQKAVLLDTARIVRRFLSLEP

SEQ ID NO: 11811 - protein, 1200 aa, Mythimna impura
MLTRAAARRARPPPPASSLSSASPPPEPCLTVSAVTPAVAAASSSSDEYYSPPTTPPPTRRRGERRPPACLGPRGPPASDRVPATGGCVSRMRWTQSINENVMRAYYGATEGGNNLTAYRVRMLSLFQVLEPAVNVSAQRLSDQVRVIQRNHMLDDTVLDRLRTEMGSHAIASSSQTAVPSQVSPSNHLPNHADEESTDMVTHVSTQCSNELRSALECAIREYRNMPLELRPRLPRLPMCNKNKALVAALDSQLSNYFDDCEDLTDTHSIMYCAAVAACRVAHVKFPNSDVATRPKPAVPAWQCRIERRIGGARALIGKLICFREGNTRPRVMRFVRRAFSGTDISPRDYMSCVTERIDFLKQKVYAWANRIRRYKRRVERYTQNRTFRSNERWVYRAWEQPDQSVTDTRLPDDDAMSSFWRNIWSVPVSHTEGGWTREVERACKPIPEMGAITISPQDVARAVRPLPNWKSPGPDGLHNFWIKWLQRSHARLESQYQTALESGSLPEFLTTGVTHLLHKSGSTAEPKNYRPITCLPTVYKVLTSILRAKINHHVDNNAIMSASQNGCRNGSRGTKELLLIDMAISQQVRRSQKDLSTCWIDYKKAYDSVPHTWLMRVLELYKIDTTLRTFLMSCMRQWRTVLRYPGCRHIQRNSEPVRIERGIFQGDSLSPLWFCLALNPLSTLLENSGLGYRLKRGGQVISHLLYMDDLKLFAPNNLQLMELLKVTETFSSAIRMEFGVDKCAVMHVKRGEIVESVGTQLSDSINLRSLSPTETYKYLGMSEALGINATDMKQTLRERFFGRLKTVFNSLLSGGNKVRAFNGWVMPVLMYSFGVLKWTQTELDALDRRVRTLLTAYRMHHPRSSVMRLYIPRKCGARGFLNAKTLHNREVCSLREYFLAADVGMHRDVVAVDKGLTPLSLANESWRKPVVLDTNDRREVWQSKELHGRFFRALHGSDVDQLASVAWLRVGDLFGETEGFVCAIMDEVIMTNNYRRFIVKDGTVDICRACHRPGESIRHIISGCSRLANGEYLHRHNLVARIIHQQLALKYSLVESEVPYYRYMPDPVLDNGDITLYWDRSIITDRTIVANKPDIVVVDRRERRTMIVDISVPHDENLVKAEKDKQIKYIDLAREVVDMWDVDSAIIVPIVVSANGLIAKSLDQHLRRLALGGWIKGLIQKAVLLDTARIVRRFLSLEP

SEQ ID NO: 11812 - protein, 975 aa, Mythimna impura
MPLKLRPRLPRLPMCNKNKALVAALDSQLSNYFDDCEDLTDTHSIMYCAAVAACRVAHVKFPNSDVDTRPKPAVPAWQCRIERRIGGARALIGKLICFREGNTRPRVMRFVRRAFSGTDISPRDYMSCVTERIDFLKQKVYAWANRIRRYKRRVERYTQNRTFRSNEMWVYRAWEQPDQGVADTRLPDDDVMSSFWRNIWSVPVSHTEGGWTREAERACEPIPEMGAITISPQDVARAVRPLPNWKSPGPDGLHNFWIKWLQRSHARLASQYQTALESGSLPEFLTTGVTHLLHKSGSTAEPKNYRPITCLPTVYKVLTSILRAKINHHVDNNAIMSASQNGCRNGSRGTKELLLIDMAISQQVRRSRKDLSTCWIDYKKAYDSVPHTWLMRVLELYKIDATLRTFLMSCMRQWRTVLRYPGCRHIQRNSEPVRIERGIFQGDSLSPLWFCLALNPLSTLLENSGLGYRLKRGGQVISHLLYMDDLKLFAPNNLQLMELLKVTETFSSAIRMEFGVDKCAVMHVKRGEIVESMGTQLSDSINLRSLSPTETYKYLGMSEALGINATDMKQTLRERFFGRLKKVFNSLLSGGNKVRAFNGWVMLVLMYSFGVLKWTQTELDALDRRVRTLLTAYRMHHPRSSVMRLYIPRKCGGRGFLNAKTLHNREVCSLREYFLTADVGMHRDVVAVDKGLTPLSLANESWRKPVVLDTNDRREVWQSKELHGRFFRALHGPDVDQLASVAWLRVGDLFGETEGFVCAIMDEVIMTNNYRRFIVKDGTVDICRACHRPGESIRHIISGCSRLANGEYLHRHNLVARIIHQQLALNYSLVESEVPYYRYVPDPVLDNGDITLYWDRSIITDRTIVANKPDIVVVDRRERRTMIVDISVPHDENLVKAEKDKQIKYIDLAREVVDMWDVDSAIIVPIVVSANGLIAKSLDQHLRRLALGGWIKGLIQKAVLLDTARIVRRFLSLEP

SEQ ID NO: 11813 - protein, 1200 aa, Mythimna impura
MLTRSRAKKANTHPTSSGSSLSSASQPPGPAPTVSPEIPVAAVASSSSDEYFSPPTTPPPARRRGRGRPPASLGFRGPPASDRVLAAGGSVQRMRWTQSINENVMRSYFGATEGGSNLTAYRGRMLSLFQVLEPAVNVSAQRLSDQVRVIQRNRMLDDAVLDRLRLESRSSRVSPASPQAAVQLQSNVSLRPDHVGEDDDDGAISVSNQCNVRLRSALEDAFREYRFTPAELRPRLPRLPMHKKNRALVCALDSQLSNCFDSSEDLTDTHSILYCAAVAACRVARVKFPNSDRVTRPAVPAWQCRIERRIGEARALIGKLICFREGNTRPRVMRFVRRAFSGTDISPRDYLPHITERIDFLKQKVYAWANRIRRYKRRVERYTQNRTFQRNERWVYRAWERPDQGVIDTRLPDDDAMCSFWRSIWSVPVSHTEGDWIREIERTCDLIPEMGAITISPQDVARAVRPLPNWKSPGPDGLHNFWLKWFQRSHARLASQFQSALESESLPQFLTTGITHLLHKSGSTAEPKNYRPITCLPTVYKVLTSILRAKINSHIETNSIMSASQNGCRNGSRGTKELLLIDVAISQQVRRSRRDLSTCWIDYKKAYDSVPHTWLMRVLELYKVDATLRTFLMSCMRQWRTALHYPGCRQTRESSEPIRIERGIFQGDSLSPLWFCLALNPLSTLLEGSGLGYRLRRGGHVISHLLYMDDLKLFASNNLQLMELLKVTETFSSAIRMEFGLDKCAVMHVKRGEIMESVGTQLSDSIYIRSLCSTETYKYLGMSEALGINAADMKQSLRERFFGRLNKVLNSLLSGGNKVRAFNGWVMPVLMYSFGILKWTQTELDALDRRVRSLLTANRMHHPRSSVMRLYIPRKCGGRGFLNAKTLHNREICSLREYFLKTDVGMHRDVVAVDKGLTPLSLVNENWRKPTVMDTNERRAVWQGKELHGRFYRALHGPDVDLLASVSWLRFGDLFGETEGFVFAIMDEVMMTNNYRKYIVKDGTVDICRACHRPGESIRHIISGCSHLANGDYLQRHNLVARIIHQQLALKYNLVESEVPYYRYVPDPVLENGGVTLYWDRSIITDRTIVANKPDIVVIDRLERRTMIVDIAVPHDENLVKAEKDKQTKYLDLAREVVDMWEVDRAIIVPIVVTANGLIAKSLEQHLRRLSLGSWIKGLIQKAVLLDTARIVRRFLSQEP

SEQ ID NO: 11814 - protein, 1200 aa, Mythimna impura
MLTRSRAKKANTHPTSSGSSLSSASQPPGPAPTVSPEIPVAAVASSSSDEYFSPPTTPPPARRRGRGRPPASLGSRGPPASDRVLAAGGSVQRMRWTQSINENVMRSYFGATEGGSNLTAYRGRMLSLFQVLEPAVNVSAQRLSDQVRVIQRNRMLDDAVLDRLRLESRSSRVSPASPQAAVQLQSNVSLRPDHVGEDDDDGAISVSNQCNVRLRSALEDAFREYRFTPAELRPRLPRLPMHKKNRALVCALDSQLSNCFDSSEDLTDTHSILYCAAVAACRVARVKFPNSDRVTRPAVPAWQCRIERRIGEARALIGKLICFREGNTRPRVMRFVRRAFSGTDISPRDYLPHITERIDFLKQKVYAWANRIRRYKRRVERYTQNRTFQRNERWVYRAWERPDQGVIDTRLPDDDAMCSFWRSIWSVPVSHTEGDWIREIERTCDLIPEMGAITISPQDVARAVRPLPNWKSPGPDGLHNFWLKWFQRSHARLASQFQSALESGSLPQFLTTGITHLLHKSGSTAEPKNYRPITCLPTVYKVLTSILRAKINSHIETNSIMSASQNGCRNGSRGTKELLLIDVAISQQVRRSRRDLSTCWIDYKKAYDSVPHTWLMRVLELYKVDATLRTFLMSCMRQWRTALHYPGCRQIRESSEPIRIERGIFQGDSLSPLWFCLALNPLSTLLEGSGLGYRLRRGGHVISHLLYMDDLKLFASNNLQLMELLKVTETFSSAIRMEFGLDKCAVMHVKRGEIMESVGTQLSDSIYIRSLCSTETYKYLGMSEALGINAADMKQSLRERFFGRLNKVLNSLLSGGNKVRAFNGWVMPVLMYSFGILKWTQTELDSLDRRVRSLLTANRMHHPRSSVMRLYIPRKCGGRGFLNAKTLHNREICSLREYFLKTDVGMHRDVVAVDKGLTPLSLVNENWRKPTVMDTNERRAVWQGKELHGRFYRALHGPDVDLLASVSWLRFGDLFGETEGFVFAIMDEVMMTNNYRKYIVKDGTVDICRACHRPGESIRHIISGCSHLANGIYLHRHNLVARIIHQQLALKYNLVESEVPYYRYVPDPVLENGGVTLYWDRSIITDRTIVANKPDIVVIDRLERRTMIVDIAVPHDENLVKAEKDKQTKYLDLAREVVDMWEVDRAIIVPIVVTANGLIAKSLEQHLRRLSLGSWIKGLIQKAVLLDTARIVRRFLSQEP

SEQ ID NO: 11815 - protein, 1200 aa, Mythimna impura
MLTRAAARRARPPPPASSLSSASPPPEPCLTVSAVTPAVAAASSSSDEYYSPPTTPPPTRRRGERRPPACLGSRGPPASDRVPATGGCVSRMRWTQSINENVMRAYYGATEGGNNLTAYRVRMLSLFQVLEPAVNVSAQRLSDQVRVIQRNHMLDDTVLDRLRTEMGSHAIASSSQTAVPSQVSPSNHLPNHADEESTDMVTHVSTQCSNELRSALECAIREYRNMPLELRPRLPRLPMCNKNKALVAALDSQLSNYFDDCEDLTDTHSIMYCAAVAACRVAHVKFPNSDVATRPKPAVPAWQCRIERRIGGARALIGKLICFREGNTRPRVMRFVRRAFSGTDISPRDYMSCVTERIDFLKQKVYAWANRIRRYKRRVERYTQNRTFRSNERWVYRAWEQPDQSVTDTRLPDDDAMSSFWRNIWSVPVSHTEGGWTREVERACQPIPEMGAITISPQDVARAVRPLPNWKSPGPDGLHNFWIKWLQRSHARLASQYQTALESGSLPEFLTTGVTHLLHKSGSIAEPKNYRPITCLPTVYKVLTSILRAKINHHVDNNAIMSASQNGCRNGSRGTKELLLIDMAISQQVRRSQKDLSTCWIDYKKAYDSVPHTWLMRVLELYKIDTTLRTFLMSCMRQWRTVLRYPGCRHIQRNSEPVRIERGIFQGDSLSPLWFCLALNPLSTLLENSGLGYRLKRGGQVISHLLYMDDLKLFAPNNLQLMELLKVTETFSSAIRMEFGVDKCAVMHVKRGEIVESVGTQLSDSINLRSLSPTETYKYLGMSEALGINATDMKQTLRERFFGRLKKVFNSLLSGGNKVRAFNGWVMPVLLYSFGVLKWTQTELDALDRRVRTLLTAYRMHHPRSSVMRLYIPRKCGGRGFLNAKTLHNREVCSLREYFLAADVGMHRDVVAVDKGLTPLSLANESWRKPVVLDTNDRREVWQSKELHGRFFRALHGSDVDQLASVAWLRVGDLFGETEGFVCAIMDEVIMTNNYRRFIVKDGTVDICRACHRPGESIRHIISGCSRLANGEYLHRHNLVARIIHQQLALKYSLVESEVPYYRYMPDPVLDNGDITLYWDRSIITDRTIVANKPDIVVVDRRERRTMIVDISVPHDENLVKAEKDKQIKYIDLAREVVDMWDVDSAIIVPIVVSANGLIAKSLDQHLRRLALGGWIKGLIQKAVLLDTARIVRRFLSLEP

SEQ ID NO: 11816 - protein, 1198 aa, Phlogophora meticulosa
MLTRSAARRARPPPPASSLSSASSPPAPSPIVSTVKPAVPVASSSSDEYFSPPTSPPPARRRRGRRPPDGLGPRGPPASDRVPAPGGSVQRMRWTQSINENVMRSYYGATEGGSNLTAYRVRMLSLFQVLEPAVNVSAQRLSDQVRVIQRNHMLDDVVLDRLRTEMQSSRVITSPSHTVVPPQYNIVLSSFADGEGSDKVTNVSTQYNEELRSALEGAIREYRFMLPALRPRLPRLPMHNKNRALVAALDSQLSNYFDNCDDLTDAHSILYYAAVAACRVAHVKFPYDIATRPKPAVPAWQCRIERRIAGARALIGKLVCYREGNTRPRVMRYVRRAFLGTDISPRDYMSRVTERIDFLKQKVYAWASRIRRYKRRVERYTQNRTFQSNERWVYRAWERPVQGVTDTHLPDDDVMCSFWRNIWSVPVSHTEGDWTREVERACDPIPQMGAITISPQDVARAVRPLPNWKSPGPDGLHNFWIKWLQKSHARLASQFQSTLETGSLPQFLTTGITHLLHKSGSTAEPKNYRPITCLPTVYKVLTSILRVKINNHIDSNSIMSASQNGCRNGSRGTKELLLIDTAISQQVRRSRRDLSTCWIDYKKAYDSVPHTWLKRVLELYKVDATLRTFLTSCMGQWRTVLRYPGCRQIQRNSEPIRIERGIFQGDSLSPLWFCLALNPLSTLLEDSGLGYRLKRGGQVVSHLLYMDDLKLFAPSDLQLMELLTVTKTFSSAIRMEFGVDKCAVMHVKRGKIVESVGTQLPDFINFRALSPIETYKYLGMSEALGINAADMKQSLKERFFGRLKKVCNSLLSGGNKVRAFNGWVMPVLMYSFGILKWTQTELDALDRRVRTFLTASRMHHPRSSVMRLYIPRKCGGRGFLNAKTLHNREICSLRDYFLETDVGMHRDVVAVDQGLTPLSLAKENWRKPVVLDTNDRKEVWQSKELHGRFFQALHGPDVDQLASVSWLRFGDLFGETEGFVCAIMDEVIMTNNYRRFIVKDGTVDICRACHRPGESIRHIISGCSRLANEEYLHRHNLVARIIHQQLALKYSLVESEVPYYKYVPDPVLENGSVTLYWDRSIITDRTIVANKPDIVVMDRIERRATIIDVTVPHDGNLVKAEKDKQIKYLDLAREVVDMWDVDSAIVVPIVVSANGLIAKSLDQHLRRLALGSWIKGLIQKAVLLDTARIVRRFLSLEP

SEQ ID NO: 11817 - protein, 1200 aa, Phlogophora meticulosa
MLTRSAARRARPPPLASSLSSASPPPESSPIVSTVTPAVAIASSSSDEYFSPPTSPPPARRRRGRRPPDSIGPRGPPASDRVPASGGSVQRMRWTQSINENVMRSYYGATEGGTNLTAYRGRMLSLFQMLEPAVNVSAQRLSDQVRVIQRNHMLDDVVLDRLRLNSRIYHVTPALPPVAVQLQSLPSVSPRPDYVGEEDDDAAISVSSQCNVRLRSALEDAFREYRSTPPELRSRLPRLPMHKKNKALMSALDSLLTKSFDNSKDLTDTHSILYCAAAAACRVANVKFPNTERATRPAVPAWQCRIQRRIDEARALIGKLICFREGNTRPRVMRFVRRAFSGTDISSRDYLTRVTERIDFLKQKICAWANRIRRYKRRVERYTQNRTFRSDERWVYRAWERSDQGVTDTCLPDDEAMCSFWRSIWSVPVSHTEGNWTREIERACEPLPEMGAINISPQDVASAVRPLPNWKSPGPDGLHNFWIKWLQSSHARLACQFQSALESGSLPKFLTTGITHLLHKSGSTAEPRNYRPITCLPTVYKVLTSILRSKINNHIDSNLIMSFSQNGCRNGSRGTKELLLIDTAISQQVRRSRKDLSTCWVDYKKAYDSVPHTWLMRVLELYKVDATLRTFLMSCMGQWRTVLRYPGCQQTRENSEPIRIERGIFQGDSLSPLWFCLALNPLSTLLEGSGLGYRLRTGGQVISHLLNMDDLKLFAPNNLQLMELLKVTETFSSAIRMDFGVDKCAVMHVKRGEIVESVGTQLSDSIYLRSLSSTETYKYLGMSEALGINATDMKQSLKERFFGRLNKVLNSLLSGGNKVRAFNGWVMPVLMYSFGILKWTQTELDALDRRVRTLLTANRMHHPRSSVMRLYIPRKCGGRGFLNAKTLHNREICSLREYFLKADVGMHRDVVAVDKTFTPLSLANKNWRKPIVLDTADRMEIWKSKELHGRFYRVLHGPDVDLVASISWLRFGDLFGETEGFVCAIMDEVIMTNNYRKYIVKDGTADICRACHRPGESIRHIISGCSRLANGDYLHRHNLVARIIHQQLALKYNLVDLEVPYYKYVPDPVLENGSITLYWDRSIITDRTIVANKPDIVVIDRSERRTMIIDITVPHDENLVKAEKEKQMKYLDLAREVVDMWDVNTAVIVPIVVTANGIIAKSLDQHLKRLSLGSWIKGLIQKAVLLDTARIVRRFLSQEP

SEQ ID NO: 11818 - protein, 1109 aa, Phlogophora meticulosa
MRWTQSINENVMRSYYGATEGGTNLTAYRGRMLSLFQMLEPAVNVSAQRLSDQVRVIQRNHMLDDVVLDRLRLNSRIYHVTPALPPVAVQLQSLPSVSPRPDYVGEEDDDAAISVSSQCNVRLRSALEDAFREYRSTPPELRSRLPRLPMHKKNKALMSALDSLLTKSFDNSKDLTDTHSILYCAAAAACRVANVKFPNTERATRPTVPAWQCRIQRRIDEARALIGKLICFREGNTRPRVMRFVRRAFSGTDISSRDYLTRVTERIDFLKQKICAWANRIRRYKRRVERYTQNRTFRSDERWVYRAWERSDQGVTDTCLPDDEAMCSFWRSIWSVPVSHTEGNWTREIERACEPLPEMGAINISPQDVASAVRPLPNWKSPGPDGLHNFWIKWLQSSHARLACQFQSALESGSLPKFLTTGITHLLHKSGSTAEPRNYRPITCLPTVYKVLTSILRSKINNHIDSNLIMSFSQNGCRNGSRGTKELLLIDTAISQQVRRSRKDLSTCWVDYKKAYDSVPHTWLMRVLELYKVDATLRTFLMSCMGQWRTVLRYPGCQQTRENSEPIRIERGIFQGDSLSPLWFCLALNPLSTLLEGSGLGYRLRTGGQVISHLLYMDDLKLFAPNNLQLMELLKVTETFSSAIRMDFGVDKCAVMHVKRGEIVESVGTQLSDSIYLRSLSSTETYKYLGMSEALGINATDMKQSLKERFFGRLNKVLNSLLSGGNKVRAFNGWVMPVLMYSFGILKWTQTELDALDRRVRTLLTANRMHHPRSSVMRLYIPRKCGGRGFLNAKTLHNREICSLREYFLKADVGMHRDVVAVDKTFTPLSLANKNWRKPIVLDTADRMEIWKSKELHGRFYRVLHGPDVDLVASISWLRFGDLFGETEGFVCAIMDEVIMTNNYRKYIVKDGTVDICRACHRPGESIRHIISGCSRLANGDYLHRHNLVARIIHQQLALKYNLVDLEVPYYKYVPDPVLENGSITLYWDRSIITDRTIVANKPDIVVIDRSERRTMIIDITVPHDENLVKAEKEKQMKYLDLAREVVDMWDVNTAVIVPIIVTANGIIAKSLDQHLKRLSLGSWIKGLIQKAVLLDTARIVRRFLSQEP

SEQ ID NO: 11819 - protein, 1198 aa, Phlogophora meticulosa
MLTRSAARRARPPPPASSLSSASSPPKPSTIVSTVKPAVPVASSSSDEYFSPPTSPPPARRRRGRRPPDGLGPRGPPASDRVPAPGGSVQRMRWTQSINENVMRSYYGATEGGSNLTAYRVRMLSLFQVLEPAVNVSAQRLSDQVRVIQRNHMLDDVVLDRLRTEMQSSRVITSPSHTVVPPQYNIVLSSFADGEGSDKVTNVSTQYNEELRSALEGAIREYRFMLPALRPRLPRLPMHNKNRALVAALDSQLSNYFDNCDDLTDAHSILYCAAVAACRVAHVKFPYDIATRPKPAVPAWQCRIERRIAGARALIGKLVCYREGNTRPRVMRYVRRAFLGTDISPRDYMSRVTERIDFLKQKVYAWASRIRRYKRRVERYTQNRTFQSNERWVYRAWERPVQGVTDTHLPDDDVMCSFWRNIWSVPVSHTEGDWTREVERACDPIPQMGAITISPQDVARAVRPLPNWKSPGPDGLHNFWIKWLQKSHARLASQFQSALETGSLPQFLTTGITHLLHKSGSTAEPKNYRPITCLPTVYKVLTSILRVKINNHIDSNSIMSASQNGCRNGSRGTKELLLIDTAISQQVRRSRKDLSTCWIDYKKAYDSVPHTWLKRVLELYKVDATLRTFLTSCMGQWRTVLRYPGCRQIQRNSEPIRIERGIFQGDSLSPLWFCLALNPLSTLLEDSGLGYRLKRGGQVVSHLLYMDDLKLFAPSDLQLMELLTVTKTFSSAIRMEFGVDKCAVMHVKRGKIVESVGTQLPDFINFRALSPIETYKYLGMSEALGINAADMKQSLKERFFGRLKKVCNSLLSGGNKVRAFNGWVMPVLMYSFGILKWTQTELDALDRRVRTFLTASRMHHPRSSVMRLYIPRKCGGRGFLNAKTLHNREICSLRDYFLETDVGMHRDVVAVDQGLTPLSLAKENWRKPVVLDTNDRKEVWQSKELHGRFFQALHGPDVDQLASVSWLRFGDLFGETEGFVCAIMDEVIMTNNYRRFIVKDGTVDICRACHRPGESIRHIISGCSRLANEEYLHRHNLVARIIHQQLALKYSLVESEVPYYKYVPDPVLENGSVTLYWDRSIITDRTIVANKPDIVVMDRIERRATIIDVTVPHDGNLVKAEKDKQIKYLDLAREVVDMWDVDSAIVVPIVVSANGLIAKSLDQHLRRLALGSWIKGLIQKAVLLDTARIVRRFLSLEP

SEQ ID NO: 11820 - protein, 1134 aa, Phlogophora meticulosa
MTYSWMMIIIIIIASDRVPAPGGSVQRMRWTQSINENVMRSYYGATEGGSNLTAYRVRMLSLFQVLEPAVNVSAQRLSDQVRVIQRNHMLDDVVLDRLRTEMQSSRVITSPSHTVVPPQYNIVLSSFADGEGSDKVTNVSTQYNEELRSALEGAIRQYRFMLPALRPRLPRLPMHNKNRALVAALDSQLSNYFDNCDDLTDAHSILYCAAVAACRVAHVKFPYDIATRPKPAVPAWQCRIERRIAGARALIGKLVCYREGNTRPRVMRYVRRAFLGTDISPRDYMSRVTERIDFLKQKVYAWASRIRRYKRRVERYTQNRTFQSNERWVYRAWERPVQGVTDTHLPDDDVMCSFWRNIWSVPVSHTEGDWTREVERACDPIPQMGAITISPQDVARAVRPLPNWKSPGPDGLHNFWIKWLQKSHAHLASQFQSALETGSLPQFLTTGITHLLHKSGSTAEPKNYRPITCLPTVYKVLTSILRVKINNHIDSNSIMSASQNGCRNGSRGTKELLLIDTAISQQVRRSRKDLSTCWIDYKKAYDSVPHTWLKRVLELYKVDATLRTFLTSCMGQWRTVLRYPGCRQIQRNSEPLRIERGIFQGDSLSPLWFCLALNPLSTLLEDSGLGYRLKRGGQVVSHLLYMDDLKLFAPSDLHLMELLTVTKTFSSAIRMEFGVDKCAVMHVKRGKIVESVGTQLPDFINFRALSPIETYKYLGMSEALGINAADMKQSLKERFFGRLKKVCNSLLSGGNKVRAFNGWVMPVLMYSFGILKWTQTELDALDRRVRTFLTASRMHHPRSSVMRLYIPRKCGGRGFLNAKTLHNREICSLRDYFLETDVGMHRDVVAVDQGLTPLSLAKENWRKPVVLDTNDRKEVWQSKELHGRFFQALHGPDVDQLASVSWLRFGDLFGETEGFVCAIMDEVIMTNNYRRFIVKDGTVDICRACHRPGESIRHIISGCSRLANEEYLHRHNLVARIIHQQLALKYSLVESEVPYYKYVPDPVLENGSVTLYWDRSIITDRTIVANKPDIVVMDRIERRATIIDVTVPHDGNLVKAEKDKQIKYLDLAREVVDMWDVDSAIVVPIVVSANGLIAKSLDQHLRRLALGSWIKGLIQKAVLLDTARIVRRFLSLEP

SEQ ID NO: 11821 - protein, 1106 aa, Xestia xanthographa
MRWTQSINENVMRAYYGATEGGNNLTAYRVRMLSLFQVLEPAVNVSAQRLSDQVRVIQRNRMLDDTILDRLRTEIQSSHVIATPSQAVVPPQSSIIPNCDNDVGNDMVTNVSTQCNVEMRSALEGAIREYRFMQPDLRPRIPRLPMHNKNRALVAVLDSQLSNYFDNCEDLTDVHSILYCAAVAACRVAHVKFPFDRATRPKPAVPAWQYRIERRIGGARALIGKLVCFREGNTRPRVMRFVRQAFSGTDISPRDYMSRVTERIDFLKQKVYAWANRIRRYKRRVDRYTQNRTFQKDERWVYRAWERPDQGVADTHLPDDDAMCSFWRSIWSVPVSHAEGEWTRVIERACDPVSEMGAITISPQDVARAVRPLPNWKSPGPDGLHNFWIKWFTRSHARLATLFQSALESGSLPEFLTTGITHLLHKSGSTAEPKNYRPITCLPTVYKVLTSILRTKISKHIDDNSVMSASQNGCRNGSRGTKELLLIDMAISHQVRRSRKDLSTCWIDYKKAYDSVPHTWLMRVLELYKVDATLRTFLMSCMGQWRTVLRYPGCRQIQRNSEPIRIERGIFQGDSLSPLWFCLALNPLSTLLEDSGLGYRLRKDGQVISHLLYMDDLKLFAPNDLQLMELLKVTDTFSSAIRMEFGVDKCAVMHVKRGEIVESVGTQLSDSITLRSLSATETYKYLGMSEALGVNVADMKQSLKERFFGRLKKVFNSLLSGGNKVRAFNGWVMPVLMYSFGILKWTQTELDALDTKVRKLLTAYRMHHPRSSVMRLYIPRKCGGRGFLNAKTLHNREICSLREYFLGTDVGMHRDVVTVDKGLTPLSLAKENWRKPPVLDTNDRREVWQSKELHGRFFRALHGPDVDLPASVAWLRSGDLFGETEGFVCAIMDEVMMTNNYRRFIVKDGTVDICRACHRPGETIRHIISGCSRLANGEYLHRHNLVARIIHQQLALKYNLVESEVPYYRYVPDPVLDNGCITLYWDQSIITDRTIVANKPDIVVVDRSERRAMIVDITVPHDENLVKAEKDKQIKYLDLAREVVDMWEVDSAIIVPIVVSAHGLIAKSLDQYLRRLSLGSWIKGLIQKAVLLDTARIVRRFLSLEP

SEQ ID NO: 11822 - protein, 1198 aa, Xestia xanthographa
MLTRSAAARRARLPPPDSSLSSASPPPEPSPIVSAVTPAVAVASSSSDEYFSPPTTPPPARRRGGRRPPDGLGPRGPPASDRVPAPGGSVQRMRWTQSINENVMRAYYGATEGGNNLTAYRVRMLSLFQVLEPAVNVSAQRLSDQVRVIQRNRVLDDTVLDRLRTEIQSNHVIATPSQAVVPPQSSVIPNCDNDVSNDMVTNVSTQCNVEMRSALEGAIREYRFMQPDLRPRIPRLPMHNKNRALVAVLDSQLSNYFDNCEDLTDVHSILYCAAVAACRVAHVKFPSDRATRPKPAVPAWQYRIERRIGGARALIGKLVCFREGNTRPRVMRFVRQAFSGTDISPRDYMSRVTERIDFLKQKVYAWANRIRRYKRRVDRYTQNRTFQKDERWVYRAWERPDQGVADTHLPDDDAMCSFWRSIWSVPVSHAEGEWTRVIERACDPISEMGAINISPQDVARAVRPLPNWKSPGPDGLHNFWIKWFTRSHARLATLFQSALESGSLPEFLTTGITHLLHKSGSTAEPKNYRPITCLPTVYKVLTSILRTKISKHIDDNSVMSASQNGCRNGSRGTKELLLIDMAISHQVRRSRKDLSTCWIDYKKAYDSVPHTWLMRVLELYKVDATLRTFLMSCMGQWRTVLRYPGCRQIQRNSEPIRIERGIFQGDSLSPLWFCLALNPLSTLLEDSGLGYRLRKDGQVISHLLYMDDLKLFAPNDLRLMELLKVTETFSNAIRMEFGVDKCAVMHVKRGEIVESVGTQLSDSITLRSLSATETYKYLGMSEALGVNVADMKQSLKERFFGRLKKVLNSLLSGGNKVRAFNGWVMPVLMYSFGILKWTQTELDALDTKVRKLLTAYRMHHPRSSVMRLYIPRKCGGRGFLNAKTLHNREICSLREYFLGTDVGMHRDVVTMDKGFTPLSLAKENWRKPPVLDTNDRREVWQSKELHGRFFRALHGPDVDLSASVAWLRSGDLFGETEGFVCAIMDEVMMTNNYRRFIVKDGTVDICRACHRPGESIRHIISGCSRLANGEYLHRHNLVARIIHQQLALKYNLVESEVPYYRYVPDPVLDNGCITLYWDQSIITDRTIVANKPDIVVVDRSERRAMIVDITVPHDENLVKAEKDKQIKYLDLAREVVDMWEVDSAIIVPIVVSAHGLIAKSLDQYLRRLSLGSWIKGLIQKAVLLDTARIVRRFLSLEP

SEQ ID NO: 11823 - protein, 1198 aa, Xestia xanthographa
MLTRSAAARRARLPPPDSSLSSASPPPEPSPIVSAVTPAVAVASSSSDEYFSPPTTPPPARRRGGRRPPDGLGPRGPPASGRVPAPGGSVQRMRWTQSINENVMRAYYGATEGGNNLTAYRVRMVSLFQVLEPAVNVSAQRLSDQVRVIQRNRMLDDTVLDRLRTEIQSNHVIATPSQAVVPPQSSIIPNCDNDVSNDMVTNVSTQCNVEMRSALEGAIREYRFMQPDLRPRIPRLPMHNKNRALVAVLDSQLSNYFDNCEDLTEVHSILYCAAVAACRVAHVKFPSDSATRPKPAVPAWQYRIERRIGGARALIGKLVCFREGNTRPRVMRFVRQAFSGTDISPRDYMSRVTERIDFLKQKVYAWANRIRRYKRRVDRYTQNRTFQKDERWIYRAWERPDQGVADTHLPDDDAMCSFWRSIWSVPVSHAEGEWTRVIERACDPISEMGAITISPQDVARAVRPLPNWKSPGPDGLHNFWIKWLTRSHARLAALFQSALESGSLPEFLTTGITHLLHKSGSNAEPKNYRPITCLPTVYKVLTSILRTKISKHIDDNSVMSASQNGCRNGSRGTKELLLIDMAISHQVRRSRKDLSTCWIDYKKAYDSVPHTWLMRVLELYKVDATLRTFLMSCMGQWRTVLRYPGCRQIQRNSEPIRIERGIFQGDSLSPLWFCLALNPLSTLLEDSGLGYRLRKDGHVISHLLYMDDLKLFAPNDLRLMELLKVTETFSNAIRMEFGVDKCAVMHVKRGEIVESVGTQLSDSITLRSLSATETYKYLGMSEALGVNVADMKQSLKERFFGRLKKVLNSLLSGGNKVRAFNGWVMPVLMYSFGILKWTQTELDALDTKVRKLLTAYRMHHPRSSVMRLYIPRKCGGRGFLNAKTLHNREICSLREYFLGTDVGMHRDVVTMDKGLTPLSLAKENWRKPPVLDTNDRREVWQSKELHGRFFRALHGPDVDLSASVAWLRSGDLFGETEGFVCAIMDEVMMTNNYRRFIVKDGTVDICRACHRPGESIRHIISGCSRLANGEYLHRHNLVARIIHQQLALKYNLVESEVPYYRYVPDPVLDNGCITLYWDQSIITDRTIVANKPDIVVVDRSERRAMIVDITVPHDENLVKAEKDKQIKYLDLAREVVDMWEVDSAIIVPIVVSAHGLIAKSLDQYLRRLSLGSWIKGLIQKAVLLDTARIVRRFLSLEP

SEQ ID NO: 11824 - protein, 1197 aa, Xestia xanthographa
MLTRSAAARRARLPPPDSSLSSASPPPEPSPIVSAVTPAVAVASSSSDEYFSPPTTPPPARRRGGHRPPDGLGPRGPPASDRVPAPGGSVQRMRWTQSINENVMRAYYGATEGGNNLTAYRVRMLSLFQVLEPAVNVSAQRLSDQVRVIQRNRMLDDTVLDRLRTEIQSNHVIVTPSQAVVPPQSSIIPCDNDVSNDMVTNVSTQCNVEMRSALEGAIREYRFMQPDLRPRIPRLPMHNRNRALVAVLDSQLSNYFDNCEDLTDVHSILYCAAVAACRVAHVKFPSDRATRPKPAVPAWQYRIERRIGGARALIGKLVCFREGNTRPRVMRFVRQAFSGTDISPRDYMSRVTERIDFLKQKVYAWANRIRRYKRRVDRYTQNRTFQKDERWVYRAWERPDQGVADTHLPDDDAMCSFWRSIWSVPVSHAEGEWTRVIERACDPISEMGAINISPQDVARAVRPLPNWKSPGPDGLHNFWIKWFTRSHARLATLFQSALESGSLPEFLTTGITHLLHKSGSTAEPKNYRPITCLPTVYKVLTSILRTKISKHIDDNSVMSASQNGCRNGSRGTKELLLIDMAISHQVRRSRKDLSTCWIDYKKAYDSVPHTWLMRVLELYKVDATLRTFLMSCMGQWRTVLRYPGCRQIQRNSEPIRIERGIFQGDSLSPLWFCLALNPLSTLLEDSGLGYRLRKDGQVISHLLYMDDLKLFAPNDLRLMELLKVTETFSNAIRMEFGVDKCAVMHVKRGEIVESVGTQLSDSITLRSLSATETYKYLGMSEALGVNVADMKQSLKERFFGRLKKVLNSLLSGGNKVRAFNGWVMPVLMYSFGILKWTQTELDALDTKVRKLLTAYRMHHPRSSVMRLYIPRKCGGRGFLNAKTLHNREICSLREYFLGTDVGMHRDVVTMDKGFTPLSLAKENWRKPPVLDTDDRREVWQSKELHGRFFRALHGPDVDLSASVAWLRSGDLFGETEGFVCAIMDEVMMTNNYRRFIVKDGTVDICRACHRPGESIRHIISGCSRLANGEYLHRHNLVARIIHQQLALKYNLVESEVPYYRYVPDPVLDNGCITLYWDQSIITDRTIVANKPDIVVVDRSERRAMIVDITVPHDENLVKAEKDKQIKYLDLAREVVDMWEVDSAIIVPIVVSAHGLIAKSLDQYLRRLSLGSWIKGLIQKAVLLDTARIVRRFLSLEP

SEQ ID NO: 11825 - protein, 1198 aa, Xestia xanthographa
MLTRSAAARRARLPPPDSSLSSASPPPEPSPIVSAVTPAVAVASSSSDEYFSPPTTPPPARRRGGRRPPDGLGPRGPPASDRVPAPGGSVQRMRWTQSINENVMRAYYGATEGGNNLTAYRVRMLSLFQVLEPAVNVSAQRLSDQVRVIQRNRMLDDTVLDRLRTEIQSSHVIATPSQAVVPPQSSIIPNCDNDVGNDMVTNVSTQCNVEMRSALEGAIREYRFMQPDLRPRIPRLPMHNKNRALVAVLDSQLSNYFDNCEDLTDVHSILYCAAVAACRVAHVKFPSDRATRPKPAVPAWQYRIERRIGGARALIGKLVCFREGNTRPRVMRFVRQAFSGTDISPRDYMSRVTERIDFLKQKVYAWANRIRRYKRRVDRYTQNRTFQKDERWVYRAWERPDQGVADTHLPDDDAMCSFWRSIWSVPVSHAEGEWTRVIERACDPVSEMGAITISPQDVARAVRPLPNWKSPGPDGLHNFWIKWFTRSHARLATLFQSALESGSLPEFLTTGITHLLHKSGSTAEPKNYRPITCLPTVYKVLASILRTKISKHIDDNSVMSASQNGCRNGSRGTKELLLIDMAISHQVRRSRKDLSTCWIDYKKAYDSVPHTWLMRVLELYKVDATLRTFLMSCMGQWRTVLRYPGCRQIQRNSEPIRIERGIFQGDSLSPLWFCLALNPLSTLLEDSGLGYRLRKDGQVISHLLYMDDLKLFAPNDLQLMELLKVTDTFSSAIRMEFGVDKCAVMHVKRGEIVESVGTQLSDSITLRSLSATETYKYLGMSEALGVNVADMKQSLKERFFGRLKKVFNSLLSGGNKVRAFNGWVMPVLMYSFGILKWTQTELDALDTKVRKLLTAYRMHHPRSSVMRLYIPRKCGGRGFLNAKTLHNREICSLREYFLGTDVGMHRDVVTVDKGLTPLSLAKENWRKPPVLDTNDRREVWQSKELHGRFFRALHGPDVDLPASVAWLRSGDLFGETEGFVCAIMDEVMMTNNYRRFIVKDGTVDICRACHRPGETIRHIISGCSRLANGEYLHRHNLVARIIHQQLALKYNLVESEVPYYRYVPDPVLDNGCITLYWDQSIITDRTIVANKPDIVVVDRSERRAMIVDITVPHDENLVKAEKDKQIKYLDLAREVVDMWEVDSAIIVPIVVSAHGLIAKSLDQYLRRLSLGSWIKGLIQKAVLLDTARIVRRFLSLEP

SEQ ID NO: 11826 - protein, 1205 aa, Cosmia trapezina
MLTRSRAQQLRNTQPTSSGSSLSSASQLPEPAPDVSQVIPAAAVASSSSDEYFSPPTTPPPVRRRGRGRPPASLGPRGPSASDRVPAPGGSVQRMRWTQTVNENVMRAYFGATEGGSNLTAYRGRMLSLFQVLEPAVNVSAQRLSDQVRVIQRNHMLDDVVLDRLRLESRNSRVTSVSPMVAVQLQNLPSASPRPDCVGEEDDSGAISVSSQCNVQLRSALEDAFREYRSAPPGLRPRLPRLPMHKKNKVLVGALDSQLSNCFDGSKDVADTHSILYCAAVAACRVAHVKFPNSERVPRPKPAVPAWQCRIERRIGEARALIGKLICFREGNTRPRVMRFVRRAFSGTDISPRDYFTCVTERIDFLKQKICAWANRIRRYRRRVERYTQNRTFQSDERWVYRAWERPDQGVADTQLPDDDAMCSFWRSIWSVPVSHTEGDWTREVERACDHIPQMGALTISPQDVARAVRPLPNWKSPGPDGLHNFWIKWFQRSHARLASQFQSALQSGSLPQFLTTGITHLLHKSGSTAEPRNYRPITCLPTVYKVLTSILRAKINKHIDTNSIMSASQNGCGNGSRGTKELLLIDMTINQQVRRSRKDLSTCWIDYKKAYDSVPHTWLMRVLELYKIDATLRTFLMSCMGQWRTVLRYPGCRNIQRNSEPIRIERGIFQGDSLSPLWFCLALNPLSTLLEDSGLGYRLRRGGQVISHLLYMDDLKLFAPNNLQLMELLKVTETFSSAIRMEFRVDKCAVMHVKRGEIVESVRTQLSDSIHLRSLSSLETYKYLGMSEALGINAADMKQSLRERFFGRLNKVLNSLLSGGNKVRAFNGWVMPVLMYSFGILKWTQTELDALDRRVRTLLTANRMHHPRSSVMRLYIPRKCGGRGFLNAKTLHNREVCSLREYFLEADAGMHRDVVSVDKGLTPLSLANENWRKPVVLDTNDRREVWQSKELHGRFYRVLHGPDVDFLASVSWLRFGDLFGETEGFVFAIMDEVMMTNNYRKYIVKDGTVDICRACHRPGESIRHIISGCSRLANGDYLHRHNLVARIIHQQLALKYSLVESEVPYYRYVPDPVLENGNITLYWDRSIITDRTIVANKPDIVVIDRLERRTMIVDIAVPHDENLVKAEKDKQIKYLDLAREVVDMWDVDTAIIVPIVVTANGIIAKSLDQHLRRLSLGGWIKGLIQKAVLLDTARIVRRFLSQQP

SEQ ID NO: 11827 - protein, 1205 aa, Cosmia trapezina
MLTRSRAQHLRNTHPTSSGSSLSSASQLPEPAPDVSQVIPAAAVASSSSDEYFSPPTTPPPVRRRGRGRPPASLGPRGPPASDRVPAPGGSVQRMRWTQTVNENVMRAYFGATEGGSNLTAYRGRMLSLFQVLEPAVNVSAQRLSDQVRVIQRNHMLDDVVLDRLRLESRNSRVTSDSPMVAVQLQNLPSASPRPDRVGEEYDSGAISVSSQCNVQLRSALEDAFREYRSTPPGLRPRLPRLPMHKKNKALVCALDSQLSNCFDGSKDLADTHSILYCAAVAACRVAHVKFHNNDRVTRPKPAVPTWQCRIERRIGEARALIGKLICFREGNTRPRVMRFVRRAFSGMDISPRDYLTCVTERIDFLKQKICAWANRIRRYRRRVERYTQNRTFQSDERWVYRAWERPDQGVADTQLPDDDAMCSFWRSIWSVPVSHTEGDWTREVERACDHIPQMGALTISPQDVARAVRPLPNWKSPGPDGLHNFWIKWFQRSHARLASQFQSALQSGSLPQFLTTGITHLLHKSGSTAEPRNYRPITCLPTVYKVLTSILRAKINKHIDTNSIMSASQNGCGNGSRGTKELLLIDMTISQQVRRSRKDLSTCWIDYKKAYDSVPHTWLMRVLELYKIDATLRTFLMSCMGQWRTVLRYPGCRNIQRNSEPIRIERGIFQGDSLSPLWFCLALNPLSTLLEDSGLGYRLRRGGQVISHLLYMDDLKLFAPNNLQLMELLKVTETFSSAIRMEFGVDKCAVMHVKRGEIVESVRTQLSDSIHLRSLSSLETYKYLGMSEALGINAADMKQSLRERFFGRLNKVLNSLLSGGNKVRAFNGWVMPVLMYSFGILKWTQTELDALDRRIRTLLTANRMHHPRSSVMRLYIPRKCGGRGFLNAKTLHNREVCSLREYFLEADVGMHREVVSVDKGLTPLSLANENWRKPIVLDTNDRREVWQSKELHGRFYRVLHGPDVDFLASVSWLRFGDLFGETEGFVFAIMDEVMMTNNYRKYIVKDGTVDICRACHRPGESIRHIISGCSRLANGDYLHRHNLVARIIHQQLALKYSLVESEVPYYRYVPDPVLENGNITLYWDRSIITDRTIVANKPDIVVIDRLERRTVIVDIAVPHDENLVKAEKDKQIKYLDLAREVVDMWDVDTAIIVPIVVTANGIIAKSLDQHLRRLSLGGWIKGLIQKAVLLDTARIVRRFLSQQP

SEQ ID NO: 11828 - protein, 1205 aa, Cosmia trapezina
MLTRSRAQHLRNTHPTSSGSSLSSASQLPEPAPDVSQVIPAAAVASSSSDEYFSPPTTPPPVRRRGRGRPPASLGPRGPPASDRVPAPGGSVQRMRWTQTVNENVMRAYFGATEGGSNLTAYRGRMLSLFQVLEPAVNVSAQRLSDQVRVIQRNHMLDDVVLDRLRLESRNSRVTSDSPMVAVQLQNLPSASPRPDRVGEEDDSGAISVSSQCNVQLRSALEDAFREYRSTPPGLRPRLPRLPMHKKNKALVCALDSQLSNCFDGSKDLADTHSILYCAAVAACRVAHVKFHNNDRVTRPKPAVPTWQCRIERRIGEARALIGKLICFREGNTRPRVMRFVRRAFSGMDISPRDYLTCVTERIDFLKQKICAWANRIHRYRRRVERYTQNRTFQSDERWVYRAWERPDQGVADTQLPDDDAMCSFWRSIWSVPVSHTEGDWTREVERACDHIPQMGALTISPQDVARAVRPLPNWKSPGPDGLHNFWIKWFQRSHARLASQFQSALQSGSLPQFLTTGITHLLHKSGSTAEPRNYRPITCLPTVYKVLTSILRAKINKHIDTNSIMSASQNGCGNGSRGTKELLLIDMTISQQVRRSRKDLSTCWIDYKKAYDSVPHTWLMRVLELYKIDATLRTFLMSCMGQWRTVLRYPGCRNIQRNSEPIRIERGIFQGDSLSPLWFCLALNPLSTLLEDSGLGYRLRRGGQVISHLLYMDDLKLFAPNNLQLMELLKVTETFSSAIRMEFGVDKCAVMHVKRGEIVESVRTQLSDSIHLRSLSSLETYKYLGMSEALGINAADMKQSLRERFFGRLNKVLNSLLSGGNKVRAFNGWVMPVLMYSFGILKWTQTELDALDRRVRTLLTANRMHHPRSSVMRLYIPRKCGGRGFLNAKTLHNREVCSLREYFLEADVGMHGEVVSVDKGLTPLSLANENWRKPIVLDTNDRREVWQSKELHGRFYRVLHGPDVDFLASVSWLRFGDLFGETEGFVFAIMDEVMMTNNYRKYIVKDGTVDICRACHRPGESIRHIISGCSRLANGDYLHRHNLVARIIHQQLALKYSLVESEVPYYRYVPDPVLENGNITLYWDRSIITDRTIVANKPDIVVIDRLERRTVIVDIAVPHDENLVKAEKDKQIKYLDLAREVVDMWDVDTAIIVPIVVTANGIIAKSLDQHLRRLSLGGWIKGLIQKAVLLDTARIVRRFLSQQP

SEQ ID NO: 11829 - protein, 1034 aa, Cosmia trapezina
MQSSRVIAPLSQTIVAPPPPQCNTSQADGRSDDTAANVSTQCNEELRSALEGAIQEYRFVSPELRPRLPRLPMHNKNRALVAALDSQLSNYFDDCEDLTDTHSILYCAAVAACRVAHVKFANDSRATRPKPAVPAWQCRIERRIGGARALIGKLICFREGNTRPRVMRFVRRAFSGTDVSPQDYMSRVTERIDFLRQKVYAWANRIRRYKRRLDRYTQNRTFQSDERWVYRGWERPDQGVTDTRLPDDDAMCSFWRSIWSVPVSHTEGDWAREVERACDPIPEMGAITICPQDVARAVRPLPNWKSPGPDGLHNFWIKWFPGSHARLAAQYRSALQSGSLPQFLTTGITHLLHKSGSTAEPKNYRPITCLPTVYKVLTSILRAKINEHIDTNSIMSVSQNGSRNGSRGTKELLLIDMAISQQVRRSRKDLSTCWIDYKKAYDSVPHTWLMRVLELYKVDATLRTFLMSCMGQWRTVLRYPGCRNIQRNSEPIRIERGIFQGDSLSPLWFCLALNPLSTLLEDSGLGYRLRRGGQVISHLLYMDDLKLFAPNNLQLMELLKVTETFSSAIRMEFGVDKCAVMHVKRGEIVESVGTQLSDSINLRTLSAAETYKYLGMSEALGINVADMKQSLKERFFGRLKKVFNSLLSGGNKVRAFNGWVMPVLMYSFGILKWTQTELDALDRRVRTLLTAYRMHHPRSSVMRLYIPRKCGGRGFLNAKTLHNREICSLREYFLEADVGMHRDVVAVDKGFTPLSLAKENWRKPVVLDTNDRMEVWQSKELHGRFFRALHGPDVDLLASVAWLRSGDLFGETEGFVCAIMDEVIMTNNYRRFIVKDGTVDICRACHRPGESIRHIISGCSRLANEEYLHRHNLVARIIHQQLALKYSLVESEVPYYRYVPDPVLENGNITLYWDRSIITDRTIVANKPDIVVVDRTERRTMVVDITVPHDGNLVKAEKDNQIKYLDLAREVVDMWDVDSAIIVPTVVSANGLIAKSLDQHLRRLSLGSWIKGLIQKAVLLDTARIVRRFLSLEP

SEQ ID NO: 11830 - protein, 1108 aa, Cosmia trapezina
MRWTRAINENVMRSYYGATEGGNNLTAYRVRMHSLFQVLEPALNVSAQRLSDQVRVIQRNHMLDDTVLDRLRNEMQSSRVIAPLSQTIVAPPPPQCNTTQADEGSDGTAANVSTQCNEELRSALEGAIQEYRFVSPELRPRLPRLPMHNKNRALVAALDSQLSNYFDDCEDLTDTHSILYCAAVAACRVAHVKFANDSRVTRPKPAVPAWQCRIERRIGRARALIGKLICFREGNTRPRVMRFVKRAFSGTDVSPQDYMSRVTERIDFLRQKVYAWANRIRRYKRRVDRYTQNRTFQSDERWVYRGWERPDQGVTDTRLPDDDAMCSFWRSIWSVPVSHTEGDWAREVRRACDPIPEMGAITICPQDVARAVRPLPNWKSPGPDGLHNFWIKWFLGSHARLAAQYQSALQSGSLPQFLTTGITHLLHKSGSTTEPKNYRPITCLPTVYKVLTSILRAKINEHIDTNSIMSASQNGSRNGSRGTKELLLIDMAISQQVRRSRRDLSTCWIDYKKAYDSVPHTWLMRVLELYKVDATLRTFLMSCMGQWRTVLRYPGCRNIQRNSEPIRIERGIFQGDSLSPLWFCLALNPLSTLLENSGLGYRLRRGGQVISHLLYMDDLKLFAPSNLQLMELLKVTETFSSAIRMEFGVDKCAVMHVKRGEIVESVGTQLPDSINLRTLSAAETYKYLGMSEALGINVADMKQSLKERFFGRLKKVFNSLLSGGNKVRAFNGWVMPVLMYSFGILKWTQTELDALDRRVRTLLTAYRMHHPRSSVMRLYIPRKCGGRGFLNAKTLHNREICSLREYFLETDVGMHRDVVAVDKGLTPLSLAKENWRKPVVLDANDRMEVWQSKELHGRFFQALHGPDVNLLASVAWLRSGDLFGETEGFVCAIMDEVIMTNNYRRFIVKDGTVDICRACHRPGESIRHIISGCSRLANEEYLHRHNLVARIIHQQLALKYSLVESEVSYYRYVPDPVLENGHITLYWDRSIITDRTIVANKPDIVVVDRTERRAMIVDITVPHDGNLVKAEKDKQIKYIDLAREVVDMWDVDSAVIVPIVVSANGLIAKSLDQHLRRLSLGSWIKGLIQKAVLLDTARIVRRFLSLEP

SEQ ID NO: 11831 - protein, 1205 aa, Cosmia trapezina
MLTRSRAQQLRNTQPTSSGSSLSSASQLPEPAPDVSQVIPAAAVASSSSDEYFSPPTTPPPVRRRGRGRPPASLGPRGPSASDRVPAPGGSVQRMRWTQTVNENVMRAYFGATEGGSNLTAYRGRMLSLFQVLEPAVNVSAQRLSDQVRVIQRNHMLDDVVLDRLRLESRNSYVTSVSPMVAVQLQNLPSASPLPDRVGEEDDGGAISVSSQCNVQLRSALEGAFREYRSTPPGLRPRLPRLPMHKKNKALVCALVSQLSNCFDDSKDLADTHSILYCAAVAACRVAHVKFPNSDRVPRPKPAVPAWQCRIERRIGEARALIGKLICFREGNTRPRVMRFVRRAFSGTDISPRDYFTCVTERIDFLKQKICAWANRIRRYRRRVERYTQNRTFQSDERWVYRAWERPDQGVADTQLPDDDAMCSFWRSIWSVPVSHTEGDWTREVERACDHIPQMGALTISPQDVARAVRPLPNWKSPGPDGLHNFWIKWFQRSHARLASQFQSALQSGSLPQFLTTGITHLLHKSGSTAEPRNYRPITCLPTVYKVLTSILRAKINKHIDNNSIMSASQNGCGNGSRGTKELLLIDMTINQQVRRSRKDLSTCWIDYKKAYDSVPHTWLMRVLELYKIDATLRTFLMSCMGQWRTVLRYPGCRNIQRNSEPIRIERGIFQGDSLSPLWFCLALNPLSTLLEDSGLGYRLRRGGQVISHLLYMDDLKLFAPNNLQLMELLKVTETFSSAIRMEFGVDKCAVMHVKLGEIVESVRTQLSDSIHLRSLSSLETYKYLGMSEALGINAADMKQSLRERFFGRLNKVLNSLLSGGNKVRAFNGWVMPVLMYSFGILKWTQTELDALDRRVRTLLTANRMHHPRSSVMRLYIPRKCGGRGFLNAKTLHNREVCSLREYFLEADVGMHRDVVSVDKGLTPLSLANENWRKPIVLDTSDRREVWQSKELHGRFYRVLHGPDVDFLASVSWLRFGDLFGETEGFVFAIMDEVMMTNNYRKYIVKDGTVDICRACHRPGESIRHIISGCSRLANGDYLHRHNLVARIIHQQLALKYSLVESEVPYYRYVPDPVLENGNITLYWDRSIITDRTIVANKPDIVVIDRLERRTVIVDIAVPHDENLVKAEKDKQIKYLDLAREVVDMWDVDTAIIVPIVVTANGIIAKSLDQHLRRLSLGGWIKGLIQKAVLLDTARIVRRFLSQQP

SEQ ID NO: 11832 - protein, 1093 aa, Mamestra brassicae
MRSYFGATEGGTNLTAYRGRMLSLFQVLEPAVNVSAQRLSDQVRVIQRNRMLDDSVLDRLRMEMCGHVITPPSQTVAPPQSQISSHADEESNDRVTNVSTQCNEELRSALECAIREYRYVPPELRPRLPRLPMHNKNRALVAALDSQLSNYFDDCEDLTDTHSIMYCAAVAACRVAHVKMTNDRVTRPKPAVPAGQCRIERRIGGARALIGKLICFREGNTRPRVMRFVRRAFSGTDISPRDYMSRVTERIDFLKQKVYAWANRIRRYRRRVERYTQNRTFRSNDRWVYRVLEQPDQGVTDTRLPDDDAMCSFWRNIWSVPVSHTEGGWIREVERACDPLPEMGAITISPQDVARAVRPLPNWKSPGPDGLHNFWIKWLQRSHARLASQYQSALESGSLPEFLTTGVTHLLHKSGSTAEPKNYRPITCLPTVYKVLTSILRAKINNHINSNNIMSVSQNGCRNGSRGTKELLLIDMAISQQVRRSRKDLSTCWIDYKKAYDSVPHTWLMRVLELYKIDTMLRTFLMSCMGQWRTVLCYPGCRNIQRNSEPVRIERGIFQGDSLSPLWFCLALNPLSTLLENSGLGYRLKRGGQVISHLLYMDDLKLFAPSNLQLMELLKVTETFSSAIRMEFGVDKCAVMHVKRGEIMESVGTQLSDSINLRSLSSTESYKYLGMSEALGINVTDMKQSLRERFFGRLKKVFNSLLSGGNKVRAFNGWVMPVLMHSFGVLKWTQTELDALDRRVRTLLTAYRMHHPRSSVMRLYIPRKCGGRGFLNAKTLHNREICSLREYFLAVDVGMHRDVVAVDKGLTPLSLANENWRKPAVLDTNDRRAVWQSKELHGRYFRALHGPDVDQLASVAWLRFGDLFGETEGFVCAIMDEVIMTNNYRRFIVKDGTVDICRACHRPGESIRHIVSGCSRLANGEYLHRHNLVARIIHQQLALKYSLVESEVPYYRYAPDPVLDNGNITLYWDRSIITDRTIVANKPDIVVVDRIERRAMIVDITVPHDENLVKAEKDKQIKYIDLAREVVDMWDVDSAIIVPIVVSANGLIATSLDQHLRRLSLGSWIKGLIQKAVLLDTARIVRRFLSLEP

SEQ ID NO: 11833 - protein, 1187 aa, Mamestra brassicae
MLTRSRARHLATHPSPSASSLSSASPPPEPSPTVSAVTPAVAVASSSSDEYFSPPTTPPPARRRRGRRPPDGLGPRGPPASDRVPAPGGSVQRMRWTQSINESVMRSYFGATEGGTNLTAYRGRMLSLFQVLEPAVNVSAQRLSDQVRVIQRNRMLVDSVLDRLRMEMCGHVITPPSQTVAPPQSQISSHADEESNDRVTNVSTQCNEELRSALECAIREYRYVPPELRPRLPRLPMHNKNRALVAVLDSQLSNYFDDCEDLTDAHSIMYCAAVAACRVAHVKITNDRVTRPKPAVPAWQCRIERRIGGARTLIGKLICFREGNTRPRVMRFVRRAFSGTDISPRDYMSRVTERIDFLKQKVYAWANRIRRYRRRVERYTQNRTFRSNERWVYRVWEQPDHGVTDTRLPDDDAMCLFWRNIWSVPVSHTEGGWIREVERACDPLPEMGAITISPQDVARAVRPLPNWKSPGPDGLHNFWIKWLQRSHARLASQYQTALESGSLPEFLTTGVTHLLHKSGSTAEPKNYRPITCLPTVYKVLTSILRAKINNHINSNNIMSVSQNGCRNGSRGTKELLLIDMAISQQVRRSRKDLSTCWIDYKKAYDSVPHTWLMRVLELYKIDTMLRTFLMSCMGQWRTVLRYPGCRNIQRNSKPVRIERGIFQGDSLSPLWFCLALNPLSTLLENSGLGYRLKRGGQVLSHLLYMDDLRLFAPSNLQLMELLKVTETFSSAIRMEFGVDKCAVMHVKRGEIMESVGTQLSDSINLRSLSSTETYKYLGMSEALGINVTDMKQSLKERFFGRLKKVFNSLLSGGNKVRAFNGWVMPVLMHSFGVLKWTQTELDALDRRVRTLLTAYRMHHPRSSVMRLYIPRKCGGRGFLNAKTLHNREICSLREYFLAVDVGIHRDVVAVDKGLTPLSLANENWRKPAVLDTNDRRAVWQSKELHGRYFRALHGPDVDQLASVAWLRFGDLFGETEGFVCAIMDEVIMTNNYRRFIVKDGTVDICRACHRPGESIDNGEYLHRHNLVARIIHQQLALKYSLVESEVPYYRYAPDPVLDNGNITLYWDRSIITDRTIVANKPDIVVVDRIERRAMIVDITVPHDENLVKAEKDKQIKYIDLAREVVDMWDVDSAIIVPIVVSANGLIATSLDQHLRRLSLGSWIKGLIQKAVLLDTARIVRRFLSLEP

SEQ ID NO: 11834 - protein, 1197 aa, Mamestra brassicae
MLTRSRARHLATHPSPSASSLSSASPPPEPSPTVSAVTPAVAVASSSSDEYFSPPTTPPPARRRRGRRPPDGLGPRGPPASDRVPAPGGSVQRMRWTQSINENVMRSYFGATEGGTNLTAYRGRMLSLFQVLEPAVNVSAQRLSDQVRVIQRNRMLDDSVLDRLRMEMCGHVITPPSQTVAPPQSQISSHADEESNDRVTNVSTQCNEELRSALECTIREYRYVPPELRPRLPRLPMHNKNRALVAALDSQLSNYFDDCEDLTDTHSIMYCAAVAACRVAHVKMTNDRVTRPKPAVPAWQCRIERRIGGARALIGKLICFREGNTRPRVMRFVRRAFSGTDISPRDYMSRVTERIDFLKQKVYAWANRIRRYRRRVERYTQNRTFRSNERWVYRVWEQPDQGVTDTRLPDDDAMCSFWRNIWSVPVSHTEGGWIREVERACDPLPEMGAITISPQDVARAVRPLPNWKSPGPDGLHNFWIKWLQRSHARLASQYQTALESGSLPEFLTTGVTHLLHKSGSTAEPKNYRPITCLPTVYKVLTSILRAKINNHINSNNIMSVSQNGCKNGSRGTKELLLIDMAISQQVRRSRKDLSTCWIDYKKAYDSVPHTWLMRVLELYKIDTMLRTFLMSCMGQWRTVLRYPGCRNIQRNSEPVRIERGIFQGDSLSPLWFCLALNPLSTLLENSGLGYRLKRGGQVISHLLYMDDLKLFAPSNLQLMELLKVTETFSSAIRMEFGVDKCAVMHVKRGEIMESVGTQLSDSINLRSLSSTENYKYLGMSEALGINVTDMKQSLKERFFGRLKKVFNSLLSGGNKVRAFNGWVMPVLMHSFGVLKWTQTELDALDRRVRTLLTAYRMHHPRSSVMRLYIPRKCGGRGFLNAKTLHNREICSLREYFLAVDVGMHRDVVTVDKGLTPLSLANENWRKPAVLDTNDRRAVWQSKELHGRFFRALHGPDVDQLASVAWLRFGDLFGETEGFVCAIMDEVIMTNNYRRFIMRDGTVDICRACHRPGESIRHIVSGCSRLANGEYLHRHNLVARIIHQQLALKYSLVESEVPYYRYAPDPVLDNGNITLYWDRSIITDRTIVANKPDIVVVDRIERRAMIVDITVPHDENLVKAEKDKQIKYIDLAREVVDMWDVDSAIIVPIVVSANGLIATSLDQHLRRLSLGSWIKGLIQKAVLLDTARIVRRFLSLEP

SEQ ID NO: 11835 - protein, 1197 aa, Noctua fimbriata
MLTRAAAKRARLSPPDPSLSSASPPPESSPVVSAVTPAVAVASSSSDEYFSPPTTPPPVRRRGGRRPPDGLGPRGPPASDRVPAPGGSVQRMRWTQSINENVMRSYYGATEGGNNLTAYRVRMLSLFQVLEPAVNVSAQRLSDQVRVIQRNRMLDDTVLDRLRTETQSSHVITPSAQAVVLPQSSTIPNRDNDVSNDMVTNVSTQCNEEMRSALEGAIREYRFMPPDLRPRIPRLPMHNKNRALVAVLDSQLSNYFHNCEDLTDAHSILYCAAVAACRVAHVKFSDDRATRPKPAIPPWQYRIERRIGGARALIGKLICFREGNTRPRVMRFVRRAFSGTDISPRDYMSRITERIDFLKQKVYAWASRIRRYKRRVDRYTQNRTFQRDERWVYRTWERPDQGVADTRIPDDDAMCSFWRSIWSVPVSHTEGEWTREVERACDLVPEMGAITISPQDVVRAVRPLPNWKSPGPDGLHNFWIKWFTRSHARLAILFQSALESGSLPEFLTTGITHLLHKSGSTAEPKNYRPITCLPTVYKVLTSILRAKINKHIDDNSIMSASQNGCRNGSRGTKELLLIDMAISQQVRRSRRDLSTCWIDYKKAYDSVPHTWLMRVLELYKVDATLRTFLMSCMGQWRTVLRYPGCRQIQRNSEPIRIERGIFQGDSLSPLWFCLALNPLSTLLEDSGLGYQLRRGGQVISHLLYMDDLKLFAPNDLQLMELLKVTETFSSAIRMEFGVDKCAVMHVKRGEIVESVGTQLSDSINLRSLSATETYKYLGMSEALGINVADMKQSLKERFFGRLKKVFNSLLSGGNKVRAFNGWVMPVLMYSFGILKWTQTELDALDRRVRTLLTAYRMHHPRSSVMRLYIPRKCGGRGFLNAKTLHNREICSLREYFLETDVGMHRDVVAMDKGLTPLSLAKENWRKPLVLDTNDRMEVWQSKELHGRFFRALHGPDVDLSASVAWLRSGDLFGETEGFVCAIMDEVMMTNNYRRFIVKDGTVDICRACHRPGESIRHIISGCSRLANGEYLHRHNLVARIIHQQLALKYNLVESEVPYYKYVPDPVLENGSITLYWDQSIITDRTIVANKPDIVVVDRSERRTMIVDITVPHDENLVKAEKDKKIKYLDLAREVVDMWDVDSAIIVPIVVSAHGLIAKSLDQYLRRLSLGSWIKGLIQKAVLLDTARIVRRFLSLEP

SEQ ID NO: 11836 - protein, 1198 aa, Noctua fimbriata
MLTRAAAKRARLSPPDPSLSSASPPPESSPVMSAVTPAVAVASSSSDEYFSPPTTPPPVRRRGGRRPPDGLGPRGPPASDRVPAPGGSVQRMRWTQSINENVMRSYYGATEGGNNLTAYRVRMLSLFQVLEPAVNVSAQRLSDQVRVIQRNRMLDDTVLDRLRTEMQSSHVIATPPPQAVVPPQSTIIPNRDNDVSNDIVTNVSTQCNEEMRSALEGAIREYRFMQPDLRPRIPRLPMHNKNRALVAVLDSQLSNYFDNCEDLTDAHSILYCAAVAACRVAHVKFSNDRATRPKPAVPPWQYRIERRIGGARALIGKLICFREGNTRPRVMRFVRRAFSGTDISPRDYMSRITERIDFLKQKVYAWANRIRRYKRRVDRYTQNRTFQRDERWVYRAWERPDQGVADTRLPDDDAMCSFWRSIWSVPVSHTEGEWTQGVERACDLVPEMGAITISPQDVVRAVRPLPNWKSPGPDGLHNFWIKWFTRSHARLAILFQSALESGSLPEFLTTGITHLLHKSGSTAEPKNYRPITCLPTVYKVLTSILRAKINKHIDDNSVMSASQNGCRNGSRGTKELLLIDMAISQQVRRSRRDLSTCWIDYKKAYDSVPHTWLMRVLELYKVDATLRTFLMSCMGQWRTVLRYPGCRQIQRNSEPIRIERGIFQGDSLSPLWFCLALNPLSTLLEDSGLGYRLRRGGQVISHLLYMDDLKLFAPNDLQLMELLKVTETFSSAIRMEFGVDKCAVMHVKRGEIVESVGTQLSDSINLRSLSATETYKYLGMSEALGINVADMKQSLKERFFGRLKKVFNSLLSGGNKVRAFNGWVMPVLMYSFGILKWTQTELDALDRRVRTLLTAYRMHHPRSSIMRLYIPRKCGGRGFLNAKTLHNREICSLREYFLETDVGMHRDVVAVDKGLTPLSLAKENWRKPLVLDTNDRMEVWQSKELHGRFFRALHGPDVDLSASVAWLRSGDLFGETEGFVCAIMDEVMMTNNYRRFIVKDGTVDICRACHRPGESIRHIISGCSRLANGEYLHRHNLVARIIHQQLALKYNLVESEVPYYKYVPDPVLENGSITLYWDQSIITDRTIVANKPDIVVVDRSERRTMIVDITVPHDENLVKAEKDKKIKYLDLAREVVDMWDVDSAIIVPIVVSAHGLIAKSLDQYLRRLSLGSWIKGLIQKAVLLDTARIVRRFLSLEP

SEQ ID NO: 11837 - protein, 1047 aa, Noctua fimbriata
MLDDTVLDRLRTEMQSSHVIATPPPQAVVPPQSTIIPNRDNDVSNDIVTNVSTQYANEEMRSALEGAIREYRFMQPDLRPRIPRLPMHNKNRALVAVLDSQLSNYFDNCEDLTDAHSILYCAAVAACRVAHVKFSNDRATRPKPAVPPWQYRIERRIGGARALIGKLICFREGNTRPRVMRFVRRAFSGTDISPRDYMSRITERIDFLKQKVYAWANRIRRYKRRVDRYTQNRTFQRDERWVYRAWERPDQGVADTRLPDDDAMCSFWRSIWSVPVSHTEGEWTQGVERACDLVPEMGAITISPQDVVRAVRPLPNWKSPGPDGLHNFWIKWFTRSHARLAILFQSALESGSLPEFLTTGITHLLHKSGSTAEPKNYRPITCLPTVYKVLTSILRAKINKHIDDNSIMSASQNGCRNGSRGTKELLLIDMAISQQVRRSRRDLSTCWIDYKKAYDSVPHTWLMRVLELYKVDATLRTFLMSCMGQWRIVLRYPGCRQIQRNSEPIRIERGIFQGDSLSPLWFCLALNPLSTLLEDSGLGYRLRRGGQVISHLLYMDDLKLFAPNDLQLMELLKVTETFSSAIRMEFGVDKCAVMHVKRGEIVESVGTQLSDSINLRSLSATETYKYLGMSEALGINVADMKQSLKERFFGRLKKVFNSLLSGGNKVRAFNGWVMPVLMYSFGILKWTQTELDALDRRVRTLLTAYRMHHPRSSIMRLYIPRKCGGRGFLNAKTLHNREIYSLREYFLETDVGMHRDVVAVDKGLTPLSLAKENWRKPLVLDTNDRMEVWQSKELHGRFFRALHGPDVDLSASVAWLRSGDLFGETEGFVCAIMDEVMMTNNYRRFIVKDGTVDICRACHRPGESIRHIISGCSRLANGEYLHRHNLVARIIHQQLALKYNLVESEVPYYKYVPDPVLENGSITLYWDQSIITDRTIVANKPDIVVVDRSERRTMIVDITVPHDENLVKAEKDKKIKYLDLAREVVDMWDVDSAIIVPIVVSAHGLIAKSLDQYLRRLSLGSWIKGLIQKAVLLDTARIVRRFLSLEP

SEQ ID NO: 11838 - protein, 1198 aa, Noctua fimbriata
MLTRSAAARRARLLPPDPSLSSASPPPESSPIVSAVTPAVAVASSSSDEYFSPPTTPPPVRRRGGRRPPDGLGPRGPPASDRVPAPGGSVQRMRWTQSINENVMRSYYGATEGGNNLTAYRVRMLSLFQVLEPAVNVSAQRLSDQVRVIQRNRMLDDTVLDRLRTEMQSSHVITPSAQAVVLPQSSTITNRDNDVSNDMVTNVSTQCNEEMRSALEGAIREYRFMQPDLRPRIPRLPMHNKNRALVAVLDSQLSNYFDNCEDLTDAHSVLYCAAVAACRVAHVKFFGDRATRPKPVVPPWQYRIERRIDGARALIGKLICFREGNTRPRVMRFVRRAFSGTDISPRDYMSRITERIDFLKQKVYAWASRIRRYKRRMDRYTQNRTFQRDERWVYRAWERPDQGVADTRIPDDDAMCSFWRSIWSVPVSHTEGEWTREVERACDLVPEMGAITISPQDVVRAVRPLPNWKSPGPDGLHNFWIKWFTRSHARLAILFQSALESGSLPEFLTTGITHLLYKSGSTAEPKNYRPITCLPTVYKVLTSILRAKINKHIDDNSIMSASQNGCRNGSRGTKELLLIDMAISQQVRRSRRDLSTCWIDYKKAYDSVPHTWLMRVLELYKVDATLRTFLMSCMGQWRTVLRYPGCRQIQRNSEPIRIERGIFQGDSLSPLWFCLALNPLSTLLEDSGLGYQLRRGGQVISHLLYMDDLKLFAPNDLQLMELLKVTETFSSAIRMEFGVDKCAVMHVKRGEIVESVGTQLSDSINLRSLSATETYKYLGMSEALGINVADMKQSLKERFFGRLKKVFNSLLSGGNKVRAFNGWVMPVLMYSFGILKWTQTELDALDRRVRTLLTAYRMHHPRSSVMRLYIPRKCGGRGFLNAKTLHNREICSLREYFLETDVGMHRDVVAVDKGLTPLSLAKENWRKPLVLDTNDRMEVWQSKELHGRFFRALHGPDVDLSASVAWLRSGDLFGETEGFVCAIMDEVMMTNNYRRFIVKDGTVDICRACHRPGESIRHIISGCSRLANGEYLHRHNLVARIIHQQLALKYNLVESEVPYYKYVPDPVLENGSITLYWDQSIITDRTIVANKPDIVVVDRSERRTMIVDITVPHDENLVKAEKDKKIKYLDLAREVVDMWDVDSAIIVPIVVSAHGLIAKSLDQYLRRLSLGSWIKGLIQKAVLLDTARIVRRFLSLEP

SEQ ID NO: 11839 - protein, 868 aa, Noctua fimbriata
MRFVRRAFSGTDISPRDYMSRITERIDFLKQKVYAWASRIRRYKRRVDRYTQNRTFQRDERWVYRAWERPDQGVADTRIPDDDAMCSFWRSVWSVPVSHTEGEWTREVERACDLVPEMGAITISPQDVVRAVRPLPNWKSPGPDGLHNFWIKWFTRSHARLAILFQSALESGSLPEFLTTGITHLLHKSGSTAEPKNYRPITCLPTVYKVLTSILRAKINKHIDDNSIMSASQNGCRNGSRGTKELLLIDMAISQQVRRSRSDLSTCWIDYKKAYDSVPHTWLMRVLELYKVDATLRTFLMSCMGQWRTVLRYPGCRQIQRNSEPIRIERGIFQGDSLSPLWFCLALNPLSTLLEDSGLGYRLRRGGQVISHLLYMDDLKLFAPNDLQLMELLKVTETFSSAIRMEFGVDKCAVMHVKRGEIVESVGTQLSDSINLRSLSATETYKYLGMSEALGINVADMKQSLKERFFGRLKKVFNSLLSGGNKVRAFNGWVMPVLMYSFGILKWTQTELDALDRRVRTLLTAYRMHHPRSSVMRLYIPRKCGGRGFLNAKTLHNREICSLREYFLETDVGMHRDVVAVDKGLTPLSLAKENWRKPLVLETNDRMEVWQSKELHGRFFRALHGPDVDLSASVAWLRCGDLFGETEGFVCAIMDEVMMTNNYRRFIVKDGTVDICRACHRPGESIRHIISGCSRLANGEYLHRHNLVARIIHQQLALKYNLVESEVPYYKYVPDPVLENGSITLYWDQSIITDRTIVANKPDIVVVDRSERRTMIVDITVPHDENLVKAEKDKKIKYLDLAREVVDMWDVDSAIIVPIVVSAHGLIAKSLDQYLRRLSLGSWIKGLIQKAVLLDTARIVRRFLSLEP

SEQ ID NO: 11840 - protein, 1060 aa, Noctua fimbriata
MNNKDQVRVIQRNRMLDDTVLDRLRTEMQSSHVIATPPPQAVVPPQSTIIPNRDNDVSNDIVTNVSTQCNEEMRSALEGAIREYRFMQPDLRPRIPRLPMHNKNRALVAVLDSQLSNYFDNCEDLTDAHSILYCAAVAACRVAHVKFSDDRATRPKPAVPPWQYRIERRIGGARALIGKLICFREGNTRPRVMRFVRRAFSGTDISPRDYMSRITERIDFLKQKVYAWANRIRRYKRRVDRYTQNRTFQRDERWVYRAWERPDQGVADTRLPDDDAMCSFWRSIWSVPVSHTEGEWTQGVERACDLVPEMGAITISPQDVVRAVRPLPNWKSPGPDGLHNFWIKWFTRSHARLAILFQSALESGSLPEFLTTGITHLLHKSGSTAEPKNYRPITCLPTVYKVLTSILRAKINKHIDDNSIMSASQNGCRNGSRGTKELLLIDMAISQQVRRSRSDLSTCWIDYKKAYDSVPHTWLMRVLELYKVDATLRTFLMSCMGQWRTVLRYPGCRQIQRNSEPIRIERGIFQGDSLSPLWFCLALNPLSTLLEDSGLGYRLRRGGQVISHLLYMDDLKLFAPNDLQLMELLKVTETFSSAIRMEFGVDKCAVMHVKRGEIVESVGTQLSDSINLRSLSATETYKYLGMSEALGINVADMKQSLKERFFGRLKKVFNSLLSGGNKVRAFNGWVMPVLMYSFGILKWTQTELDALDRRVRTLLTAYRMHHPRSSVMRLYIPRKCGGRGFLNAKTLHNREICSLREYFLETDVGMHRDVVAVDKGLTPLSLAKENWRKPLVLDTNDRMEVWQSKELHGRFFRALHGPDVDLSASVAWLRSGDLFGETEGFVCAIMDEVMMTNNYRRFIVKDGTVDICRACHRPGESIRHIISGCSRLANGEYLHRHNLVARIIHQQLALKYNLVESEVPYYKYVPDPVLENGSITLYWDQSIITDRTIVANKPDIVVVDRSERRTMIVDITVPHYENLVKAEKDKKIKYLDLAREVVDMWDVDSAIIVPIVVSAHGLIAKSLDQYLRKLSLGSWIKGLIQKAVLLDTARIVRRFLSLEP

SEQ ID NO: 11841 - protein, 868 aa, Atethmia centrago
MRFVRRAFSGTDIGPQDYMSRVTERIDFLKQKVYAWANRIRRYKRRVERYTQNRTFQSDERWVYRGWERPDQGVTGTRLPDDDVMCSFWRSIWSVPVSHTEGDWVREVERACDPIPEMGAITISPQDVARAVRPLPNWKSPGPDGLHDFWLKWFLRSHARLAAQYQTALESGSLPQFLTTGVTHLLHKSGSTAEPKNYRPITCLPTVYKVLTSILRAKINEHIDTNSIMSASQNGCRNGSRGTKELLLIDITITQQVRHSRKDLSTCWIDYKKAYDSVPHTWLMRVLELYKVDATLRTFLMSCMGQWRTVLRYPGCRNIQRNSEPIRIERGIFQGDSLSPLWFCLALNPLSTLLEDSGLGYRLRRGSQVISHLLYMDDLKLFASNNLQLMELLKTTETFSSAIRMEFGVDKCAVMHVKRGKIMESVGTQLSDSINLRALSASETYKYLGMSEALGINVTDMKQSLKERFFGRLKKVFNSLLSGGNKVRAFNGWVMPVLMYSFGILKWTQTELDALDRRVRTLLTAYRMHHPRSSVMRLYIPRKCGGRGFLNAKTLHNREVCSLREYFLKADVGMHRDVVAVDKGLTPLSLAKENWRKLVVLDTNDRREVWQSKELHGRFFRALHEPDVDFQASVAWLRFGDLFGETEGFVCAIMDEVIMTKNYRRFIVKDGTVDVCRACQRPGESIRHIISGCSRLANEEYLHRHNLVARIIHQQLALKYNLVESEVPYYRYVPDPVLENGNITLYWDRSIITDRTIIANKPDIVVVDRTERRAMIVDITVPHDGNLVKAEKDKQIKYLDLAREVVDMWDVNSAIIVPIVISANGLIAKSLDQHLRRLSLDGWIKGLIQRAVLLDTARIVRRFLSLEP

SEQ ID NO: 11842 - protein, 1075 aa, Atethmia centrago
MLSLFQVLEPAVNVSAQRLSDQVRVIQRNHMLDDTVLDRLRSETQSDHAIAPPSQTVVVSTQLRTNQADEGSDDRATNVSTQYNVELRSALEDAIREYRFMSPELRPRLPRLPMHKKNRALVAALDSQLSNYFDDCEDLTDTHSILYCAAVAVCRVAHVKFAKDSRATRPKPTVPAWQRRIERRIGGARALIGKLICFREGNTRPRVMRFVRRAFSGTDIGPQDYMSRVTERIDFLKQKVYAWANRIRRYKRRVERYTQNRTFQSDERWVYRSWERPDQGVTGTRLPDDDVMCSFWRSIWSVPVSHTEGDWVREVERACDPIPEMGAITISPQDVARAVRPLPNWKSPGPDGLHNFWLKWFLRSHARLAAQYQTALESGSLPQFLTTGVTHLLHKSGSTAEPKNYRPITCLPTVYKVLTSILRAKINEHIDTNSIMSASQNGCRNGSRGTKELLLIDITITQQVRHSRKDLATCWIDYKKAYDSVPHTWLMRVLELYKVDATLRTFLMSCMGQWRTVLRYPGCRNIQRNSEPIRIERGIFQGDSLSPLWFCLALNPLSTLLEDSGLGYRLRRGSQAISHLLYMDDLKLFASNNLQLMELLKITETFSSAIRMEFGVDKCAVMHVKRGKIMESVGTQLSDSINLRALSASETYKYLGMSEALGINVTDMKQSLKERFFGRLKKVFNSLLSGGNKVRAFNGWVMPVLMYSFGILKWTQTELDALDRRVRTLLTAYRMHHPRSSVMRLYIPRKCGGRGFLNAKTLHNREVCSLREYFLKADVGMHRDVVAVDKGLTPLSLAKENWRKLVVLDTNDRREVWQSKELHGRFFRALHEPDVDFQASVAWLRFGDLFGETEGFVCAIMDEVIMTKNYRRFIVKDGTVDVCRACQRPGESIRHIISGCSRLANEEYLHRHNLVARIIHQQLALKYNLVESEVPYYRYVPDPVLENGNITLYWDRSIITDRTIIANKPDIVVVDRTERRAMIVDITVPHDGNLVKAEKDKQIKYLDLAREVVDMWDVNSAIIVPIVISANGLIAKSLDQHLRRLSLDSWIKGLIQRAVLLDTARIVRRFLSLEP

SEQ ID NO: 11843 - protein, 1199 aa, Atethmia centrago
MLTRGATARRARLPPPDSSLSSASPPQVPSPTVSAVTTPAAVVASSSSDEYFSPPTTPPPVRRRGGRRPPDGLGPRGPPASDRVPAPGGSVQRMRWTRSINENVMRSYYGATEGGNNLTAYRVRMLSLFQVLEPAVNVSAQRLSDQVRVIQRNHMLDDTVLERLRSEIQSSHVIAPPSQTVVVLPQLDTHQADEGSDDRATNVSTQCNVELRSALEDAIREYRFMSPEVRPRLPRLPMHKKNRALVAVLDSQLSNYFDDCEDLTDTHSILYCAAVAVCRVAHVIFPNDSRATRPKPTVPIWQCRIERRIGGARALIGKLICFREGNTRPRVMRFVRRAFSGTDISPQDYMSHVTERIDFLKQKVYAWANRIRRYKRRVDRYTQNRTFQSDERWVYRGWEQRDQGVTDTRLPDDDVMCSFWRSIWSVPISHTEGDWARKVERACDPLPEMGAITICPQDVARAVRPLPNWKSPGPDGLHNFWLKWFLGSHARLAAQYQTALESGSLPQFLTIGVTHLLHKSGSTAEPKNYRPITYLPTVYEVLTSILRAKINKHIDTNSIMSASQNGCKNGSRGTKELLLIDMTISQQVRRFRKDLSTCWIDYKKAYDSVPHTWLMRVLELYKVDATLRTFLMSCMGQWRTVLRYPGCRNIQRNSEPIRIERGIFQGDSLSPLWFCLALNPLSTLLEDSGLGYRLRRGGQVISHLLYMDDLKLFASNNLQLMELLKITETFSSAIRMEFGVDKCAVMHVKRGEIVESVGTQLSDSINLRALSASETYKYLGMSEALGINVTDMKQSLKQRFFDRLKKVFNSLLSGGNKVRAFNGWVMPVLMYSFGILKWTQTELDALDRRVRTLLTAYRMHHPRSSVMRLYIPRKCGGRGLLNAKTLHNREVCSLREYFLEADVGMHRDVVAVDKGLTPLSLAKENWRKLVVLDTNDRREVWQSKELHGRFFRALHEPDVDFQASVAWLRFGDLFGETEGFVCAIMDEVIMTKNYRRFIVKDGTVDMCRACHRPGESIRHIISGCSRLANEEYLHRHNLVARIIHQQLALKYSLVESEVPYYRYVPDPVLDNGNITLYWDRSIITDRTIVANKPDIVVVDRIERRAMIVDITVPHDGNLVTAEKDKQIKYLDLAREVVDMWDVDSAIIVPIVVSANGLIAKSLDQHLRRLTLDGWIKGLIQKAVLLDTARIVRRFLSLEP

SEQ ID NO: 11844 - protein, 1106 aa, Atethmia centrago
MRWTQSVNENVMRSYYGATEGGNNLTAYRVWMLSLFQVLEPAVNVSAQRLSDQVRVIQRNHMLDDTVLDRLRSEMQRSHVIVPPSQTVVHSPQLSTNQADEGSDDRATNVSTQCNVELRSALEDAIREYRLMSPELRPRLPRLPMHKKNRALVAALDSQLSNYFDDCEDLTDTHSILYCAAVAVCRVAHVKFAKDSRTTRPKPTVPAWQCRIESRIGGARALIGKLICFREGNTRPRVMRFVRRAFSGTDIGPHDYMTRVTERIDFLKQKVYAWANRIRRYKRRVERYTQNRTFQSDERWVYRGWERPDQDVTDTRLPDDDVMCSFWRSIWSVPVSHTEGDWARKVERACDPIPEMGAITICPQDVARAVRPLPNWKSPGPDGLHNFWLKWFLRSHARLPAQYQTALESGSLPQFLTTGVTHLLHKSGSTAEPKNYRPITCLPTVYKLLTSILRAKINKHIDTNSIMSASQNGCRNGSRGTKELLLIDMTISQQVRRSRKDLSTCWIDYKKAYDSVPHTWLMRVLELYKVDATLRTFLISCMGQWRTVLRYPGCRNIQRNSEPIRIERGIFQGDSLSPLWFCLALNPLSTLLEDSGLGYRMRRGGQVISHLLYMDDLKLFASNNLQLMELLKITESFSSAIRMEFGVDKCAVMHVKRGKIVESVGTQLSDSINLRTLSASETYKYLGMSEALGINVTDMKQSLKERFFGRLKKVFNSLLSGGNKVRAFNGWVMPVLMYSFGILKWTQTELDALDRRVRTLLTAYRMHHPRSSVMRLYIPRKCGGRGFLNAKILHNREVCSLREYFLEADVGMHRDVVAVDKGLTPLSLAKENWRKLVVLDTNDRREVWQSKELHGRFFRALHEPDVDFQASVAWLRFGDLFGETEGFVCAIMDEVIMTKNYRRFIVKDGTVDVCRACHRPGESIRHIISGCSRLANEEYLHRHNLVARIIHQQLALKYSLVESEVPYYRYVPDPVLDNGNITLYWDRSIITDRTIVANKPDIVVVDRTERRAMIVDITVPHDGNLVKAEKDKQIKYLDLAREVVDMWDVDSAIIVPIVVSANGLIAKSLDQHLKRLTLDGWIKGLIQKAVLLDTARIVRRFLSLEP

SEQ ID NO: 11845 - protein, 1198 aa, Atethmia centrago
MLTRSAAVRARLPPPDSSLSSASPPPVPSPTVCAVTTPTAAVASSSSDEYFSPPTTPPPVRRRGGRRPPDGLGSRGPPASDRVPAPGGSVKRMRWTQSVNENVMRSYYGATEGGNNLTAYRVRMLSLFQVLEPAVNVSAQRLSDQVRVIQRNHMLDDTVLDRLRSEMQRSHVIVPPSQTVVHSPQLSTNQADEGSDDRATNVSTQCNVELRSALEDAIREYRLMSPELRPRLPRLPMHKKNRALVAALDSQLSNYFDDCEDLTDTHSILYCAAVAVCRVAHVKFAKDSRTTRPKPTVPAWQCRIESRIGGARALIGKLICFREGNTRPRVMRFVRRAFSGTDIGPHDYMTRVTERIDFLKQKVYAWANRIRRYKRRVERYTQNRTFQSDERWVYRGWERPDQDVTDTRLPDDDVMCSFWRSIWSVPVSHTEGDWARKVERACDPIPEMGAITICPQDVARAVRPLPNWKSPGPDGLHNFWLKWFLRSHARLTAQYQTALESGSLPQFLTTGVTHLLHKSGSTAEPKNYRPITCLPTVYKLLTSILRAKINKHIDTNSIMSASQNGCRNGSRGTKELLLIDMTISQQVRRSRKDLSTCWIDYKKAYDSVPHTWLMRVLELYKVDATLRTFLISGMRQWRTVLRYPGCRNIQRNSEPIRIERGIFQGDSLSPLWFCLALNPLSTLLEDSGLGYRMRRGGQVISHLLYMDDLKLFASNNLQLMELLKITESFSSAIRMEFGVDKCAVMHVKRGKIVESVGTQLSDSINLRTLSASETYKYLGMSEALGINVTDMKQSLKERFFGRLKKVFNSLLSGGNKVRAFNGWVMPVLMYSFGILKWTQTELDALDRRVRTLLTAYRMHHPRSSVMRLYIPRKCGGRGFLNAKILHNREVCSLREYFLEADVGMHRDVVAVDKGLTPLSLAKENWRKLVVLDTNDRREVWQSKELHGRFFRALHEPDVDFQASVAWLRFGDLFGETEGFVCAIMDEVIMTKNYRRFIVKDGTVDVCRACHRPGESIRHIISGCSRLANEEYLHRHNLVARIIHQQLALKYSLVESEVPYYRYVPDPVLDNGNITLYWDRSIITDRTIVANKPDIVVVDRTERRAMIVDITVPHDGNLVKAEKDKQIKYLDLAREVVDMWDVDSAIIVPIVVSANGLIAKSLDQHLKRLTLDGWIKGLIQKAVLLDTARIVRRFLSLEP

SEQ ID NO: 11846 - protein, 1194 aa, Autographa gamma
MLTRSKARTPARPPSPDPSPSSASQLPDHVPAPAPEVASSSSDEYYSPPTTPTPVRRQGRRRPPSSLAPAGQPASNRAPAPGGDVRRMKWTLSINENVMRAYYGATEGGTNLTAYRARMLSLFQGLEPDVNVSAQRLSDQVRVIQRNHRLDDATLDRLRSEVQRSSATSTPSPAVVPITGSPPTNLVDGEEEDGAITVSTQCSENIRSTLEDTIREFRSTPPDIRPRLPRLPMHNRNKAIMGVLDSLLLAYFGSSEDLSDTHSILYCAALAACRVANVKINNQNLDTRPKPAVPAWQCRIERRVAEARALIGKLIAFKDGNSRPRVMRFVRRAFTGTSISPSEYTARVTERIDFFKQKVCAWANRIRRYKRRVDRFHLNRMFQRDQRWVFRTWERPVLGVDDGRLPDEDATNSFWRNIWSVPVSHSEGGWMRDVEESCEPIQEMGAITISPQDVANAIRPMSNWKAPGPDGLQNFWLKWFKSSHGCLASQFQCAIESESLPQFFTTGSTHLLHKTGSTTDPKNYRPITCLPTIYKLLTSILRVKINEHIDSHSIMSASQNGCRNGSRGTKELLLIDMAICQQVRRSKKNLSTCWIDYKKAYDSVPHSWLMRVLELYKINTTLRAFLLSCMRRWTTVLRYPGCRDIQQSGGPIRIERGIFQGDSLSPLWFCLALNPLSTLLENSRLGYSLRRGSQVISHLLYMDDLKLFASNELQLMGLLKITESFSNSIRMEFGVDKCAVMHVKQGGIVESQGIQLSDSINLRSLSAADTYKYLGMSEALGINVADMKQSLLTRFFGRLNKVLKSLLSGGNRVRAFNGWVMPVLMYSFGILRWTQTELDALDRRVRTLLTANRMHHPRSSVMRLYIPRKCGGRGFLNAKTLHNREVCNLREYFLQFDVGMHRDVVVVDKGFTPLSLGKENWHKPVVLSVKDRKDVWQSKELHGRYYRSLHGPDVDFLASVAWLRFGDLFGETEGFVCAIMDEVVMTNNYRKYIIKDGTVDICRACHCPGESIRHIISGCSRLANGEYLHRHNQVARIIHQQLALRYKLVEAEVPYYRYVPDPVLDNGHVTLYWDRSIITDRTIVANKPDIVVIDRSERRAMIVDVTIPHDENLVKAEKEKQLKYLDLAREVVDMWEVDSAVIVPIVVTANGIIAKSLDQHLKRLSLGIWVKGLMQKAVLLDTARIVRRFLSLEP

SEQ ID NO: 11847 - protein, 1198 aa, Mesoligia furuncula
MLTRSALRKARLPPPDSSLSSASPPPVPSLTVSAVTTPAVAVASSSSDEYFSPPTTPPPARRRGGRRPPDGLGPRGPPASDRVPAPGGSVQRMRWTRSINENVMRSYYGATEGGNNLTAYRVRMLSLFQVLEPAVNVSAQRLSDQVRVIQRNHMLDDTVLDRLRNEMQSSHVIAPQPQTAVLLPQCNTNHADEGSNDRATNVSTQCNEELRSALEDAIREYRFMSPEHRPRLPRLPMHNKNRALVATLDSQLSNYFDDCEDLTDTHSILYCAAVAVCRVAHVKFADDSRATRPKPAIPAWQCRIERRIGGARALIGKLICFREGNTRPRVMRFVRRAFLGTDISPQDYMSCVTERIDFLKQKVYAWANRIRRYKRRVERYTQNRTFQSDERWVYRSWERPDQSVADTCLPDDEAMCSFWRNIWSVPVSHTEGDWAREVERACDPIPEMGAITICPQDVARAVRPLPNWKSSGPDGLHNFWIKWFLRSHARLASQFQTALESGSLPQFLTTGITHLLHKSGSTTEPKNYRPITCLPTVYKVLTSILRAKIDKHINTNSIMSVSQNGCKNGSRGTKELLLIDMAISQQVRRSRKDLSTCWIDYKKAYDSVPHTWLMRVLELYKIDATLRTFLMSCMGQWRTVLRYPGCRNIQRNSEPIRIERGIFQGDSLSPLWFCLALNPLSTLLEDSGLGYRLRRGGQVISHLLYMDDLKLFAPNNLQLMELLKVTQTFSSAIRMEFGVDKCAVMHVKRGEIVESVGTQLSDSTNLRALSASETYKYLGMSEALGINVTDMKQSLKERFFGRLKKVLNSLLSGGNKVRAFNGWVMPVLMYSFGILKWTQTELDALDRRVRTLLTANRMHHPRSSVMRLYIPRKCGGRGFLNAKTLHNREICSLREYFLETDVGMHRDVVAVDKGLTPLSLAKENWRKPVVLDTNDRMEVWQSKELHGRFFRALHGPDVDLLASVAWLRFGDLFGETEGFVCAIMDEVMMTNNYRRFIVKDGTVDICRACHRPGESIRHIISGCSRLANGEYLHRHNLVARIIHQQLALKYSLVESEVPYYRYVPDPVLENGNISLYWDRSIITDRTIVANKPDIVVVDRSERRAMIVDITVPHDGNLVKAEKDKQIKYLDLAREVVDMWDVDSAIIVPIVVTANGLIAKSLDQHLRRLSLGSWIKGLIQKAVLLDTARIVRRFLSLEP

SEQ ID NO: 11848 - protein, 1092 aa, Mesoligia furuncula
MQQTPLRIRVVLALGIHRLLLSRLFRGNTSAIRAKRSGFNFTNTAISKMYKLGRVNNLYFLKYGTQLSVLFNLKIDRVPTDTSHADEGSNDRATNVSTQCNEELRSTLEDAIQEYRFMSPELRPRLPRVPMHNKNRALVAVLDSQLSNYFDGCEDLTDTHSILYCAAVAACRVAHVKFPNDSRATRPKPAVPAWQCRIERRIGGARALIGKLTCFREGNTRPRVMRFVRRAFLGTDISPQDYMSCVTERIDFLKQKVYAWANRIRRYKRRVERYTQNRTFQSDERWVYRDWERPDQSVTDTCLPDDDTMCSFWRSIWSVPVSHTESDWTREVERACDPIPEMGAITICPQDVARAVRPLPNWKSPGPDGLHNFWIKWFTRSHARLASQFQTALESGSLPQFLTTGITHLLHKSGSTAEPKNYRPITCLPTVYKVLTSILRVKIDNHINTNSIMSASQNGCRNGSRGTKELLLIDMTISQQVCRFRKDLSTCWIDYKKAYDSVPHTWLMRVLELYKIDTTLRTFLMSCMGQWRTVLRYPGCRNIQRNSEPIRIERGIFQGDSLSPLWFCLALNPLSTLLEDSGLGYRLRRGGQVISHLLYMDDLKLFAPNNLQLMELLKITETFSSAIRMEFGVDKCAVMHVKRGEIVESVGTQLSDSTNLRALSASETYKYLGMSEALGINVSDMKQSLKERFFGRLKKVFNSLLSGGNKVRAFNGWVMPVLMYSFGILKWTQTELDAVDRKVRTLLTANRMHHPRSSVMRLYIPRKCGGRGFLNAKTLHNREICSLREYFLEIDVGMHRDVVAVDKGLTPLSLGKENWRKPVVLDTNDRMEVWQSKELHGRFFRALHGPDVDLLASVAWLRFGDLFGETEGFVCAIMDEVMMTNNYRRFIVKDGTVDICRACHRPGESIRHIISGCSRLANGEYLHRHNLVARIIHQQLSLKYSLVESEVPYYRYVPDPVLENGNITLYWDRSIITDRTIVANKPDIVVVDRSERRAMIVDITVPHDENLVKAEKDKQIKYLDLAHEVVDMWDVDSAIIVPIVVTANGLIAKSLDQHLKRLSLGSWIKGLIQKAVLLDTARIVRRFLSLEP

SEQ ID NO: 11849 - protein, 1106 aa, Mesoligia furuncula
MRWTQSINENVMRSYYGATEGGNNLTAYRVRMLSLFQALEPTVNVSAQRLSDQVRVIQRNHMLDDTVLDRLRNEMQSSHVIAPQSQTAVVLPQSNTSHADEGSNDRATNVSTQCNEELRSTLEDAIQEYRFMSPELRPRLPRLPMHNKNRALVAVLDSQLSNYFDGCEDLTDTHSILYCAAVAACRVAHVKFANDSRATRPKPAVPAWQCRIERRIGEARALIGKLTCFREGNTRPRVMRFVRRAFLGTDISPQDYMSCVTERIDFLKQKVYAWANRIRRYKRRVERYTQNRTFQSDQRWVYRDWERPDQSVTDTCLPDDDAMCSFWRSIWSVPVSHTESDWTREVERACDPIPEMGAITICPQDVARAVRPLPNWKSPGPDGLHNFWIKWFTRSHARLASQFQTALESGSLPQFLTTGITHLLHKSGSTAEPKNYRPITCLPTVYKVLTSILRVKIDKHINTNSIMSASQNGCRNGSRGTKELLLIDMTISQQVRRFRKDLSTCWIDYKKAYDSVPHTWLMRVLGLYKVDTTLRTFLMSCMGQWRTVLRYPGCRNIQRNSEPIRIERGIFQGDSLSPLWFCLALNPLSTLLEDSGLGYRLRRGGQVISHLLYMDDLKLFAPNNLRLMELLKITETFSSAIRMEFGVDKCAVMHVKRGEIVESVGTQLSDSTNLRALSASETYKYLGMSEALGINVTDMKQSLKERFFGRLKKVFNSLLSGGNKVRAFNGWVMPVLMYSFGILKWTQTELDALDRKVRTLLTANRMHHPRSSVMRLYIPRKCGGRGFLNAKTLHNREICSLREYFLETDVGMHRDVVAVDKGLTPLSLGKENWRKPVVLDTNDRMEVWQSKELHGRFFRALHGPDVDLLASVAWLRFGDLFGETEGFVCAIMDEVMMTNNYRRFIVKDGTVDICRACHRPGESIRHIISGCSRLANGEYLHRHNLVARIIHQQLALKYSLVESEVPYYRYVPDPVLENGNITLYWDRSIITDRTIIANKPDIVVVDRSERRAMIVDITVPHDENLVKAEKDKQIKYLDLAHEVVDMWDVDSAIIVPIVVTANGLIAKSLDQHLKRLSLGSWIKGLIQKAVLLDTARIVRRFLSLEP

SEQ ID NO: 11850 - protein, 1106 aa, Mesoligia furuncula
MRWTQSINENVMRSYYGATEGGNNLTAYRVRMLSLFQVLEPAVNVSAQRLSDQVRVIQRNHMLDDTVLDRLRNETQSSHVIAPQSQTAVVLPQSNTSHADEGSNDRATNVSTQCNEELRSTLEDAIQEYRFMSPELRPRLPRLPMHNKNRALVAVLDSQLSNYFDGCEDLTDTHSILYCAAVAACRVAHVKFPNDSRATRPKPAVPAWQCRIERRIGGARALIGKLTCFREGNTRPRVMRFVRRAFLGTDISPQDYMSCVTERIDFLKQKVYAWANRIRRYKRRVERYTQNRTFQSDERWVYRDWERPDQSVTDTCLPDDDAMCSFWRSIWSVPVSHTESDWTREVERACDPIPEMGAITICPQDVARAVRPLPNWKSPGPDGLHNFWIKWFTRSHARLASQFQTALESGSLPQFLTTGITHLLHKSGSTAEPKNYRPITCLPTVYKVLTSILRVKIDNHINTNSIMSASQNGCRNGSRGTKELLLIDMTISQQVRRFRKDLSTCWIDYKKAYDSVPHTWLMRVLELYKIDTTLRTFLMSCMRQWRTVLRYPGCRNIQRNSEPIRIERGIFQGDSLSPLWFCLALNPLSTLLEDSGLGYRLRRGGQVISHLLYMDDLKLFAPNNLQLMELLKITETFSSAIRMEFGVDKCAVMHVKRGEIVESVGTQLSDSTNLRALSASETYKYLGMSEALGINVTDMKQSLKERFFGRLKKVFNSLLSGGNKVRAFNGWVMPVLMYSFGILKWTQTELDAVDRKVRTLLTANRMHHPRSSVMRLYIPRKCGGRGFLNAKTLHNREICSLREYFLEIDVGMHRDVVAVDKGLTPLSLGKENWRKPVVLDTNDRMEVWQSKELHGRYFRALHGPDVDLLASVAWLRFGDLFGETEGFVCAIMDEVMMTNNYRRFIVKDGTVDICRACHRPGESIRHIISGCSRLANGEYLHRHNLVARIIHQQLALKYSLVESEVPYYRYVPDPVLENGYITLYWDRSIITDRTIVANKPDIVVVDRSERRAMIVDITVPHDENLVKAEKDKQIKYLDLAHEVVDMWDVDSAIIVPIVVTANGLIAKSLDQHLKRLSLGSWIKGLIQKAVLLDTARIVRRFLSLEP

SEQ ID NO: 11851 - protein, 868 aa, Mesoligia furuncula
MRFVRRAFLGTDISPQDYMSCVTERIDFLKQKVYAWANRIRRYKRRVERYTQNRTFQSDERWVYRDWERPDQSVTDTCLPDDDAMCSFWRSIWSVPVSHTESDWTREVERACDPIPEMGAITICPQDVARAVRPLPNWKSPGPDGLHNFWIKWFTRSHARLASQFQTALESGSLPQFLTTGITHLLHKSGSTAEPKNYRPITCLPTVYKVLTSILRVKIDKHINTNSIMSASQNGCRNGSRGTKELLLIDMTISQQVRRFRKDLSTCWIDYKKAYDSVPHTWLMRVLELYKIDTTLRTFLMSCMGQWRTVLRYPGCRNIQRNSEPIRIERGIFQGDSLSPLWFCLALNPLSTLLEDSGLGYRLRRGGQVISHLLYMDDLKLFAPNNLQLMELLKITETFSSAIRMEFGVDKCEVMHVKRGEIVESVGTQLSDSTNLRALSASETYKYLGMSEALGINVTDMKQSLKERFFGRLKKVFNSLLSGGNKVRAFNGWVMPVLMYSFGILKWTQTELDALDRKVRTLLTANRMHHPRSSVMRLYIPRKCGGRGFLNAKTLHNREICSLREYFLEIDVGMHRDVVAVDKGLTPLSLGKENWRKPVVLDTNDRMEVWQSKELHGRFFRALHGPDVDLLASVAWLRFGDLFGETEGFVCAIMDEVMMTNNYRRFIVKDGTVDICRACHRPGESIRHIISGCSRLANGEYLHRHNLVARIIHQQLALKYSLVESEVPYYRYVPDPVLENGNITLYWDRSIITDRTIVANKPDIVVVDRSERRAMIVDITVPHDENLVKAEKDKQIKYLDLAHEVVDMWDVDSAIIVPIVVTANGLIAKSLDQHLKRLPLGSWIKGLIQKAVLLDTARIVRRFLSLEP

SEQ ID NO: 11852 - protein, 880 aa, Spilarctia lutea
MSFRSGNTRPRVMRFVKRAFLGTTISPQEYMSCVTERIDFLKQKVCAWANRIRRYRKRVDRYNQNRMFQRNEKWVYRKWENLSPCMSDGQVPDENATNSFWRNMWSVPVTHTEGDWCRDVERSCESLLPMEPTSIDEEDVSCAVRSLPNWKAPGPDGLHNFWLKWFRSSHACLASQFQTALDSGSLPQFLTTGITHLLYKSGDAMDPKNFRPITCLPTLYKLLTSILRLKITTHINHNSILSISQNGCRSGTRGTKELLIIDMTISQQVRRNRKSLATCWIDYKKAFDSVPHTWLLKVLELYKIDTTLCTFLKVCMGQWRTALRYPGCRQSAMNDVLIKIERGIFQGDSLSPLWFCLALNPLSTLLEGSGLGYRLQKDDRVISHLFYMDDLKLLAPTKLQLTALLKVTENFSNSIKMEFGVDKCAVMYVKKGEIVESEGIELSDSTKLRSLSATETYKYLGFSQSLGMPESDMKQTLRERFFSRLKKVLKSLLSGGNKVRACNGWVMPVLMYSFGVLRWTQTELDAIDRRVRTLLTAFRMHHPRSSVMRLYIPRRLGGRGLLNIKTLHNREVYNLREYFLQTDVGVHRSVVTVDTGLTPLALAKENWRKPVVLSTNDRREVWKGKELHGRFYRALHGPDIDFKTSTSWLRYGDLFGETEGFVCAIMDEVIMTNNYRKYILRDGTVDICRACHRPGESIRHIISGCSRLANGEYLHRHNQVARIVHQQLALKYHLVNSEVPYYRYVPDPVLENGRATLYWDRSIITDRTIVANKPDIVVIDRLERRAIIIDIAVPHDENLVKVEKEKQIKYLDLSHEIVDMWNLDSVIIVPIVVSAHGLIAKSLDQHLKRLTLEGWIKGLIQKAVLLGTARIVRRFLSLEP

SEQ ID NO: 11853 - protein, 1122 aa, Spilarctia lutea
MIYVYTIILIIIIMKWTHSINENVMRAYFRATELGTNLTAYRVRLVSLFQELEPAVNVSAQRLSDQVRAIQRCHLLDDAVLERIRSDVRNTLTIPSSSHKVDVVVNTPQLPDNHDVDEQRESEIISVSTQCNDRIRSALEDAIQEYRYVNYNNRPRLPRLPIHKRNLALVGALNSLLPDYFGNSEDLSDTHSILYCAAIAVCRVVGVKFIERITTRTKNTVPAWQYRIERRIAETRTLIGKLISFKSGNTRPRVMRFVKQAFLGTTISPQQYMSSVTERIDFLKQKVCAWANRIRRYKKRGDRFNQNRMFQTNEKWVYRKWEAPNPCDRDGHLPDENATNTFWRNIWSVPVTHTDGDWMRDVKRSCESITNMEPVRINKEDVSCAVRSLPNWKAPGPDGLHNFWLKWFRSSHACLASQFQAALDSGSLPQFLTTGITHLLYKSGGTMDPKNFRPITCLPTLYKLLSSILRIKITTHINHNSILSISQNGCRSGTRGTKELLIIDMTISQQVRRNRRNLATCWIDYKKAYDSVPHTWLLKVLELYKIDKTLCTFLKSCMGQWRTVLRYPGCRQSPMTDVLIKIERGIFQGDSLSPLWFCLALNPLSTLLEGSELGYGLRKDDRVISHLLYMDDLKLLAPTKLQLTALLKITENFSNSIKMEFGVDKCAVMYVKKGLIVESEGVELSDSTKLRSLSVTEGYKYLGFTQSLGIPESDMKQALRERFFGRLKKVLKSLLSGGNKVRAYNGWVMPVLMYSFGILRWTQTELDALDRGVRTLLTEFRMHHPRSSVMRLYIPRKLGGRGLLNIKTLHNREIYNLREYFLHTDVGMHRSVVAVDTGLTPLALAKENWRKPVVLSTDDRREVWKGKELHGRFYRALHGPDIDFKTSTSWLRYGDLFGETEGFVCAIMDEVIMTNNYRKYILKDGTVDICRACHRPGESIRHIISGCSRLANGEYLHRHNQVARIVHQQLALKYNLVISEVPYYRYVPDPVLENGRATLYWDRSIITDRTIVANKPDIVVIDRLERRAIIIDIAVPHDENLVKVEKEKQIKYLDLSHEIVDMWNVDSVIIVPIVVSVHGLIARSLDQHLKRLTLDGWIKGLIQKAVLLDTARIVRRFLSLEP

SEQ ID NO: 11854 - protein, 1046 aa, Xestia c-nigrum
MLDDTVLDRLRTEMHSSLVIATPPSQAVVLPQSTTITYRDDDVSSDMITNVGTQYSEDMRSALEGAIREYRFMTPELRPRLPRLPMHNKNRMLVAVLDSQLSNYFDNCEDLTDVHSILYCAAVAACRVARVKFSDDRATRPKPAVPAWQYRIEQRIGGARALIGKLICFREGNTRPRVMRFVRRAFSGTDINPRDYMSRVTERIDFLKQKVYAWASRIRRYKRRVDRYTQNRTFQRDERWVYRAWERPDQGVADMRLPDDDAMCSFWRSIWSVPVSHAEGEWTRVIERACDPVPEMGAITISPQDVACAVRPLPNWKSPGPDGLHNFWIKWFTRSHARLATLFQSALESGSLPEFLTTGITHLLHKSGSTAEPKNYRPITCLPTVYKVLTSILRSKICKHVDDNSVMSASQNGCRNGSRGTKELLLIDMAISQQVRRSRKDLSTCWIDYKKAYDSVPHTWLMRVLELYKVDATLRTFLMSCMGQWRTVLRYPGCRQIQRNSEPIRIERGIFQGDSLSPLWFCLALNPLSTLLEDSGLGYQLRKDGRVISHLLYMDDLKLFAPNDLQLMELLKVTETFSSAIRMEFGVDKCAVMHVKRGEIVESVGTQLSDSINLRSLSATETYKYLGMSEALGINVADMKQSLKERFFGRLKKVFNSLLSGGNKVRAFNGWVMPVLMYSFGILKWTQTELDALDTKVRKLLTAFRMHHPRSSVMRLYIPRKCGGRGFLNAKTLHNREICSLRDYFLEADVGMHRDVVAMDKGLTPLSLAKENWRKPIILTTDDRRKEWQGKELHGRFYRALHGPDVDFLASVSWLRSGDLFGETEGFVCAIMDEVMMTNNYRRFIVKDGTVDICRACHRPGESIRHIISGCSRLANGEYLHRHNLVARIIHQQLALKYNLVESEVPYYRYVPDPVLVNGSITLYWDQSIITDRTVIANRPDIVVMDRSERRAMIVDITVPHDENLVKAEKDKQIKYLDLAREVVDMWEVDSAIIVPIVVSAHGLIAKSLDQHLRRLSLGSWIKGLIQKAVLLDTARIVRRFLSLEP

SEQ ID NO: 11855 - protein, 1198 aa, Griposia aprilina
MLTRSAASRARPPPPDSSLSSASLPPVSSPTVSAVTTPAAVVASSSSDEYFSPPTTPPPVRRRGGHRPPDGLGPRGPPASDRVPAPGGSVQRMRWTRSINENVMRSYYGATEGGNNLTAYRVRMLSLFQVLEPAVNVSAQRLSDQVRVIQRNHMLDDTVLDRLRNEMQSSHVIAPPSQTVVVLPQSNTSQADEESDDRATNVSTQCNDELRSALEDAIREYRFISPELRPRLPRLPMHNKNRVLVAALDAQLSNYFDDCVDLTDTHSILYCAAVAACRVAHVKFANDSRATRPKPAVPAWQCRIERRIGGARALIGKLICFREGNTRPRVMRFVRRAFAGTNISPQDYMSCVTERIDFLKQKVYAWANRIRRYKRRMERYTQNRTFQRDERWVYRDWERPDQGVADTCLPDDDAMCSFWRNIWSVPVSHTEGDWAREVERACDPIPEMGAISICPQDVTRAVRPLPNWKSPGPDGLHNFWIKWFGRSHARLAAQYQVALESGSLPQFLTTGVTYLLHKSGSTAEPKNYRPITCLPTVYKVLTSILRAKINNHIDTNSIMSPSQNGCRNGSRGTKELLLIDMAISQQVRRSRKDLSTCWIDYKKAYDSVPHTWLVRVLELYKVDATLRTFLKSCMGQWRTVLHYPGCRNIQRNNEPIRIKRGIFQGDSLSPLWFCLALNPLSTLLEDSGLGYRLRRGGQVISHLLYMDDLKLFAPNNLQLMELLKVTETFSSAIRMEFGVDKCAVMHVKRGEIVESVGTQLPYSINLRALSASDTYKYLGMSEALGINGTDMKQSLKERFFGRLKKVFNSLLSGGNKVRAFNGWVMPVLMYSFGILKWTQTELDALDRKVRTLLTANRMHHPRSSVMRLYIPRKCGGRGFLNAKTLHNREICSLREYFLEADVGMHTDVVKVDKGLTPLSLAKENWRKPVVLDTNDRMEVWQSKELHGRFFRALHGPDVDQLASVAWLRFGDLFGETEGFVCAIMDEVILTNNYRRHIMKDGTVDVCRACHRPGESIRHIISGCSRLANEEYLHRHNLVARIIHQQLALKYSLVESEVPYYRYVPDPVLENGHITLYWDRSIITDRTIVANKPDIVVVDRLERRAMIVDITVPHDGNLVKAEKDKQIKYLDLAREVVDMWDVDSAIIVPIVVTANGLIAKSLDQHLRRLSLGSWIKGLIQKAVLLDTARIVRRFLSLEP

SEQ ID NO: 11856 - protein, 962 aa, Griposia aprilina
MHNKNRVLVAALDAQLSNYFDDCVDLTDTHSILYCAAVAACRVAHVKFANDSRATRPKPAVPAWQCRIERRIGGARALIGKLICFREGNTRPRVMRFVRRAFAGTNISPQDYMSCVTERIDFLKQKVYAWANRIRRYKRRVERYTQNRTFQRDERWVYRGWERPDQGVADTCLPDDDAMCSFWRNIWSVPVRHTEGDWTREVERACDPIPEMEAITICPQDVTRAVRPLPNWKSPGPDGLHNFWIKWFGRSHARLAAQYQVALESGSLPQFLTTGVTHLLHKSGSTAEPKNYRPIACLPTVYKVLTSILRDKINKHIDTNYIMSPSQNGCRNGSRGTKELLLIDMAISQQVRRSRKDLSTCWIDYKKAYDSVPHTWLMRVLELYKVEATLRTFLMSCMGQWRTVLRYPAYRNTQRNSEPIRIERGIFQGDSLSPLWFCLALNPLSTLLEDSGLGYRLRRGGQVISHLLYMDDLKLFAPNNSQLMDLLKVTETFSSAIRMEFGVDKCAVMHVKRGEIVESVGTQLSDSINLRALSASETYKYLGMSEALGINGTDMKQSLKDRFFGRLKKVFNSLLSGGNKVRAFNGWVMPVLMYSFGILKWTQTELDALDRKVRTLLTANRMHHPRSSVMRLYIPRKCGGRGFLNAKTLHNREICSLREYFLEADVGMHRDVVTVDKGLTPLSLAKENWRKPVVLDTNDRMEVWQSKELHGRFFRALHGPDVDQLASVAWLRFGDLFGETEGFVCAIMDEVMMTNNYRRFIVKDGTVDICRACHRPGESIRHIISGCSRLANEEYLHRHNLVARIIHQQLALKYSLVESEVPYYRYVPDPVLENGHITLYWDRSIITDRTIVANKPDIVMVDRLERRAMIVDITVPHDGNLVKAEKDKQIKYLDLAREVVDMWDVDSAIIVPIVVTANGLIAKSLDQHLRRLSLGSWIKGLIQKAVLLDTASIVRRFLSLEP

SEQ ID NO: 11857 - protein, 868 aa, Griposia aprilina
MRFVRRAFAGTNISPQDYMSYVTERIDFLKQKVYAWANRIRRYKRRVERYTQNRTFQRDERWIYRGWERPDQGVADTCLPDDDAMCSFWRNIWSVPVSHTEGDWAREVERACDPIPEMGAISICPQDVTRAVRPLPNWKSPGPDGLHNFWIKWFGRSHARLAAQYQVALESGSLPQFLTTGVTHLLHKSGSTAEPKNYRPITCLPTVFKVLTSILRAKINKHIDTNYIMSPSQNGCRNGSRGTKELLLIDMAISQQVRRSRKDLSTCWIDYKKAYDSVPHTWLVRVLELYKVDATLRTFLKSCMGQWRTVLHYPGCRNIQRDNEPIRIERGIFQGDSLSPLWFCLALNPLSTLLEDSGLGYRLRRGGQVISHLLYMDDLKLFAPNNLQLMELLKVTETFSSAIRMEFGVDKCAIMHVKRGEIVESVRTQLSDSINLRALSASETYKYLGMSEALGINGTDMKQSLKERFFGRLKKVFNSLLSGGNKVRAINGWVMPVLMYSFGILKWTQTELDALDRKVRTLLTANRMHHPRSSVMRLYIPRKCGGRGFLNAKTLHNREICSLREYFLEADVGMHRDVVTVDKGLTPLSLAKENWRKPVVLDTNDRMEVWQSKELHGRFFRALHGPDVDQLASVAWLRFGDLFGETEGFVCAIMDEVILTNNYRRHIMKDGTVDVCRACHRPGESIRHIISGCSRLANEEYLHRHNLVARIIHQQLALKYSLVESEVPYYRYVPDPVLENGYITLYWDRSIITDRTIVANKPDIVVVDRLERRAMIVDITVPHDGNLVKAEKDKQIKYLDLAREVVDMWNVDSAIIVPIVVTANGLIAKSLDQHLRRLSLGSWIKGLIQKAVLLDTARIVRRFLSLEP

SEQ ID NO: 11858 - protein, 1198 aa, Griposia aprilina
MMLTRSAKRRAHPPPPDSSLSSASPPPVSSHTVSAVTTPAAVVASSSSDEYFSPPTTPPPVRRRGGHRPPDGLGPRGPPASDRVPAPGGSVQRMRWTRSINENMRSYYGATEGGNNLTAYRVRMLSLFQVLEPAVNVSAQRLSDQVRVIQRNHMLDDTVLDRLRNEMQSSHVIAPPSQTVVVLPQSNTSQADEESDDRATNVSTQCNDELRSALEDVIREYRFISPELRPRLPRLPMHNKNRVLVAALDAQLSNYFDDCVDLTDTHSILYCAAVAACRVAHIKFANDSRPTRPKPAVPAWQCRIERRIGGARALIGKLICFREGNTRPRVMRFVRRAFAGTNISPQDYMSCVTERIDFLKQNVYAWANRIRRYKRRVERYTQNRTFQRDERWVYRGWERPDQGVADTCLPDDDAMCSFWRNIWSVPVSHTEGDWGREVERACDPIPEMGAISICPQDVTRAVRPLPNWKSPGPDGLQNFWIKWFGRSHARLAAQYQVAIESGSLPQFLTTGVTHLLHKSGSTAEPKNYRPITCLPTVYKVLTSILRAKINKHIDTNSIMSPYQNGCRNGSRGTKELLLIDMAISQQVRRSRKDLSTCWIDYKKAYDSVPHTWLVRVLELYKVDATLRTFLKSCMGQWRTILHYPGCRNIQRDNEPIRIERGIFQGDSLSPLWFCLALNPLSTLLEDSGLGYRLRRGGQVISHLLYMDDLKLFAPNNLQLMELLKVTETFSSAIRMEFGVDKCAVMHVKRGEIVESVGTQLSYSINLRALSASDTYKYLGMSEALGINGIDMKQSLKERFFGRLKKVFNSLLSGGNKVRAFNGWVMPVLMYSFGILKWTQTELDALDMKVRTLLTANRMHHPRSSVMRLYIPRKCGGRGFLNAKTLHNREICSLREYFLEADVGMHTDVVKVDKGLTPLSLAKENWRKPVVLDTNDRMEVWQSKELHGRFFQALHGPDVDQLASVAWLRFGDLFGETEGFVCAIMDEVILTNNYRRHIMKDGTVDVCRACHRPGESIRHIISGCSRLANEEYLHRHNLVARIIHQQLALKYSLVESEVPYYRYVPDPVLENGHITLYWDRSIITDRTIVANKPDIVVVDRLERRAMIVDITAPHDGNLVKAEKDKQIKYLDLAREVVDMWDVDSAIIVPIVVTANGLIAKSLDQHLRRLSLGSWIKGLIQKAVLLDTARIVRRFLSLEP

SEQ ID NO: 11859 - protein, 1198 aa, Griposia aprilina
MLTRSAARRARPPPPDSSLSSASLPPVSSPTVSAVTTPAAVVASSSSDEYFSPPTTPPPVRRRGGHRPPDGLGPRGPPASDRVPAPGGSVQRMRWTRSINENVMRSYYGATEGGNNLTAYRVRMLSLFQVLEPAVNVSAQRLSDQVRVIQRNHMLDDTVLDRLRNEMQSSHVIAPPSQTVVVLPQSNTSQADEESDDRATNVSTQCNDELRSALEDAIREYRFISPELRPRLPRLPMHNKNRVLVAALDAQLSNYFDDCVDLTDTHSILYCAAVAACRVAHVKFANDSRATRPKPAVPAWQCRIERRIGEARALIGKLICFREGNTRPRVMRFVRRAFAGTNISPQDYMSCVTERIDFLKQKVYAWANRIRRYKRRVERYTQNRTFQRDERWVYRGWERPDQGVADTCLPDDDAMCSFWRNIWSVPVSHTEGDWTREVERACDPIPEMGAITICPQDVTRAVRPLPNWKSPGPDGLHNFWIKWFGRSHARLAAQYQVALESGSLPQFLTTGVTHLLHKSGSTAEPKNYRPIACLPTVYKVLTSILRDKINKHIDTNYIMSPSQNGCRNGSRGTKELLLIDMAISQQVRRSRKDLSTCWIDYKKAYDSVPHTWLMRVLELYKVEATLRTFLMSCMGQWRTVLHYPACRNTQRNSEPIRIERGIFQGDSLSPLWFCLALNPLSTLLEDSGLGYRLRRGGQVISHLLYMDDLKLFAPNNSQLMDLLKVTETFSSAIRMEFGVDKCAVMHVKRGEIVESVGTQLSDSINLRALSASETYKYLGMSEALGINGTDMKQSLKDRFFGRLKKVFNSLLSGGNKVRAFNGWVMPVLMYSFGILKWTQTELDALDRKVRTLLTANRMHHPRSSVMRLYIPRKCGGRGFLNAKTLHNREICSLREYFLEADVEMHRDVVTVDKGLTPLSLAKENWRKPVVLDTNDRMEVWQSKELHGRFFRALHGPDVDQLASVAWLRFGDLFGETEGFVCAIMDEVVMTNNYRRFIVKDGTVDICRACHRPGESIRHIISGCSRLANEEYLHRHNLVARIIHQQLALKYSLVESEVPYYRYVPDPVLENGHITLYWDRSIITDRTIVANKPDIVMVDRLERRAMIVDITVPHDGNLVKAEKDKQIKYLDLAREVVDMWDVDSAIIVPIVVTANGLIAKSLDQHLRRLSLGSWIKGLIQKAVLLDTARIVRRFLSLEP

SEQ ID NO: 11860 - protein, 1198 aa, Griposia aprilina
MLTRSAARRARPPPPDSSLSSASLPPVSSPTVSAVTTPAAVVASSSSDEYFSPPTTPPPVRRRGGHRPPDGLGPRGPPASDRVPAPGGSVQRMRWTRSINENVMRSYYGATEGGNNLTAYRVRMLSLFQVLEPAVNVSAQRLSDQVRVIQRNHMLDDTVLDRLRNEMQSSHVIAPPSQTVVVLPQSNTSQADKESDDRATNVSTQCNDELRSALEDAIREYRFISPELRPRLPRLPMHNKNRVLVAALDAQLSNYFDDCVDLTDTHSILYCAAVAACRVAHVKFANDSRATRPKPAVPAWQCRIKRRIGGARALIGKLICFREGNTRPRVMRFVRRTFAGTNISPQDYMSCVTERIDFLKQKVYAWANRIRRYKRRVERYTQNRTFQRDERWVYRGWERPDQGVADTCLPDDDAMCSFWRNIWSVPVSHTEGDWTREVERACDPIPEMGAITICPQDVTRAVRPLPNWKSPGPDGLHNFWIKWFGRSHARLAAQYQVALESGSLPQFLTTGVTHLLHKSGSTAEPKNYRPIACLPTVYKVLTSILRDKINKHIDTNYIMSPSQNGCRNGSRGTKELLLIDMAISQQVRRSRKDLSTCWIDYKKAYDSVPHTWLMRVLELYKVEATLRTFLMSCMGQWRTVLRYPACRNTQRNSEPIRIERGIFQGDSLSPLWFCLALNPLSTLLEDSGLGYRLRRGGQVISHLLYMDDLKLFAPNNSQLMDLLKVTETFSSAIRMEFGVDKCAVMHVKRGEIVESVGTQLSDSINLRALSASETYKYLGMSEALGINGTDMKQSLKDRFFGRLKKVFNSLLPGGNKVRAFNGWVMPVLMYSFGILKWTQTELDALDRKVRTLLTANRMHHPRSSVMRLYIPRKCGGRGFLNAKTLHNREICSLREYFLEADVGTHRDVVTVDKGLTPLSLGKENWRKPVVLDTNDRMEVWQSKELHGRFFRALHGPDVDQLASVAWLRFGDLFGETEGFVCAIMDEVMMTNNYRRFIVKDGTVDICRACHRPGESIRHIISGCSRLANEEYLHRHNLVARIIHQQLALKYSLVESEVPYYRYVPDPVLDNGHITLYWDRSIITDRTIVANKPDIVMVDRLERRAMIVDITVPHDGNLVKAEKDKQIKYLDLAREVVDMWDVDSAIIVPIVVTANGLIAKSLDQHLRRLSLGSWIKGLIQKAVLLDTARIVRRFLSLEP

SEQ ID NO: 11861 - protein, 1197 aa, Griposia aprilina
MLTRSAARQARPPPPDSSLSSASLPPVSSPTVSAVTTPAAVVASSSSDEYFSPPTTPPPARRRGGHRPPDGLGPRGPPASDRIAPGGSVQRMRWTRSINENVMRSYYGATEGGNNLIAYRVRMLSLFQVLEPAVNVTAQRLSDQVRVIQRNHMLDDTVLDRLRNEMQSSHVIAPPSQTVVVLPESNTSQADEESDDRATNVSTQCNDELRSALEDAIREYRFISPELRPRLPRLPMHNKNRALVVALDAQLSNYFDDCVDLTDTHSILYCAAVAACHVAHVKFANDSRATRPKPAVPAWQCRIERRIGGARALIGKLICFREGNTRPRVMRFVRRAFAGTDVSPQDYMSCVTERIDFLKQKVYAWANRIRRYKRRVERYTQNRTFQRDERWVYRGWERPDQGVADTCLPDDDAMCSFWRNIWSVPVSHTEGDWTREVERACDPIPEMGAITICPQDVTRAVRPLPNWKSPGPDGLHNFWIKWFGRSHARLAAQYQVALESGSLPQFLTTGVTHLLHKSGSTAEPKNYRPIACLPTVYKVLTSILRDKINKHIDTNYIMSPSQNGCRNGSRGTKELLLIDMAISQQVRRSRKDLSTCWIDYKKAYDLVPHTWLMRVLELYKVEATLRTFLMSCMGQWRTVLRYPACRNTQRNSEPIRIERGIFQGDSLSPLWFCLALNPLSTLLEDSGLGYRLRRGGQVISHLLCMDDLKLFTPNNSQLMDLLKVTETFSSAIRMEFGVDKCAVMHVKRGEIVESVGTQLTDSINLRALSASETYKYLGMSEALGINGTDMKQSLKDRFFGRLKKVFNSLLSGGNKVRAFNGWVMPVLMYSFGILKWTQTELDALDRKVRTQLTANRMHHPRSSVMRLYIPRKCGGRGFLNAKTLHNREICTLREYFLEADVGMHRDVVTVDKALTPLSLAKENWRKPVVLDTTDRMEVWQSKELHGRFFRALHGPDVDQLASVAWLRFGDLFGETEGFVCAIMDEVMMTNNYRRFIVKDGTVDICRACHRPGESIRHIISGCSRLANEEYLHRHNLVARIIHQQLALKYSLVESEVPYYRYVPDPVLENGHITLYWDRSIITDRTIVANKPDIVMVDRLERRAMIVDITVPHDRNLVKAEKDKQIKYLDLAREVVDMWDVDSAIIVPIVVTANGLIAKSLDQHLRRPSLGSWIKGLIQKAVLLDTARIVRRFLSLEP

SEQ ID NO: 11862 - protein, 1001 aa, Griposia aprilina
MIGLQTTQCNDELRSALEDAIREYRFISPELRPRLPRLPMHNKNRMLVAALDAQLSNYLDDCVDLTDTHSILYCAAVAVCRVAHIKFANDSRPTRPKPAVPAWQCRIERRIGGARALIGKLICFREGNTRPRVMRFVRRAFAGTNISPQDYMSCVTERIDFLKQKVYAWANRIRRYKRRVERYTQNRTFQRDERWVYRGWERPDQGVADTCLPDDDTMCSFWRNIWSVPVSHTEGDWSREVERACDPIPEMGAISICPQDVTRAVRPLPNWKSPGPDGLQNFWIKWFGRSHARLAAQYQVAIESGSLPQFLTTGVTHLLHKSGSTAEPKNYRPITCLPTVYKVLTSILRAKINKHIDTNSIMSPSQNGCRNGSRGTKELLLIDMAISQQVRRSRKDLSTCWIDYKKAYDSVPHTWLVRVLELYKVDATLRTFLKSCMGQWRTILHYPGWRNIQRDNEPIRIERGIFQGDSLSPLWFCLALNPLSTLLEDSGLGYRLRRGGQVISHLLYMDDLKLFAPNNLQLMELLKVTETFSSAIRMEFGVDKCAVMHVKRGEIVESVGTQLSYSINLRALSASDTYKYLGMSEALGINGTDMKQSLKERFFGRLKKVFNSLLSGGNKVRAFNGWVMPVLMYSFGILKWTQTELDALDRKVRTLLTANRMHHPRSSVMRLYIPRKCGGRGFLNAKTLHNREICSLREYFLEADVGMHTDVVKVDKGLTPLSLAKENWRKPVVLDTNDRMEVWQSKELHGRFFRALHGPDVDQLASVAWLSFGDLFGETEGFVCAIMDEVILTNNYRRHIMKDGTVDVCRACHRPGESIRHIISGCSRLANEEYLHRHNLVARIIHQQLALKYSLVESEVPYYRYVPDPVLENGHITLYWDRSIITDRTIVANKPDIVVVDRLERRAMIVDITVPHDGNLVKAEKDKQIKYLDLARKVVDMWDVDSAIIVPIVVTANGLIAKSLDQHLSRLSLGSWIKGLIQKAVLLDTARIVRRFLSLEP

SEQ ID NO: 11863 - protein, 1098 aa, Omphaloscelis lunosa
MRSYYGATEGGNNLTAYRVRMLSLFQVLEPAVNVSAQRLSDQVRVIQRNHMLDDTVLDRLRSEMQSSHVIAPPLRSVIIPSQMSSVITSQADERIDDRATNVSTQCNEDLRSALEGAIQEYRFMSPELRPRLPRLPMHNKNKALVAVLDSQLSNYFDDCEDLTDTHSILYCAAVAVCRVAHLKFSNDSRATRPKPAAPAWQCRIERRIGGARTLIGKLICFREGNTRPRVMRFVRRAFLGTDISPQDYMTRVIERIDFLKQKVYAWANRIRRYKRRVERYTQNRTFQSDERWVYRAWERPDQGVADTHLPDDDAMCSFWRSIWSVPVSHTEGDWTREVERACDPIPEMGAITICPQDVARAVRPLPNWKSPGPDGLHNFWIKWFVRSHARLAAQYQTALESGSLPQFLTTGVTHLLHKSGSTAEPKNYRPITCLPTVYKVLTSILRAKINKHIDTNSIMSASQNGCRNGSRGTKELLLIDMAISQQVRRSRKDLSTCWIDYKKAYDSVPHTWLMRVLELYKVHTTLRTFLMSSMGQWRTVLRYPGCRNIQRNSEPIRIERGIFQGDSLSPLWFCLALNPLSTLLEDSGLGYRLRRGAQVISHLLYMDDLKLFAPNNLQLMELLKVTETFSSAIRMEFGVDKCAVMHVKRGEIMESVGTQLSDSINLRALSASETYKYLGMSEALGINVTDMKQSLKERFFGRLKKVLNSLLSGGNKVCAFNGWVMPVLMYSFGILKWTQTELDTLDRRVRTLLTAYRMHHPRSSVMRLYIPRKCGGRGFLNAKTLHNREICSLREYFLGVDVGMHRDVVVVDKGLTPLSFAKDNWRKPVVLDTKDRMEIWQSKELHGRYFRALHGPDVDLPASVTWLRFGDLFGETDGFVCAIRDEVMMTNNYRRFIVKDGTVDICRACHRPGESIRHIISGCSRLANEEYLHRHNLVARIIHQQLALKYSLVESEVPYYRYVPDPVLENGNITLYWDRSIITDRTIAANKPDIVVVDRGERRTMIIDITVPHDENLVKAEKDKQIKYLDLAREVVDMWDVDSAIIVPIVVTASGLIAKSLDQHLRRLSLGSWIKGLIQRAVLLDTARIVRRFLSLEP

SEQ ID NO: 11864 - protein, 1205 aa, Omphaloscelis lunosa
MLTRSRARKLIDTHPTSSGSSLSSASQLPDPAPNVSPVIPIAAVASSSSDEYFSPPTTPPPTRQRGRGRPPASLGLRGPPASDRVPAPGGSVQRMRWTQTINENVMRAYFGATEGGSNLTAYRGRMLSLFQVLEPAVNVSAQRLSDQVRVIQRNHMLDDVVLDRLRLESRNNNVIPASPLVTVQLQNLTSSSPRPDRVGEEDDDGVISVSSQCNARLRSALEDAFREYRSIPPGLRPHLPRLPMHKKNKALMCTLDSLLSNYFDGSKDLADTHSILYCAAIAACRVAHVKCPNSDRAPRPKPAVPAWQCRIERRIGEARVLIGKLICFREGNTRPRVMRFVKRAFSGTDISSQDYLTRVTERIDFLKQKIYAWANRIRRYRRRVERYTQNRTFQSDERWVYRAWERPDQGVIDTRLPDDDAMCSFWRSIWSAPVSHTEGDWTREIERACEHIPEMEALTISPQDIARAVRPLPNWKSPGPDGLHNFWIKWFQRSHARLASQFQSALDSGSLPQFLTTGITHLLHKSGSTAEPKNYRPITCLPTVYKVLTSILRTKINKHIDTNSIMSASQNGCKNGSRGTKELLLIDMAINQQVRRSRRDLSTCWIDYKKAYDSVPHTWLMRVLELYKVDATLRTFLMSCMRQWRTVLRYPGCRQILRNSEPIRIERGIFQGDSLSPLWFCLALNPLSTLLEDSGLGFRLRRAGQVISHLLYMDDLKLFAPNNLQLLELLKLTETFSSAIRMEFGVDKCAVMHVKRGEIVESVGTHLSDSIQLRSHSSIETYKYLGMSEALGVNAADMKQSLKERFFNRLNKVLNSLLSGGNKVRAFNGWVMPVLMYSFGILKWTQMELDALGRRVRTLLTANRMHHPRSSVMRLYIPRKCGGRGFLNAKTLHNREVCSLREYFLEADVGMHRDVVTVDKGLTPLSLANENWRKPIVLDTNDRREVWQSKELHGRFYRALHGPDVDLLASVSWLRFGDLFGETEGFVFAIMDEVMMTNNYRKYIVKDGTVDICRACHRPGESIRHIISGCSRLANGDYLHRHNLVARIIHQQLALKYSLVESEVPYYRYVPDPVLENGNITLYWDRSIITDRTIVANKPDIVVIDRLERRTMIIDIAVPHDENLVKAEKDKQIKYLDLAREVVDMWDVDTAIIVPIVVTANGIIAKSLDQHLKRLSLGSWIRGLIQKAVLLDTARIVRRFLSQEP

SEQ ID NO: 11865 - protein, 1201 aa, Omphaloscelis lunosa
MLTRLAARRARLPPPDSPLSSASSPPVRSPTVNAVMTPAAAVASSSSDEYFSPPTTPPPARRRGRRWPPDGLGPRGPPASDRVPAPGGSVQRMRWTRSINENVMRSYYGATEGGNNLTAYRVRMLSLFQVLEPAVNVSAQRLSDQVRVIQCNHMLDDTVLDRLRSEMQSSHVIAPPLRSVIIPSQMSSVITSQADERIDDRATNVSTQCNEDLRSALEGAIQEYRFMSPELRPRLPRLPMHNKNKALVAVLDSQLSNYFDDCEDLTDTHSILYCAAVAVCRVAHLKFSNDSRATRPKPAAPAWQCRIERRIGGARTLIGKLICFREGNTRPRVMRFVRRAFLGTDISPQDYMTRVTERIDFLKQKVYAWANRIRRYKRRVERYTQNRTFQSDERWVYRAWERPDQSVADTHLPDDDAMCSFWRSIWSVPVSHTEGDWTREVERACDPIPEMGAITICPQDVARAVRPLPNWKSPGPDGLHNFWIKWFVRSHARLAAQYQTALESGSLPQFLTTGVTHLLHKSGSTAEPKNYRPITCLPTVYKVLTSILRAKINKHIDTNSIMSASQNGCRNGSRGTKELLLIDMAISQQVRRSRKDLSTCWIDYKKAYDSVPHTWLMRVLELYKVHTTLRTFLMSCMGQWRTVLRYPGCRNIQRNSEPIRIERGIFQGDSLSPLWFCLALNPLSTLLEDSGLGYRLRRGGQVISHLLYMDDLKLFAPNNLQLMELLKVTETFSSAIRMEFGVDKCAVMHVKRGEIMESVGTQLSDSINLRALSASETYKYLGMSEALGINVTDMKQSLKERFFGRLKKVLNSLLSGGNKVRAFNGWVMPVLMYSFGILKWTQTELDALDRRVRTLLTAYRMHHPRSSVMRLYIPRKCGGRGFLNAKTLHNREICSLREYFLGVDVGMHRDVVVVDKGLTPLSLAKENWRKPVVLDTKDRMEIWQSKELHGRYFRALHGPDIDLPASVTWLRFGDLFGETEGFVCAIMDEVMMTNNYRRFIVKDGTVDICRACHRPGESIRHIISGCSRLANEEYLHRHNLVARIIHQQLALKYSLVESEVPYYRYVPDPVLENGNITLYWDRSIITDRTIAANKPDIVVVDRGERRTMIIDITVPHDENLVKAEKDKQIKYLDLAREVVDMWDVDSAIIVPIVVTANGLIAKSLDQHLRRLSLGSWIKGLIQRAVLLDTARIVRRLLSLEP

SEQ ID NO: 11866 - protein, 1197 aa, Sesamia nonagrioides
MLTRSAARRARPPSPDSLLSSASPPPASSATVSAVTTPAAAVASSSSDQYFSPPTTPPPARRRGGRRPPDRLGPRGPSASDRVPAPGGSVQRMRWTQSINENVMRSYYGATEGGNNLTAYRVRMLSLFQVLEPAVNVSAQRLSDQVRVIQRNHMLDDTVLDRLRNEMQSSRIIAHQSQTAEIPPQPTNYADEGSNDRATNVSTQCNEELINALEAAIREYRFTPAELRPRLPRLPMHNRNRALMATLNAQLSDYFDTCEDLTDTHSILYCAAVAACRVAHVKFPSDSRATRPKPVVPAWQHRIERCIGGARALIGKLICFREGNTRPRVMRFVRRAFAGTNISQQNYMARVTERIDFLKQKVYAWANRIRRYKRRVERYTQNRTFQSNERWVYRDWERPEQGVTDTCLPDDDAMCSFWRSIWSVPVSHTEGDWARDVERACDPIPEMGAITICPQDVACAVRPLPNWKSPGPDGLHNFWIKWFPGSHARLASQFQTALVSGSLPQFLTTGITHLLHKSGSTAEPKNYRPITCLPTVYKVLTSILKTKMNKHIDSNSIMSASQNGCKSGSRGTKELLLIDMAISQQVRRSRKDLSTCWIDYRKAYDSVPHTWLMRVLKLYKVDATLRTFLMSCMKTWRTVLRYPGCRNIQRNSEPIRIERGIFQGDSLSPLWFCLALNPLSTLLEDSGLGYRLRRGGQVISHLLYMDDLKLFAPNNSQLRELLKITETFSSSIRMEFGVDKCAVMHVKRGEIMESVGTQLTDSINLRALSASETYKYLGMSEALGINVTDMKQSLKERFFGRLKKVLNSLLSGGNKVRAFNGWVMPVLMYSFGILKWTQTELDALDQRVRTLLTANRLHHPRSSVMRLYIPRKCGGRGFLNAKTLHNREVCSLRDYFLVTDVGMHRDVVAADKGLTPLSLAKENWRKPVVLDTNDRMEVWKSKELHRRFFRALHGPDVDFKASVAWLRFGDLFGETEGFVFAIMDEVMMTNNYRRFIVKDGTVDICRACHRPGESIRHIISGCSRLANGEYLHRHNLVARIIHQQLALKYNLVESEVPYYRYTPDPVLENGYITLYWDRSIITDRTIVANKPDIVMVDRSERRAMIVDITIPHDENLVKAEKDKQIKYLDLAHEVVDMWEVDSAIIVPIVVTANGLIAKSLDQHLRRLSLGSWIKGLIQKAVLLDTARIVRKFLSLEP

SEQ ID NO: 11867 - protein, 1200 aa, Sesamia nonagrioides
MLTRSAARRARPPSPDSLLSSASPPPVSSATVSAVTTPAAAVASSSSDEYSSPPTTPPPVRRRGGRRPPDCLGPRGPSASDRVPAPGGSVQRMRWTQSINENVMRSYYGATEGGTNLTAYRVRMLSLFQVLEPAVNVSAQRLSDQVRVIQRNHMLDDVVLDRLRLESRNSHVTPASSLVAVQLNSVSPRPNRVDEEDDDRAISVSPQCIEKLRSALEDAFCEYRSTPPELRPRLPRLPMHKKNKALVCALDSQLSYYLKDSKDLTDTHSILYCGALAICRVAHVKFPDSDRATRPKSAVPAWQCRIERRIGETRALIGKLTSFREGNTRPRVMRFVRRAFSGTDTSTRDYLFRVTERIDFFKQKIYAWANRIRRYKRRVERYSQNRNFQSDERRVYRAWERSDQGVTDTCLPDDDAMCSFWRNIWSVPVSHTEGSWTRVVERACDPVPEMGAITICPQDVARAVRPLPNWKSPGPDGLHNFWIKWFSGSHARLASQFQTALESGSLPQFLTTGVTHLLHKSGSTAEPKNYRPITCLPTVYKVLTSILKSKINTHIDSNSIMSASQNGCRSGSRGTKELLLIDMAISQQVRRSRKDLSTCWIDYKKAYDSVPHTWLMRVLELYKVDATLRTFLMTCMRTWRTVLRYPGCRNIQRNSEPIRIERGIFQGDSLSPLWFCLALNPLSTLLEDSGLGYRLRRGGQVISHLLYMDDQKLFAHTDSQLKELLKITETFSSSIRMEFGVDKCAVMHVKRGEIMESVGTQLTSSINLRALSASETYKYLGMSEALGINVTDMKQSLKERFFGRLKKVLNSLLSGGNKVRAFNGWVMPVLMYSFGILKWTQTELDALDQRVRTLLTANRLHHPRSSVMRLYIPRKCGGRGFLNAKTLHNREVCSLREYFLETDVGMHRDVVAADKGLTPLSLAKENWRKPVVLDTNDRLEVWKSKELHGRFFRALHGPDVDFRASVAWLRFGDLFGETEGFVFAIMDEVMMTNNYRRFIVKDGTVDICRACHRPGESIRHIISGCSRLANGEYLHRHNLVARIIHQQLALKYNLVELEVPYYRYMPDPVLENGHITLYWDRSIITDRTIVANKPDIVLVDRSERRAMIVDITIPHDENLVKAEKDKQFKYLDLAHEVVDMWEVDSAIIVPIVVTANGLIAKSLDQHLRRLSLGSWIKGLIQKAVLLDTARIVRKFLSLEP

SEQ ID NO: 11868 - protein, 1197 aa, Sesamia nonagrioides
MLTRSAARRARPPSPDSLLSSALPPPISSATVSAVTSPAAAVASSSSDEYFSPPTTPPPVRRRGGRRPPDCLGPRGLPASDRVPAPGGSVQRMRWTQSINENVMRSYYGATEGGTNLTAYRVRMLSLFQVLEPAVNVSAQRLSDQVLVIQRNHMLDDTVLDRLRNEMQSSRIIAHQSQSAEIPPQPTNCADEGSNDRATNVSTQCNEELRNALEAAIREYRSISAELRPRLPRLPMHNRNRALMGALDAQLSNYFDTCEDLTDTHSILYCAAVAACRVAHVKFPSDSRATRPKPVVPAWQHRIERRIGGARALIGKLICFREGNTRPRVMRFVRRAFAGTNTSPQNYMARVTERIDFLKQKVYAWANRIRRYKRRVERYTQNRTFQSNERWVYRDWERPEQGVTDTCLPDDDAMCSFWRSIWSVPVSHTEGDWARDVERACDPIPEMGAITICPQDVACAVRPLPNWKSPGPDGLHNFWIKWFPRSHARLASQFQTALVSGSLPQFLTTGITHLLHKSGSTAEPKNYRPITCLPTVYKVLTSILKTKINKHIDSNSILSASQNGCRSGSRGTKELLLIDMAISQQVRRSRKDLSTCWIDYKKAYDSVPHTWLMQVLELYKVDATLRTFLMTCMRTWRTVLRYPGCRNIQRNSEPIRIERGIFQGDSLSPLWFCLALNPLSTLLEDSGLGYRLRRGGQVISHLLYMDDLKLFAPNNSQLRELLKITETFSSSIRMEFGVDKCAVMHVKRGEIMEPVGTQLTSSINLRALSASETYKYLGMSEALGINVTDMKQSLKERFFGRLKKVLNSLLSGGNKVRAFNGWVMPVLMYSFGILKWTQTELDALDQRVRTLLTANRLHHPRSSVMRLYIPRKCGGRGFLNAKTLHNREICSLRDYFLETDVGMHRDVVAADKGLTPLSLAKENWRKPVVLDTNDRMEVWKSKELYGRFFRALHGPDVDFQASVAWLRFGDLFGETEGFVFAIMDEVMMTNNYRRFIVKDGTVDICRACHRPGESIRHIISGCSRLANGEYLHRHNLVARIIHQQLALKYNLVESEVPYYRYTPDPVLENGYITLYWDRSIITDRTIVANKPDIVMVDRSERRAMIVDITIPHDENLVKAEKDKQIKYLDLAHEVVDMWEVDSAIIVPIVVTANGLIAKSLDQHLRRLSLGSWIKGLIQKAVLLDTARIVRKFLSLEP

SEQ ID NO: 11869 - protein, 922 aa, Sesamia nonagrioides
MSCAHVKFPDSDRATRPKSAVPAWQCRIERRIGETRALIGKLISFREGNTRPRVMRFVRRAFSGTDTSTRDYLFRVTERIDFFKQKIYAWANRIRRYRRRVERYSQNRNFQSDERRVYRAWERSDQGVTDTCLPDDDATYSFWRNIWSVPVSHTEGSWTRVVERACDPVPEMGAITICPQDVARAVRPLPNWKSPGPDGLHNFWIKWFSGSHARLASQFQTALESGSLPQFLTTGVTHLLHKSGSTAEPKNYRPITCLPTVYKVLTSILKSKINTHIDSNSIMSASQNGCRSGSRGTKELLLIDMAISQQVRHSRKDLSTCWIDYKKAYDSVPQTWLMRVLELYKVDATLRTFLMTCMRTWRTVLRYPGCRNIQRNSEPIRIERGIFQGDSLSPLWFCLAMNPLSTLLEDSGLGYRLRRGGQVISHLLYMDDLKLFAHTDSQLKELLKITETFSSSIRMEFGVDKCAVMHVKRGEIMESVGTQLTSSINLRALSASETYKYLGMSEALGINVTDMKQSLKERFFGRLKKLLNSLLSGGNKVRAFNGWVMPVLMYSFGILKWTQTELDALDRRVRTLLTANRLHHPRSSVMRLYIPRKCGGRGFLNAKTLHNREICSLREYFLTTDVGMHRDVVAVDKGLTPLSLAKENWRKPVVLDTNDRMEVWKSKELHGRFFKALHGPDVDLQASVAWLRFGDLFGETEGFVCAITDEVMMTNNYRRFIVKDGTVDICRACHRPGESIRHIISGCSRLANGEYLHRHNLVARIIHQQLALKYNLVESEVPYYRYTPDPVLENDHITLYWDRSIITDRTIVANKPDIVLVDRSERRAMIVDITIPHDENLVKAEKDKQIKYLDLAHEVVDMWEVDSAIIVPIVVTANGLIAKSLDQHLRRLSLGSWIKGLIQKAVLLDTARIVRKFLSLEP

SEQ ID NO: 11870 - protein, 1047 aa, Sesamia nonagrioides
MLDDVVLDRLRLESRNSHVKPASSLVAVQLNSVPSRPNLVDEEDDDEAISVTPQCNEKVRSALEDAFREYRSTPPELRPRLPRLPMHKKNKALVCALDSQLSNYLKDSKDLADTHSILYCGAVAICRVAHVKFPDSDRATRPKPAVPAWQCRIERRIGETKALIGKLISFREGNTRPRVMRFVRRAFSGTDVSTRDYLLRVTERIDFLKQKIYAWANRIRRYRRRVERYSQNRNFQSDERWVYRAWERSDQGVTDTCLPDDDATRSFWRNIWSVPVSHTEGGWTRDVERACDPVPEMGAITICPQDVARAVRPLPNWKSPGPDGLHNFWIKWFCGSHACLASQFQTALESGSLPQFLTTGITHLLHKSGSTAEPKNYRPITCLPTVYKVLTSILKAKINTHIDSNSIMSASQNGCRNGSRGTKELLLIDMAISQQVRRSRKDLSTCWIDYKKAYDSVPHTWLMRVLELYKVDATLRTFLMTCMSQWRTVLRYPGCRNIQRNSEPIRIERGIFQGDSLSPLWFCLALNPLSTLLEDSGLGYRLRRGGQVISHLLYMDDLKLFAHTNSQLKELLKITETFSSAIRMEFGVDKCAVMHVQRGEIVESVGTQLTGSINLRSLSASETYKYLGMSEALGINVTDMKQSLKERFFGRLKKVLNSLLSGGNKVRAFNGWVMPVLMYSFGILKWTQTELDALDQRVRTLLTANRLHHPRSSVMRLYIPRKCGGRGFLNAKTLHNREVCSLREYFLKTDVGMHRDVVAVDKGLTPLSLAKENWRKPVVLETNDRMEVWQSKELHGRFFRALRGPDVDFQASVAWLRYGDLFGETEGFVCAIMDEVMMTNNYRKFIVKDGTVDICRACHRPGESIRHIISGCSRLANGEYLHRHNLVARIIHQQLALKYNLVESEVPYYRYMPDPVLENGHITLYWDRSIITDRTIVANKPDIVMVDRSERRAMIVDITIPHDGNLVKAEKDKQIKYLDLAHEVVDMWEVDSAIIVPIVVTANGLIAKSLDQHLRRLSLGGWIKGLIQKAVLLDTARIVRKFLSLEP

SEQ ID NO: 11871 - protein, 1200 aa, Sesamia nonagrioides
MLTRSATRRARPPSPDSLLGSASSPPVSSATASAVTTPAAAVASSSSDEYFSPPTTPPPARRRGGRRPPDRLGPRGPSASDRVPAPGGSVQRMRWTQSINENVMRSYYGATEGGNNLTAYRVRMLSLFQVLEPAVNVSAQRLSDQVRVIQRNHMLDDVVLDRLRLESRNSHVTPASSLVAVELNSVSPRPNHVDEGDDDRAISVSPQCIEKLRSALEDAFCEYRSTPPELRPRLPRLPMHKKTKALVCALDSQLSNYLKDSKDLNDTHSILYCGAVAICRVAHVKFPDSDRATRPKSAVPAWQCRIERRIGETRALIGKLISFREGNTRPRVMRFVRRAFSGTDTSTRDYLFRVTERIDFFKQKIYAWANRIRRYKRRVERYSQNRNFQSDERRVYRAWERSDQGVTDTCLPDDDATCSFWRNIWSVPVSHTEGSWTRVVERACDPVPEMGAITICPQDVARAVRPLPNWKSPGPDGLHNFWIKWFSGSHARLASQFQTALESGSLPQFLTTGVTHLLHKSGSTAEPKNYRPITCLPTVYKVLTSILKSKINTHIDSNSIMSASQNGCRSGSRGTKELLLIDMAISQQVRRSRKDLSTCWIDYKKAYDSVPHTWLMRVLELYKVDATLRTFLMTCMRTWRTVLRYPGCRNIQRNSEPIRIERGIFQGDSLSPLWFCLAMNPLSTLLEDSGLGYRLRRGGQVISHLLYMDDLKLFAHTDSQLKELLKITETFSSSIRMEFGVDTCAVMHVKRGEIMESVGTQLTSSINLRALSASETYKYLGMSEALGINVTDMKQSLKERFFGRLKKVLNSLLSGGNKVRAFNGWVMPVLMYSFGILKWTQTELDALDRRVRTLLTANRLHHPRSSVMRLYIPRKCGGRGFLNAKTLHNREICSLREYFLTTDVGMHRDVVAVDKGLTPLSLAKENWRKPVVLDTNDRMEVWKSKELHGRFFKALHGPDVDLQASVAWLRFGDLFGETEGFVCAITDEVMMTNNYRRFIVKDGTVDICRACHRPGESIRHIISGCSRLANGEYLHRHNLVARIIHQQLALKYNLVESEVPYYRYTPDPVLENDHITLYWDRSIITDRTIVANKPDIVLVDRSERRAMIVDITIPHDENLVKAEKDKQIKYLDLAHEVVDMWEVDSAIIVPIVVTANGLIAKSLDQHLRRLSLGSWIKGLIQKAVLLDTARIVRKFLSLEP

SEQ ID NO: 11872 - protein, 1201 aa, Sesamia nonagrioides
MLTRSAARKHARPPSPDSLLSSASPPPVSSPTVSAVTTPAAAVASSSSDEYFSPPTTPPPVRRRGGRRPPDRLGPRGPSASDRVPAPGGSVQRMRWTQSINENVMRSYYGATEGGNNLTAYRVRMLSLFQVLEPAVNVSAQRLSDQVRVIQRNHMLDDVVLDRLRLESRNSHVTPASSLVAVQLNSVSPRPNHVDEEDDDRAISVSPQCNEQLRSALEDAFREYHSTPPELRPRLPRLPMHKKNKALVCALDSQLSNYLKDSKDLSDTHSILYCGAVAICRVAHVKFPDSDRATRPKPAVPAWQCRIERRIGETRALIGKIISFREGNTRPRVMRFVRRAFSGTDISTRDYLLRVTERIDFFKQKIYAWANRIRRYRRRVERYSQNRNFQSDERRVYRAWERSDQGVTDTCLPDDDATCSFWRNIWSVPVSHTEGGWTRDVERACDPVPEMGAITICPQDVARAVRPLPNWKSPGPDGLHNFWIKWFSGSHACLASQFQTALESGSLPQFLTTGITHLLHKSGSTAEPKNYRPITCLPTVYKVLTSILKAKINTHIDSNSIMSASQNGCRNGSRGTKELLLIDMAISQQVRRSRKDLSTCWIDYKKAYDSVPHTWLMRVLELYKVDATLRTFLMTCMSQWRTVLRYPGCRNIQMNSEPIRIERGIFQGDSLSPLWFCLALNPLSTLLEDSGLGYRLRRGGQVISHLLYMDDLKLFAHTNSQLKELLKITETFSSAIRMEFGVDKCAVMHVQRGKIVESVGTQLTGSINLRSLSASETYKYLGMSEALGINITDMKQSLKERFFGRLKKVLNSLLSGGNKVRAFNGWVMPVLMYSFGILKWTQTELDALDQRVRTLLTANRLHHPRSSVMRLYIPRKCGGRGFLNAKTLHNREICSLREYFLKTDVGMHRDVVAVDKGLTPLSLGKENWRKPVVLETNDRMEVWQSKELHGRFFRALRGPDVDFQASVAWLRCGDLFGETEGFVCAIMDEVMMTNNYRRFIVKDGTVDICRACHRPGESIRHIISGCSRLANGEYLHRHNLVARIIHQQLALKYNLVESEVPYYRYMPDPVLENGHITLYWDRSIITDRTIVANKPDIVMVDRSERRAMIVDITIPHDENLVKAEKDKQIKYLDLAHEVVDMWEVDSAIIVPIVVTANGLIAKSLDQHLRRLSLGGWIKGLIQKAVLLDTARIVRKFLSLEP

SEQ ID NO: 11873 - protein, 911 aa, Sesamia nonagrioides
MTATRPKSAVPAWQYRIERRIGETRALIGKLVSFREGNTRPRVMRFVRRAFSGTDTSTRDYLFRVTERIDFFKQKIYAWANRIRRYKRRVERYSQNRNFQSDERRVYRAWERSDQGVTDTYLPDDDAMCSFWRNIWSVPVSHTEGSWTRVVERACDPVPEMGAITICPQDVAHAVRPLPNWKSPGPDGLHNFWIKWFTRSHARLASQFQTALESGSLPQFLTTGVTHLLHKSGSTADPKNYRPITCLPTVYKVLTSILKSKINTHIDSNSIMSASQNGCRSGSRGTKELLLIDMAISQQVRRSRKDLSTCWIDYKKAYDSVPHTWLMRVLELYKVDATLRTLLMTCMRTWRTVLRYPGCRNIQRNSEPIRIERGIFQGDSLSPLWFCLALNPLSTLLEDSGLGYRLRRGGQVISHLLYMDDLKLFAHTDSQLKELLKITETFSSSIRMEFGVDKCAVMHVKRGEIMEPVGTQLTSSINLRALSASETYKYLGMSEALGINVTDMKQSLKERFFGRLKKVLNSLLSGSNKVRAFNSWVMPVLMYSFGILKWTQTELDALDQRVRTLLTANRLHHPRSSVMRLYIPRKCEGRGFLNAKTLHNREICSLREYFLETDVGMHRDVVAVDKGLTPFSLAKENWRKPVVLDTNDRMEVWKSKELHGRFFRALHGPDVDLQASVAWLRFGDLFGETEGFVCAIMDEVMMTNNYRRFIVKDGTVDICRACHRPGESIRHIISGCSRLANGEYLHRHNLVARIIHQQLALKYNLVESEVPYYRYTPDPVLENDHITLYWDRSIITDRTIVANKPDIVLVDRSERRAMIVDITIPHDENLVKAEKDKQTKYLDLAHEVVDMWNVNSAVIVPIVVSANGLIAKSLDQHLLRLSLGSWIKGQIQKAVLLDTARIVRRFLSLEP

SEQ ID NO: 11874 - protein, 1200 aa, Sesamia nonagrioides
MLTRSAARRARPPSPDSSPSSASPPPVSSPTVNAVMTPAAAVALSSSDEYFSPPTTPPPVRRRGGRRPPDCLGPRGPPASDRAPATGGNVQRMKWTQSINENVMRAYFGATDGGSNLTAYRGRMLSLFQVLEPAVNVSAQRLSDQVRVIQRNHMLDDVVLDRLRLESRNSYVTPASSLVAVQLNSVPSRPNLVDEEDDDEAISVTPQCNEKVRSALEDAFREYRSTPPELRPRLPRLPMHKKNKALVCALDSQLSNYLKDSKDLADTHSILYCGAVAICRVAHVKFPDSDRATRPKPAVPAWQCRIERRIGETRALIGKLMSFREGNTRPRVMRFVRRAFSGTDVSTRDYLLRVTERIDFLKQKIYAWANRIRRYRRRVERYSQNRNFQSDERWVYRAWERSDQGVTDTCLPDDDATRSFWRNIWSVPVSHTEGGWTRDVERACDPVPEMGAITICPQDVARAVRPLPNWKSPGPDGLHNFWIKWFSGSHACLASQFQTALESGSLPQFLTTGITHLLHKSGSTAEPKNYRPITCLPTVYKVLTSILKAKINTHIDSNSIMSASQNGCRNGSRGTKELLLIDMAISQQVRRSRKDLSTCWIDYKKAYDSVPHTWLMRVLELYKVDATLRTFLMTCMSQWRTVLRYPGCRNIQRNSEPIRIERGIFQGDSLSPLWFCLALNPLSTLLEDSGLGYLLRRGGQVISHLLYMDDLKLFAHTNSQLKELLKITETFSSAIRMEFGVDKCVVMHVQRGEIVESVGTQLTGSINLRSLSASETYKYLGMSEALGINVTDMKQSLKERFFGRLKKVLNSLLSGGNKARAFNGWVMPVLMYSFGILKWTQTELDALDQRVRTLLTANRLHHPRSSVMRLYIPRKCGGRGFLNAKTLHNREVCSLREYFLETDVGMHRDVVAADKGLTPLSLAKENWRKPVVLDTNDRLEVWKSKELHGRFFRALHGPDVDFQASVAWLRFGDLFGETEGFVFAIMDEVMMTNNYRRFIVKDGTVDICRACHRPGESIRHIISGCSRLANGEYLHRHNLVARIIHQQLALKYNLVESEVPYYRYMPDPVLENGHITLYWDRSIITDRTIVANKPDIVLVDRSERRAMIVDITIPHDENLVKAEKDKQIKYLDLAHEVVDMWEVDSSIIVPIVVTANGLIAKSLDQHLRRLSLGSWIKGLIQKVVLLDTARIVRKFLSLEP

SEQ ID NO: 11875 - protein, 1197 aa, Sesamia nonagrioides
MLTRSAARRARPPSPDSLLSSASPPPASSATVSAVTTPAAAVASSSSDEYFSPPTTPPPARRRGGRRPPDRLGPRGPSASDRVPAPGGSVQRMRWTQSINENVMRSYYGATEGGNNLTAYRVRMLSLFQVLEPAVNVSAQRLSDQVRVIQRNHMLDDTVLDRLRNEMQSSRIIAHQSQTAEIPPQPTNYADEGSNDRATNVSTQCNEELINALEAAIREYRFTPAELRPRLPRLPMHNRNRALMAALDAQLSDYFDTCEDLTDTHSILYCAAVAACRVAHVKFSSDSRATRPKPVVPAWQHRIERRIGGARALIGKLICFREGNTRPRVMRFVRRAFAGTNISPQNYMARVTERIDFLKQKVYAWANRIRRYKRRVERYTQNRTFQSNERWVYRDWERPEQGVTDTCLPDDDAMCSFWRSIWSVPVSHTEGDWARDVERACDPIPEMGAITICPQDVACAVRPLPNWKSPGPDGLHNFWIKWFPRSHARLASQFQTALVSGSLPQFLTTGITHLLHKSGSTAEPKNYRPITCLPTVYKVLTSILKTKMNKHIDSNSIMSASQNGCKSGSRGTKELLLIDMAISQQVRRSRKDLSTCWIDYRKAYDSVPHTWLMRVLELYKVDATLRTFLMSCMKTWRTVLRYPGCRNIQRNSEPIRIERGIFQGDSLSPLWFCLALNPLSTLLEDSGLGYRLRRGGQVISHLLYMDDLKLFAPNNSQLRELLKITETFSSSIRMEFGVDKCAVMHVKRGEIMESVGTQLTDSINLRALSASETYKYLGMSEALGINVTDMKQSLKERFFGRLKKVLNSLLSGGNKVRAFNGWVMPVLMYSFGILKWTQTELDALDQRVRTLLTSNRLHHPRSSVMRLYIPRKCGGRGFLNAKTLHNREVCSLRDYFLVTDVGMHRDVVAADKGLTPLSLAKENWRKPVVLDTNDRMEVWKSKELHGRFFRALHGPDVDFKASVAWLRFGDLFGETEGFVFAIMDEVMMTNNYRRFIVKDGTVDICRACHRPGESIRHIISGCYRLANGEYLHRHNLVARIIHQQLALKYNLVESEVPYYRYTPDPVLENGYITLYWDRSIITDRTIVANKPDIVMVDRTERRAMIVDITIPHDENLVKAEKDKQIKYLDLAHEVVDMWEVDSAIIVPIVVTANGLIAKSLDQHLRRLSLGSWIKGLIQKAVLLDTARIVRKFLSLEP

SEQ ID NO: 11876 - protein, 1197 aa, Sesamia nonagrioides
MLTRSAARRARPPSPDSLPSSASPPPASSTTVSAVTTPAATVASSSSDEYFSPPTTPPPVRRRGGRRPPDCLGPRGPSASDRVPAPGGSVQRMRWTQSINENVMRSYYGAAEGGNNLTAYRVRMLSLFQVLELAVNVSAQRLSDQVRVIQRNHMLDDTVLDRLRNEMQSSRVITHQSHSAEIPPQPTNYADEESNDRVTNVSTQCNEELRNALEAAIREYRFMSAELRPRLPRLPMHNRNRALMAALDAQLSNYFDTCENLTDTHSILYCAAVAACRVAHVKFSSDSRATRPKPVVPAWQHRIKRRIGGASALIGKLICFREGNTRPRVMRFVRRAFSGTNTSPQNYMARITERIDFLKQKVYAWANRIRRYKRRVERYTQNRIFQSNQRWVYRDWERPEQGVADTCLPDDDAMCSFWRSIWSVPVSHTEGDWARDVERACDPIPEMGAITICPQDVARAVRPLPNWKSPGPDGLHNFWITWFPRSHACLASQFQTALVSGSLPQFLTTGITHLLHKSGSTAEPKNYRSITCLPTVYKVLTSILKAKINNHIDSNSIMSVSQNGCRSGSRGTKELHLIDMAISQQVRRSRKDLSTCWIDYKKAYDSVPHTWLMRVLELYKVDTTLRTFLMTCMGQWRTVLRYPGCRNIQRNSEPIRIERGIFQGDSLSPLWFCLALNPLSTLLEDSGLGYRLRRGGQVISHLLYMDDLKLFAPNNLQLKELLKITETFSSAIRMEFGVDKCAVMHIKRGEIVESVGTQLTSSINLRALSACETYKYLGMSEALGINVTDMKQSLKERFFGRLKKVLNSLLSGGNKVRAFNGWVMPVLMYSFGILKWTQTELDALDQRVRTLLTANRLHHPRSSVMRLYIPRKCGGRGFLNAKTLHNREICSLREYFLETDVGMHRDVVAVDKGLTPLSLAKENWRKPVVLDTNDRMEVWKSKELHGRFFRALHGPDVDLQASVAWLRFGDLFGETEGFVCAIMDEVMMTNNYRRFIVKDGTVDICRACHRPGESIRHIISGCSRLANGEYLHRHNLVARIIHQQLALKYNLVESEVPYYRYMPDPVLENGHITLYWDRSIITDRTIVANKPDIVMVDRSERRAMIVDITIPHDENLVKAEKDKQIKYLDLAHEVVDMWEVDSAIIVPIVVTANGLIAKSLDQHLRRLSLGSWIKGLIQKAVLLDTARIVRKFLSLEP

SEQ ID NO: 11877 - protein, 868 aa, Sesamia nonagrioides
MRFVRRAFSGTNTSPQNYMARVTERIDFLKQKVYAWANRIRRYKRRVERYTQNRTFQSNERRVYRDWERPEQGVTDTCLPDDDAMCSFWRSIWSVPVSHTEGDWARDVERACDPIPEMGAITICPQDVACAVRPLPNWKSPGPDGLHNFWIKWFPRSHARLASQFQTALVSGSLPQFLTTGITHLLHKSGSTAEPKNYRPITCLPTVYKVLTSILKTKINKHIDSNSILSASQNGCRSGSRGTKELLLIDMAISQQVRRSRKDLSTCWIDYKKAYDSVPHTWLMRVLELYKVDATLRTFLMTCMRTWRTVLRYPGCRNIQRNSEPIRIERGIFQGDSLSPLWFCLALNPLSTLLEDSGLGYRLRRGGQVISHLLYMDDLKLFAPNNSQLRELLKITETFSSSIRMEFGVDKCAVMHVKRGEIMESVGTQLTGSINLRALSASETYKYLGMSEALGINVTDMKQSLKERFFGRLKKVLNSLLSGGNKVRAFNGWVMPVLMYSFGILKWTQTELDALDQRVRTLLTANRLHHPRSSVMRLYIPRKCGGRGFLNAKTLHNREVCSLREYFLETDVGMHRDVVAADKGLTPLSLAKENWRKPVVLDTNDRLEVWKSKELHGRFFRALHGPDVDFQASVAWLRFGDLFGETEGFVFAIMDEVMMTNNYRRFIVKDGTVDICRACHRPGESIRHIISGCSRLANGEYLHRHNLVARIIHQQLALKYKLVESEVPYYRYMPDPVLENGHITLYWDRSIITDRTIVANKPDIVLVDRSERRAMIVDITIPHDENLVKAEKDKQIKYLDLAHEVVDMWEVDSAIIVPIVVTANGLIAKSLDQHLRRLSLGSWIKGLIQKAVLLDTARIVRKFLSLEP

SEQ ID NO: 11878 - protein, 975 aa, Apamea monoglypha
MSPELRPRLPRLPMHNKNRALVAVLDAQLSSYFDVCEDLTDTHSILYCAAVAACRVAHVKFVSDSRATRPKPAIPPWQCRIERRIGGARALIGKLICFREGNTRPRVMRFVRRAFSGTDISSQDYLSRVTERIDFLKQKVYAWANRIRRYKRRVERYTQNRTFQSDERWVYRGWERPDQGVADTCLPDDDAMYSFWRSIWSVPVSHTEGDWAREVERACDPIPEMEAITICAQDVARAVRPLPNWKSPGPDGLHNFWVKWLTRSHARLASQFQIALESGSLPQFLTTGVTHLLHKSASTAEPKNYRPITCLPTVYKVLTSILRAKINKHIDTNSIMSASQNGCKNGSRGTKELLLIDMAISQQVRRSRKDLSTCWIDYKKAYDSVPHTWLMRVLELYKVDTTLRTFLMTCMGQWRTVLRYPGCRNIQRNSEPIRIERGIFQGDSLSPLWFCLALNPLSTLLEDSGLGYRLRRGGQVISHLLYMDDLKLFAPNNLQLMELLKITETFSSAIRMEFGVDKCAVMHVKRGEIVESVGTQLSDSTNLRALSASETYKYLGMSEALGINVTDMKQSLKERFFGRLKKVLNSLLSGGNKVRAFNSWVMPVLMYSFGILKWTQTELDALDRRVRTLLTANRLHHPRSSVMRLYIPRKCGGRGFLNAKTLHNREICSLREYFLETDVGMHRDVVAVDKGLTPLSLAKENWRKPVVLDTNDRMEVWQSKELHGRFYRALHGPDVDLLASVAWLRFGDLFGETEGFVCAIMDEVMMTNNYRRFIVKDGTVDICRACHRPGESIRHIISGCSRLANGEYLHRHNLVARIIHQQLALKYNLVESEVPYYRYVPDPVLENGNITLYWDRSIITDRTIVANKPDIVVVDRSERRAMIVDITVPHDENLVKAEKDKQIKYLDLAREVVDMWHVDSAIIVPIVVTANGLIAKSLDQHLRRLSLGSWIKGLIQKAVLLDTARIVRRFLSLEP

SEQ ID NO: 11879 - protein, 1200 aa, Apamea monoglypha
MMMLTRSAARRARPPPPDSSLSSASPPPVPSLTVSAVTTPAAVVASSSSDEYFSPPTTPPPARRRGGRRPPDGLGPRGPPASDRVPALGGSVQRMRWTQSINENVMRSYYGATEGGNNLTAYRVRMLSLFQVLEPAVNVTAQRLSDQVRVIQRNHMLDDTVLDRLRNEIQSSHVIAPQSQTAAVLPQSNTSHADEGSNDRATNVSIQCNEELRNALEGAIREYRFMSPELRPRLPRLPMHNKNRALVAVLDAQLSSYFDVCEDLTDTHSILYCAAVAACRVAHVKFVSDSRATRPKPAIPPWQCRIERRIGGARALIGKLICFREGNTRPRVMRFVRRAFSGTDISSQDYLSRVTERIDFLKQKVYAWANRIRRYKRRVDRYTQNRTFQSDERWVYRGWERPDQGVADTCLPDDDAMYSFWRSIWSVPVSHTEGDWAREVERACDPIPEMEAITICAQDVARAVRPLPNWKSPGPDGLHNFWVKWLTRSHARLASQFQIALESGSLPQFLTTGVTHLLHKSASTAEPKNYRPITCLPTVYKVLTSILRAKINKHIDTNSIMSASQNGCKNGSRGTKELLLIDMAISQQVRRSRKDLSTCWIDYKKAYDSVPHTWLMRVLELYKVDTTLRTFLMTCMGQWRTVLRYPGCRNIQRNSEPIRIERGIFQGDSLSPLWFCLALNPLSTLLEDSGLGYQLRRGGQVISHLLYMDDLKLFAPNNLQLMELLKITETFSSAIRMEFGVDKCAVMHVKRGEIVESVGTQLSDSTNLRALSASDTYKYLGMSEALGINVTDMKQSLKERFFGRLKKVLNSLLSGGNKVRAFNSWVMPVLMYSFGILKWTQTELDALDRRVRTLLTANRLHHPRSSVMRLYIPRKCGGRGFLNAKTLHNREICSLREYFLETDVGMHRDVVAVDKGLTPLSLAKENWRKPVVLDTNDRMEVWQSKELHGRFYRALHGPDVDLLASVAWLRFGDLFGETEGFVCAIMDEVMMTNNYRRFIVKDGTVDICRACHRPGESIRHIISGCSRLANGEYLHRHNLVARIIHQQLALKYNLVESEVPYYRYVPDPVLENGNITLYWDRSIITDRTIVANKPDIVVVDRSERRAMIVDITVPHDENLVKAEKDKQIKYLDLAREVVDMWHVDSAIIVPIVVTANGLIAKSLDQHLRRLSLGSWIKGLIQKAVLLDTARIVRRFLSLEP

SEQ ID NO: 11880 - protein, 1196 aa, Furcula furcula
MLTRSKARQRSPGSLPRSASQLPGRRSDGSPAAVASSESDEYFSPPTSPPPVCRRRGRPPRDLGRLGQPAPNRVLVPGGVVRRMRWTSTINESVMRAYYEATAGGTNLTAYRNRMLSLFQTLEPAVNVSAQRLSDQVRAIQRGNMLDDAVLDRLRSEVQGSRVAPCIPSSQAVAPVIYTAPAPRLEANSDNDGDDITTNVSTYKITQLRSTLEDVVREYRTMPQNLRPRLPRLPMHKRNRALVCALDSLLLSYFDSSEDLADAHSLLYCAAMTACRVARVKVPNADAATRPRPAVPAWQCRIERRIGEARVLIGKLTCFREGNTRPRVMRFVRRAFSGTGIGPREYLSRVTERIDFLKQKVCAWANRIRRYKARVDRYFQNNMFQRDQRWVYRSWERPSQTEGDVRRPDDDAMTTFWCNIWSVPVTHSEGDWIRDVEQVCEPLPEMGAITIWPQDVADAVRQLPNWKAPGPDGLHNFWLKWIRSSHICLASLFQSALESGSLPEFMTTGITHLLHKNNSTTDPKNYRPITCLPTVYKTLTSILRAKIYRHVEDNSIMSASQNGCRSGARGTKELLLIDMAICQQARRSRKDLSTCWIDYKKAYDSVPHTWLMRVLELYKVNATLRTFLASCMRQWRTVLLYPGSRQTLGNGDPIRIGRGIFQGDSLSPLWFCLALNPLSTLLKSSGLGYRLRRGSQVISHLLYMDDLKLFAPTELQLMGLLKVTETFSNSIRMEFGVDKCAVMHVKRGRLVESRSVQLSDSTDLRTLSATETYKYLGMSQALGINETDMKQSLRERFLGRLRKVLKSLLSGGNRVRAYNGWVMPVLMYSFGILKWTQTELDTLDRTVRTLLTTYRMHHPRSSVMRLYIPRKCGGRGFLNAKTLHNREICNLREYFLHCGGEMHTDVVAVDNGLTPLSLAKGNWRKPVVLTTGDREAVWQSKELHGRFYRALHGPDVDFSASVAWLRFGDLFGETEGFVCAIMDEVVMTNNYRKYILRDGTIDICRACHRPGESLRHIISGCSRLANGEYLHRHNQVARIIHQQLALKYRLVTSEVPYYRYVPEPVLEDGHITLYWDRSIITDRTIVANKPDIVLIDRTERHAMIVDVTVPHDENLVKAEKDKECKYLDLAHEVVDMWDIDRAIIVPIVVSAHGLMAKSLDKHLKRLALDGWIKGQMQKAVLLETARIVRKFLSLEP

SEQ ID NO: 11881 - protein, 1001 aa, Furcula furcula
MTTDVSTNLNTQLRSTLEDVVREYRTMPLNLRPRLPRLPMHKRNRALVCALDSLLSSYFDSSEDLADAHSLLYCAAMTACRVARVKFPSTDAATRPRPAVPAWQFRIECRIGEARVLIGKLNCFREGNTRPRVMRFVRRAFSGTGIDPREYLSRVTERIDFLKQKVCAWANRIRRYKARVDRYSQNNMFQRDQRWVYRSWERSSQIEGDGRRPDDSAMTTFWRNIWSVPVTHSEGDWMRDVERICEPLPEMGAITIRPQDVADAVRPMPNWKAPGPDGLHNFWLKWIRSSHICLASLFQSALESGSLPEFMTMGITHLLHKTSSTTDPKNYRPITCLPTVYKTLTSILRAKIYRHVEDNSIMSASQNGCRSGARGTKELLLIDMAICQQARRNRKDLSTCWIDYKKAYDSVPHTWLMRVLELYKVNPTLRTFLASCMRQWRTVLLYPGSRQILGNGDPIRIERGIFQGDSLSPLWFCLALNPLSTLLRGSGLGCRLRRGGQVISHLLYMDDLKLFAPTELQLMGLLKVTETFSNSISMEFGVDKCAVMHVKRGTMVESRSVQLLDTTDLRTLSATETYKYLGMSQALGINETDMKQSLRERFLGRLRKVLKSLLSGGNRVRAYNGWVMPVLMYSFGILKWTQTELDTLDRTVRTLLTTYRMHHPRSSVMRLYIPRKCGGRGFLNAKTLHNREICNLREYFLHCGGVMHTDVVAVDNGLTPLSLAKGNWRKPVVLTTGNREAVWQSKELHGRFYRALHGPDVDFSASVAWLRFGDLFGETEGFVCAIMDEVVMTNNYRKYILRDGTIDICRACHRPGESLRHIISGCSRLANGEYLHRHNQVARIIHQQLALKYRLVMSEVPYYRYVPEPVLEDGHITLYWDRSIITDRTIVANKPDIVLIDRNERRAMIVDVTVPHDENLVKAEKDKECKYLDLAHEVVDMWDIDRAIIVPIVVSAHGLMAKSLDKHLKRLTLGGWIKGQMQKAVLLETARIVRRFLSLEP

SEQ ID NO: 11882 - protein, 1196 aa, Furcula furcula
MLTRHKARLRPPDSSPRSASQPLAPSTGGPPAAVASSESDEYFSPPSSPPPVCRRRGRPPRDLGLLGQPAPNRVLVPGGVVRRMKWTLSINENVMRAYYEATEGGTNLTAYRDRMLSLFQTLEPAVNVSAQRLSDQVRAIQRGHMLDDAVLDRLRSEVQGSRVVPCIPSSQAVAPAVNTAPAPRLAATSGDDRDDMSTNISTNVSTQLRSTLEDVVREYRTMPQGLRPRLPRLPMHKRNRALVCALDSLLSSYFDSSEDLADAHSLLYCAAMTACRVARVKFPNSDAATRPRPAVPAWQCRIERRIGEARVLIGKLTCFREGNTRPRVMRFVRRAFSGTGIDPREYFSCVTERIDFLKQKVCAWANRIRRYRARVDRYSQNNMFQRDQRWVYRSWERPSQIGGEVQRPDDDAMIRFWRNIWSVPVTHSEGDWIRDVEQVCEPIPEMGAITIRPQDVADAVRPLPNWKAPGPDGLHNFWLKWLRSSHACLTSLFQSAVESGSLPEFLTTGITHLLHKTNSTADPKNYRPITCLPTVYKTLTSILRAKIYRHVEGNSIMSASQNGCRSGARGTKELLLIDMAICQQARRNRRDLSTCWIDYKKAYDSVPHTWLVRVLELYKVNTTLRTFLASCMRQWRTVLLYPGSRQTLGDGEPIRIERGIFQGDSLSPLWFCLALNPLSTLLKSSGLGYRLRRGGQVISHLLYMDDLKLFAPTEVQLMGLLKVTETFSSSIRMEFGVDKCAVMHVKRGRLVESRSIQLSDSTDLRTLSATETYKYLGMSQALGINETDMKQSLRERFLGRLRKVLKSLLSGGNRVRAYNGWVMPVLMYSFGILKWTQTELDTLDRTVRTLLTAYRMHHPRSSVMRLYIPRKCGGRGFLNAKTLHNREIYNLREYFLHCGGEMHTDVVAVDSGLTPLSLAKGNWRRPVVLTTGDREAVWQSKELHGRFYRALHGPDVDFSASVAWLRFGDLFGETEGSVCAIMDEVVMTNNYRKYILRDGTIDICRACHRPGESLRHIISGCSRLANGEYLHRHNQVARIIHQQLALKYRLVTSEVPYYRYVPEPVLEDGHITLYWDRSIITDRSIVANRPDIVLIDRTERRAMIVDVTVPHDENLVKAEKDKECKYLDLAHEVVDLWDIDKAIIVPIVVSAHGLMAKSLDKHLKRLTLDGWIKGQMQKAVLLETARIVRKFLSLEP

SEQ ID NO: 11883 - protein, 1111 aa, Spodoptera exigua
MRWTQSINENVMRAYYGATEGGNNLTAYRVRMLSLFQVLEPAINVSAQRLSDQVRVIQRNHMLDDTVLDRLRTEMGSCAGASSSRTVAPAMMPPSNRGIVSTAADEESTDTVTHVSTQCSDELRSALECAIREYRYMSPETRPRLPRLPMHNKNRVLVAALDSQLSNHFDDCEDLSDTHSMMYCAAVAACRVAHVKFPTSDVATRLKPAVPAWQRRIERRIAGARALIGKLICFREGNTRPRVMRFVRRAFSGTDISPQDYMSRVTERIDFLKQKVYAWANRIRRYKRRVERYTQNRTFRSNERWVYRAWERPDQGVTDTRLPDDDAMCSFWRSIWSVPVSHTEGDWIRQVERACDPIPQMGAINISPQDVARAVRPLPNWKSPGPDGLHNFWIKWFTRSHARLASQFQSALDSGSLPQFLTTGVTHLLHKSGSTTEPKNYRPITCLPTVYKVLTSILRSKINSHIDKNNIMSTAQNGCKSGSRGTKELLLIDMAISQQVRRSRKDLSTCWIDYKKAYDSIPHTWLMRVLELYKIDTILRTFLMSCMRQWSTVLRYPGCRHTQRNSEPVRIERGIFQGDSLSPLWFCLALNPLSTLLENSGLGYRLKRGGQVISHLLYMDDLKLFAPNKLQLMELHKLTEIFSSAIRMEFGVDKCAVMHVKRGEIVESVGTQLTDSINLRSLSPTETYKYLGMSEALGINVTDMKQSLRERFFGRLKKVLNSFLSGGNKVRAFNGWVMPVLMYSFGVLKWSQTELDALDRRVRTMLTAYRMHHPRSSVMRLYIPRKCGGRGFLNAKTLHNLEVCSLREYFLAADVGMHRDVVAVDKGLTPLSLAKENWRKPVVLDTNARREVWQSKELHGRFFRALHGPDVDQLASVAWLRFGDLFGETEGFVCAIMDEVIMTNNYRRFIVKDGTADICRACHRPGESIRHIISGCSRLANGEYLHRHNLVARIIHQQLALKYSLVESEVPYYRYEPDPVLDNGHITLYWDRSIITDRTIVANKPDIVVVDRKERRAMIVDIAVPHDENLVKAEKDKLIKYIDLAREVVDMWEVDSAIIVPIVVSANGLIAKSLDQHLRRLSLGGWIKGLIQKVVLLDTARIVRRFLSLEP

SEQ ID NO: 11884 - protein, 1202 aa, Spodoptera exigua
MLTRAAARRARPPPPASSLSSASPPPGSSLIVSEVTPAAAAASSSSDEYYSPPTTPPPTRRRGGRRPPAGLGPRGPSASDRVPAADGSVQRMRWTQSINENVMRAYYGATEGGNNLTAYRVRMLSLFQVLEPAVNVSAQRLSDQVRVIQRNRMLDDTVLDRLRTEMGSRASASSSRTVVPAMVPPSNHGIVGTAADEESTDTAAYVSTQCSNEMRSALECAIREYRYMSPELRPRLPRLPMHNKNKALVAALDSQLSNHFDDCEDLGDIHSMMYCAAVAACRVAHVKLPTSNVATRPKLAVPAWQRRIELRIAGARALIGKLICFREGNTRPRVMRFVRRAFSGTDISPQDYMSRITERIDFLKQKVYAWANRIRRYKRRVQRYTQNRTFRSNERWVYRAWERPDQGVTDTRLPDDDAMCSFWRSIWSVPVSHTEGDWIREVERACDPIPQMGAINISPQDVARAVRPLPNWKSPGPDGLHNFWIKWFTRSHARLASQFQAALESGSLPQFLTTGVTHLLHKSGSTTEPKNYRPITCLPTVYKALTSILRSKINSHIDKNNIMSTAQNGCKSGSRGTKELLLIDMTISQQVRRSRKDLSTCWIDYKKAYDSVPHTWLMRVLELYKIDTKLRTFLMSCMRQWSTVLRYPGCRHIQTNSETVRIERGIFQGDSLSPLWFCLALNPLSTLLENSGLGYRLKRGGQVISHLLYMDDLKLFAPNRLQLMELLKLTETFSSAIRMEFGVDKCAVMHVKRGEIVESVGTQLTDSINLRSLSTTETYKYLGMSEALGINVTDMKQSLKERFFGRLKKVFNSFLSGGNKVRAFNDWVMPVLMYSFGVLKWSQTELDALDRRVRTMLTAYRMHHPRSSVMRLYIPRKCGGRGFLNAKTLHNREVCSLREYFLAADVGMHRDVVAVDKGLTPLSLASENWRKPVVLDTNARREVWQSKELHGRFFRALHGPDVDQLASVSWLRSGDLFGETEGFVCAIMDEVIMTNNYRRFIVKDGTADICRACHRPGESIRHIISGCSRLANGEYLHRHNLVARIIHQQLALKYSLVGSEVPYYRYEPDPVLENGHITLYWDRSIITDRTIVANKPDIVVVDRNERRAMIVDIAVPHDENLVKAEKDKLIKYIDLAREVVDMWDVDSAVIVPIVVSANGLIAKSLDQHLKRLSLGGWIKGLIQKVVLLDTARIVRRFLSLEP

SEQ ID NO: 11885 - protein, 1200 aa, Arctia plantaginis
MMTRARSKAQLTSPDSSLRSVLPSTETTTEAPAVAEASSSTSSDEFFSPPTSPTPVRRQGRGRPPICLGSRGPLTSNRVPATGGNVRRMKWTNSINENVMRAYYRATEMGTNLTAYRVRLVSLFQELEPAVNVSAQRLSDQVRAIQRCHLLDDAVLERIRSDLRNSLIIPSSSHTVDLVANSTPQLVSHTNDVDELVEGEVISVSTQYNDRIRSALEDAILEYRYVNWNNRPRLSRLPIHKRNLALVGALDSLLPDYLDNSEDLGDTHSILYCAAVAVCRVAGVNIVENVTTTRPKSTVPAWQCRIERRIAETRVLIGKLISFRSGNTRPRVMRFVKQAFLGTTIGPQQYMSCVTERIDFLKQKIYAWANRLRRYKKRIDRYNQNRMFQRNEKWVYRKWEEPDPCVSHGHLPDENVTHTFWRNIWSVPVTHIEGDWLRDVRRSCESITPMEPVIIDKDDVSCAVRSLPNWKSPGLDGLHNFWLKWFRSSHACLASQFQAALDSGSLPQFLTTGITHLLYKSGSVMDPKNFRPITCLPTMYKLLTSILRLKITLHINNNSIMSVSQNGCRSGSRGTKDLLIIDRAISQQVRRNRKSLATCWIDYKKAYDSVPHTWLLRVLELYKIDTTLCTFLKSCMGQWRTALRYPGYRQTTVIDAPIKIERGIFQGDSLSPLWFCLALNPLSTLLEGSGLGYRLQKDDQVISHLLYMDDLKLLAPTKLQLSALLKVTENFSNSIKMEFGVDKCAVMYVKKGEIVESEGIELSDSTKLRSLSATETYKYLGISQSLGIPESDMKQTLQERFFGRLKKVLKSLLSGGNKVRACNGWVMPILMYSFGILKWTQTELDALDRRVRTLLTAFRMHHPRSSVMRLYIPRKLGGRGLLNIKTLHNREICNLREYFLHTDVGMHRNVVAVDIGFTPLALAKENWRKPVVFSTNDRREVWKGKELHGRFYRALNGSDIDFKASTTWLRYGDLFGETEGFVCAIMDEVIMTNNYRKYILKDGTVDICRACHRPGESIRHIISGCSRLANGEYLHRHNQVARIVHQQLALKYHLVNLEVPYYRYVPDPVLENGRATLYWDRSIITDRTIVANKPDIVVIDRLERRAMIVDIAVPHDENLVKVEKEKQIKYLDLSHEIVDMWNVDSVIIVPIVVSAHGLIAKSLDQHLKRLTLDGWIKGLIQKAVLLDTARIVRRFLSLQS

SEQ ID NO: 11886 - protein, 1200 aa, Arctia plantaginis
MITRARSKAQLTSPDSSLRSVLPSTETTTEAPAVAEASSSTSSDEFFSPPTSPTPVRRQGRGRPPICLGSRGPLTSNRVPATGGNVRRMKWTNSINENVMRAYYRATEMGTNLTAYRVRLVFLFQELEPAVNVSAQRLSDQVRAIQRCHLLDDAVLERIRSDIRNSLIIPSSSHTVDLVATSTPQLVSHTNDVDELVEGEVISVSTQYNDRIRSALVDAILEYRYVNWNNRPRLSRLPIHKRNLALVGALDSLLPDYLDNSEDLGDTHSILYCAAVAVCRVAGVNIVENVTTTRPKSTVPAWQCRIERRIAETRVLIGKLISFRSGNTRPRVMRFVKQAFLGTTIGPQQYMSCVTERIDFLKQKIYAWANRIRRYKKRIDRYNQNRMFQRNEKWVYRKWEEPDPCVSHGHLPDENVTHTFWRNIWSVPVTHIEGDWLRDVRRSCESITPMEPVIIDKDDVSCAVRSLPNWKSPGLDGLHNFWLKWFRSSHACLASQFQAALNSGSLPQFLTTGITHLLYKSGSVMDPKNFRPITCLPTMYKLLTSILRLKITLHINNNSIMSVSQNGCRSGSRGTKDLLIIDRAISQQVRRNRKSLATCWIDYKKAYDSVPHTWLLRVLELYKIDTTLCTFLKSCMGQWRTALRYPGCRQTTVIDAPIKIERGIFQGDSLSPLWFCLALNPLSTLLEGSGLGYRLQKDDQVISHLLYMDDLKLLAPTKLQLSALLKVTENFSNSIKMEFGVDKCAVMYVKKGEIVESEGIELSDSTKLRSLSATETYKYLGISQSLGIPESDMKQTLQERFFARLKKVLKSLLSGGNKVRACNGWVMPILMYSFGILKWTQTELDALDRRVRTLLTAFRMHHPRSSVMRLYIPRKLGGRGLLNIKTLHNQEICNLREYFLHTDVGMHRNVVAVDIGFTPLALAKENWRKPVVFSTNDRREVWKGKELHGRFYRALNGSDIDFKASTTWLRYGDLFGETEGFVCAIMDEVIMTNNYRKYILKDGTVDICRACHRPGESIRHIISGCSRLANGEYLHRHNQVARIVHQQLALKYHLVNLEVPYYRYVPDPVLENGRATLYWDRSIITDRTIVANKPDIVVIDRLERRAIIVDIAVPHDENLVKVEKEKQIKYLDLSHEIVDMWNVDSVIIVPIVVSAHGLIAKSLDQHLKRLTLDGWIKGLIQKAVLLDTARIVRRFLSLQS

SEQ ID NO: 11887 - protein, 1197 aa, Mamestra configurata
MLTRSRARHLATHPSPSASSLSSASPPPEPSPTVSAVTPAVAVASSSSDEYFSPPTTPPPARRRRGRRPPDGLGPRGPPASDRVPAPGGSVQRMRWTQSINENVMRSYFGATEGGTNLTAYRGRMLSLFQVLEPAVNVSAQRLSDQVRVIQRNRMLDDSVLDRLRMEMCGHVITPPSQTVAPPQSQISSHADEESNDRVTNVSTQCNEELRSALECAIREYRYVPPELRPRLPRLPMHNKNRALVAALDSQLSNYFDDCEDLTDTHSIMYCAAVAACRVAHVKITNDRVTRPKPAVPAWQCRIERRIGGARALIGKLICFREGNTRPRVMRFVRRAFSGTDISPRDYMSRVTERIDFLKQKVYAWANRIRRYRRRVERYTQNRTFRSNERWVYRVWEQPDQGVTDTRLPDDDAMCSFWRNIWSVPVSHTEGDWIREVERACDPLPEMGAITISPQDVARAVRPLPNWKSPGPDGLHNFWIKWLQRSHARLASQYQTALESGSLPEFLTTGVTHLLHKSGSTAEPKNYRPITCLPTVYKVLTSILRAKINNHINSNNIMSVSQNGCRNGSRGTKELLLIDMAISQQVRRSRKDLSTCWIDYKKAYDSVPHTWLMRVLELYKIDTMLRTFLMSCMGQWRTVLRYPGCRNIQRNSEPVRIERGIFQGDSLSPLWFCLALNPLSTLLENSGLGYRLKRGGQVISHLLYMDDLKLFAPSNLQLMELLKVTETFSSAIRMEFGVDKCAVMHVKRGEIMESVGTQLSDSINLRSLSSTETYKYLGMSEALGINVTDMKQSLKERFFGRLKKVFNSLLSGGNKVRAFNGWVMPVLMHSFGVLKWTQTELDALDRRVRTLLTAYRMHHPRSSVMRLYIPRKCGGRGFLNAKTLHNREICSLREYFLAVDVGMHRDVVAVDKGLTPLSLANENWRKPAVLDTNDRRAVWQSKELHGRYFRALHGPDVDQLASVAWLRFGDLFGETEGFVCAIMDEVIMTNNYRRFIVKDGTVDICRACHRPGESIRHIVSGCSRLANGEYLHRHNLVARIIHQQLALKYSLVESEVPYYRYAPDPVLDNGNITLYWDRSIITDRTIVANKPDIVVVDRIERRAMIVDITVPHDENLVKAEKDKQIKYIDLAREVVDMWDVDSAIIVPIVVSANGLIATSLDQHLRRLSLGSWIKGLIQKAVLLDTARIVRRFLSLEP

SEQ ID NO: 11888 - protein, 1208 aa, Amphipyra berbera
MLTRSRTKTQDTRTRPRPSASSLSSASQPPDSSIVSDVTPAAAVASSSSDEFYSPPTSPPPPSRRGRRGRGRPPACMGPRGPPASDRVPAPGGSVQRMRWTLTMNENCMRAYFGATEGGTNLTAYRGRMLSLFQVLEPTVNVSAQRLSDQVRVIQRDHRLTDAALDRLRSEVQSNRIISLQSQTAAQPQTPTVVPPLPIHSDEESDDRVTNVSTQCNEQLRSALELAIREYRFTPPNIRPRIPRLPMHRKNRALMCALDSLLSSYFDNSENLEDTHSILYCAAVAACRVAHAKFDNNDRATRPKPAVPAWQCRIERRINEARALIGKLICFREGNTRPRVMRFVRRAFSGTDINPRDYLSRVTERIDFLKQKVYAWANRIRRYKRRVERYTQNRMFHSDERWVYRTWERPDHDVSDTHLPDNDVMNTFWRNIWSMPVTHAEGDWMQEVQRACELIEEMGDITIVPQDVTSAVRPMANWKSPGPDGLHNFWLKWLRSSHARLASQFQSSLESGSLPEFLTTGVTHLLHKSGSTAEPKNYRPITCLPTVYKLLTSILRAKINSHIINNSIMSVSQNGCKNGSRGTKELLLIDMAISQQVRRSRKDLSTCWIDYKKAYDSVPHTWLMRVLELYKVNTTLCAFLTSCMGQWRTVLHYPGCRQIQGRGEPIRIERGIFQGDSLSPLWFCLALNPLSTLLEGSGLGYRLRRGGQVISHLLYMDDLKLFAPNNLQLMKLLKVTETFSNSIRMEFGVDKCAVMHVKRGGIMESVGTQLSDSIHLRPLSSTETYKYLGMSEALGINETDMKQSLRERFYGRLKKVLKSLLSGGNKVRAFNGWVMPVLMYSFGILKWTQTELDALDRRVRTLLTAYRMHHPRSSVMRLYIPRKCGGRGFLNAKTLHNREVCSLREYFLQADVGMHRDVVAVDKGFTPLSLAKENWRKPVVLDTNGRREVWQSKELHGRFYRALYGTDVDFLASVAWLRFGDLFGETEGFVCAIMDEVMMTNNYRKYIVKDGTVDICRACHCPGESIRHIISGCSRLANGEYLHRHNLVARIIHQQLALKYNLVDAEVPYYKYVPDPVLENGHITLYWDRSIITDRTIVANKPDIVVIDRSERLTMIVDITVPHDENLVKAEKDKEIKYQDLAHEVVDMWEVDSAVIVPIVVTANGLIAKSLDQHLTRLALGSWVKGLIQKAVLLDTARIVRKFLSLRP

SEQ ID NO: 11889 - protein, 1205 aa, Amphipyra berbera
MLTRSRAKALTETTRPRSSAPSLSSASQPPDSSIVSDVTPAAAVASSSSDEYFSPPTSPPPARRRGRGRPPDSLRPRGPLASDRVPAAGGSVQRMRWTPTMNENCMRAYFGATEGGTNLTAYRGRMLSLFQVLEPTVNVSAQRLSDQVRVIQRDHRLTDAALDRLRSEVQSNAIISLQSQTAAQPRTPTVVPPLPTHANEESDDRVTNVSTQCNEQLRSALELAIREYRFTPPNIRPRIPRLPMHRKNRALMCALDSLLSSYFDNSENLEDTHSILYCAAVAACRVAHAKFDNNDKATRPKPAVPAWQCRIERRINEARALIGKLICFREGNTRPRVMRFVRRAFSGTDINPRDYMSRVTERIDFLKQKVYAWANRIRRYKRRVERYTQNRMFHSDERWLYRTWERPDHDVNDAHPPDSDVMNTFWRNIWSMPVTHTEGDWMQEVQRACEPIKEMGDITIVPQDVTSAVRPMANWKSPGPDGLHNFWIKWLRSSHARLASQFQSSLESGSLPEFLTTGVTHLLHKSGSTAEPKNYRPITCLPTVYKLLTSILRAKINSHILYNSIMSVSQNGCKNGSRGTKELLLIDIAISQQVRRSRKDLSTCWIDYKKAYDSVPHTWLMRVLELYKVNTTLCAFLTSCMGQWRTVLHYPGCRQIQGRGEPIRIERGIFQGDSLSPLWFCLALNPLSTLLEGSGLGYRLRRGGQVISHLLYMDDLKLFAPNNLQLMKLLKVTETFSNSIRMEFGVDKCAVMHVKRGGIMESVGTQLSDSIHLRSLPSTETYKYLGMSEALGINETDMKQSLRERFYGRLKKVLKSLLSGGNKVRAFNGWVMPVLMYSFGILKWTQTELDALDRRVRTLLTAYRMHHPRSSVMRLYIPRKCGGRGFLNAKTLHNREVCSLREYFLQADVGMHRDVVAVDKGFTPLSLAKENWRKPVVLDTNGRREVWQSKELHGRFYRALHGPDVDFLASVAWLRFGDLFGETEGFVCAIMDEVMMTNNYRKYIVKDGTVDICRACHCPGESIRHIISGCSRLANGEYLHRHNLVARIIHQQLALKYNLVDAEVPYYKYVPDPVLENGHITLYWDRSIITDRTIVANKPDIVVIDRSERLAMIVDITVPHDENLVKAEKDKEIKYQDLAHEVVDMWEVDSAVIVPIVVTANGLIAKSLDQHLTRLALGSWIKGLIQKAVLLDTARIVRKFLSLRP

SEQ ID NO: 11890 - protein, 1203 aa, Amphipyra berbera
MLTRARARKQTAHPRSPDSSLSSASQPPESSPPVSAVTPAAAVASSSSDEYYSPPSSPPPVRRRGGARPPACLGPRGQPATNRVPAAGGNVSRMRWTQSINENVMRAYYGATEGGINLTAYRERMLFLFQVLEPAINVSAQRLSDQVRVVQRNRRLDDTVLERLRSEARNSQTVTFPVQAAVQMQPIAVPPRPIHVDGEGDGEAINVSNQCSEELRSALDDAILEFRTTPPEIRPRLPRLPMHGKNRALMCALDSLLSNYFDGSEDLADTHSILYCAAIAACRVAHVKFTENERATRPKPAVPAWQSRIERRIGGARVLIGKLICFREGNNRPRVMRFVRRAFSGTDISPRDYMSRVTERIDFLKQKVYAWANRIRRYKRRVERYTQNRIFQSDQRRVYRAWERPDPGGGDVRLPDDDALSSFWRSIWSVPIAHTEDGWMRDIEQACEPIAEMEPITITPQDVADAARPLPNWKSPGPDGLHNFWLKWLRSSHARLASQLQSSLESGSLPQFLTTGVTHLLYKSGSTAEPKNYRPITCLPTVYKLLTSILRVKITTHIDNNCIMSASQNGCRKGSRGTKELLLIDMAISQQVRRSQKDLSTCWIDYKKAYDSVPHSWLMRVLELYKINTTLRTFLMSCMRHWRTVLRYPGCRRIRGSGEQIRIERGIFQGDSLSPLWFCLALNPLSTLLEGTGLGYQLRRGGQVISHLLYMDDLKLFAPTDLQLMELLKVTENFSNSIRMEFGVDKCAVMHVKRGRIAESEGIQLPNSVQLRSLSPTETYKYLGMSEALGISETDMRQSLRERFFGRLNKLLKSLLSGGNKVRAFNGWVMPVLMYSFGTLKWTQADLDALDRRVRALLTAHRMHHPRSSVMRLYIPRKCGGRGFLNVKTLHNREVYSLREYFLQAEGVMHRDVVAVDKGFTPLALARENWRKPAVLSTNDREVVWQSKELHGRYYRALHGPDVDFSASVSWLRSGNLFGETEGFVCAIMDEVMMTNNYRKYIVKDGTVDICRACHRPGESIRHIVSGCSRLANGEYLHRHNLVARIIHQQLALKYNLVESEVPYYRYVPDPVLENGHATLYWDRSIITDRTIVANKPDIVVIDRSERRTMIVDITVPHDENLVKAEKDKQIKYLDLAHEVVGMWDVDSAVIVPIVVTANGIIAKSLDIHLMRLSLGGWIKGLIQRAVLLDTARIVRRFLSLEP

SEQ ID NO: 11891 - protein, 1205 aa, Amphipyra berbera
MLTRSRSKLQDPKTRPRPSASSLSSASQPPDSSIVSDVTPAAAVASSSSDEYFSPPSSPPPPRRRGRGRPPACMGPRGPPASDRVPAPGGSVQRMRWTQSMNENCMRAYFGATEGGTNLTAYRGRMLSLFQVLEPAANVSAQRLSDQVRVIQRDHRLTDAALDRLRSEVQSNRIISPQSQTAAQPQAPTVVLPPPIHADEESDDRVTNVSTQCNERLRSALELAIQEYRFAPPNLRPRIPRLPMNKKNRALMCALDSLLSSYFDNSESLEDTHSILYCAAVAACRVAHAKFDNNDRATRPKPAVPAWQCRIERRINEARALIGKLICFREGNTRPRVMRFVRRAFSGTDINPRDYLSRVTERIDFLKQKVYAWANRIRRYKRRVERYTQNRMFHSDERWVYRTWERPDHDVSDTHLPDNDVMNTFWRNIWSMPVTHIEGDWMQEVQRACEPIEEMGDITIVPQDVTSAVRPMANWKSPGPDGLHNFWLKWLRSSHARLASQFQSSLESGSFPEFLTTGVTHLLHKSGSTAEPKNYRPITCLPTVYKLLTSILRAKINSHIINNSIMSVSQNGCKNGSRGTKELLLIDMAISQQVRRSRKDLSTCWIDYKKAYDSVPHTWLMRVLELYKVNTTLCAFLTSCMGQWRTVLHYPGCRQIQGRGEPIRIERGIFQGDSLSPLWFCLALNPLSTLLEGSGLGYRLRRGGQVISHLLYMDDLKLFAPNNLQLVKLLKVTETFSNSIRMEFGVDKCAVMHVKRGGIMESVGTQLSDSIHLRSLSSTETYKYLGMSEALGINETDMKQSLRERFYGRLKKVLKSLLSGGNKVRAFNGWVMPVLMYSFGILKWTQTELDALDRRVRTLLTAYRMHHPRSSVMRLYIPRKCGGRGFLNAKTLHNREVCSLREYFLQADVGMHRDVVAVDKGFTPLSLAKENWRKPVVLDTNGRREVWQSKELHGRFYRALHGPDVDFLASVAWLRFGDLFGETEGFVCAIMDEVMMTNNYRKYIVKDGTVDICRACHCPGESIRHIISGCSRLANGEYLHRHNLVARIIHQQLALKYNLVDAEVPYYKYVPDPVLENGHITLYWDRSIITDRTIVANKPDIVVIDRSERLAMIVDITVPHDENLVKAEKDKEIKYQDLAHEVVDMWEVDSAVIVPIVVTANGLIAKSLDQHLTRLALGGWIKGLIQKAVLLDTARIVRKFLSLRP

SEQ ID NO: 11892 - protein, 1203 aa, Amphipyra berbera
MLTRARARKQTAHPRSPDSSLSSASQPPESSPPVSAVTPAAAVASSSSDEYYSPPSSPPPVRRRGGARPPACLGPRGQPATNRVPAAGGNVSRMRWTQSINENVMRAYYGATEGGINLTAYRERMLFLFQVLEPAINVSAQRLSDQVRVVQRNRRLDDTVLDRLRSEARNSQTVTFPVQAAVQMQPLAVPPRPIHVDGEGDGEAINVSNQCSEELRSALDDAILEFRTTPPEIRPRLPRLPMHGKNRALMCALDSLLSNYFDGSEDLADTHSILYCAAIAACRVAHVKFTENERATLPKPAVPAWQSRIERRIGGARVLIGKLICFREGNNRPRVMRFVRRAFSGTDISPRDYMSRVTERIDFLKQKVYAWANRIRRYKRRVERYTQNRIFQSDQRRVYRAWERPDFGGGDVRLPDDDALSSFWRSIWSVPIAHTEDGWMRDIEQACEPIAEMEPITITPQDVADAARPLPNWKSPGPDGLHNFWLKWLRSSHARLASQFQSSLESGSLPQFLTTGVTHLLYKSGSTAEPKNYRPITCLPTVYKLLTSILRVKITTHIDNNCIMSASQNGCRKGSRGTKELLLIDMAISQQVRRSQKDLSTCWIDYKKAYDSVPHSWLMRVLELYKINTTLRTFLMSCMRHWRTVLRYPGCRRIRGSGEQIRIERGIFQGDSLSPLWFCLALNPLSTLLEGTGLGYQLRRGGQVISHLLYMDDLKLFAPTDLQLMELLKVTENFSNSIRMEFGVDKCAVMHVKRGRIAESEGIQLPNSVQLRSLSPTETYKYLGMSEALGISETDMRQSLRERFFGRLNKLLKSLLSGGNKVRAFNGWVMPVLMYSFGTLKWTQADLDALDRRVRALLTAHRMHHPRSSVMRLYIPRKCGGRGFLNAKTLHNREVYSLREYFLQAEGVMHRDVVAVDKGFTPLALARENWRKPAVLSTNDREVVWQSKELHGRYYRALHGPDVDFSASVSWLRSGNLFGETEGFVCAIMDEVMMTNNYRKYIVKDGTVDICRACHRPGESIRHIVSGCSRLANGEYLHRHNLVARIIHQQLALKYNLVESEVPYYRYVPDPVLENGHATLYWDRSIITDRTIVANKPDIVVIDRSERRTMIVDITVPHDENLVKAEKDKQIKYLDLAHEVVGMWDVDSAVIVPIVVTANGIIAKSLDIHLMRLSLGGWIKGLIQRAVLLDTARIVRRFLSLEP

SEQ ID NO: 11893 - protein, 1205 aa, Amphipyra berbera
MLTRSRAKALTETTRPRSSAPSLSSASQPPDSSIVSDVTPAAAVASSSSDEYFSPPTSPPPARRRGRGRPPDSLRPRGPLASDRVPAAGGSVQRIRWTPTMNENCMRAYFGATEGGTNLTAYRGRMLSLFQVHEPTVNVSAQRLSDQVRVIQRDHRLTDAALDRLRSEVQSNAIFSLQSQTAAQPRTPTVVPPLPTHANEESDDRVTNVSTQCNEQLRSALELAIREYRFTPPNIRPRIPRLPMHRKNRALMCALDSLLSSYFDNSENLEDTHSILYCAAVAACRVAHAKFDNNDKATRPKPAVPAWQCRIERRINEARALIGKLICFREGNTRPRVMRFVRRAFSGTDINPRDYMSRVTERIDFLKQKVYAWANRIRRYKRRVERYTQNRMFHSDERWVYRTWERPDHDVSDAHPPDNDVMNTFWRNIWSMPVTHTEGDWMQEVQRACEPIKEMGDITIFPQDVTSAVRPMANWKSPGPDGLHNFWIKWLRSSHARLASQFQSSLESGSLPEFLTTGVTHLLHKSGSTAEPKNYRPITCLPTVYKLLTSILRAKINSHILYNSIMSVSQNGCKNGSRGTKELLLIDMAISQQVRRSRKDLSTCWIDYKKAYDSVPHTWLMRVLELYKVNTTLCAFLTSCMGQWRTVLHYPGCRQIQGRGEPIRIERGIFQGDSLSPLWFCLALNPLSTLLEGSGLGYRLRRGGQVISHLLYMDDLKLFAPNNLQLMKLLKVTETFSNSIRMEFGVDKCAVMHVKRGGIMESVGTQLSDSIHLRSLSSTETYKYLGMSEALGINETDMKQSLRERFYGRLKKVLKSLLSGGNKVRAFNGWVMPVLMYSFGILKWTQTELDALDRRVRTLLTAYRMHHPRSSVMRLYIPRKCGGRGFLNAKTLHNREVCSLREYFLQADVGMHRDVVAVDKGFTPLSLAKENWRKPVVLDTNGRREVWQSKELHGRFYRALHGPDVDFLASVAWLRFGDLFGETEGFVCAIMDEVMMTNNYRKYIVKDGTVDICRACHCPGESIRHIISGCSRLANGEYLHRHNLVARIIHQQLALKYNLVDAEVPYYKYVPDPVLENGHITLYWDRSIITDRTIVANKPDIVVIDRSERLAMIVDITVPHDENLVKAEKDKEIKYQDLAHEVVDMWEVDSAVIVPIVVTANGLIAKSLDQHLTRLALGSWIKGLIQKAVLLDTARIVRKFLSLRP

SEQ ID NO: 11894 - protein, 1205 aa, Amphipyra berbera
MLTRSRAKALTETTRPRSSAPSLSSASQPPDSSIVSDVTPAAAVASSSSDEYFSPPTSPPPARRRGRGRPPDSLRPRGPLASDRVPAAGGSVQRMRWTPTMNENCMRAYFGATEGGTNLTAYRGRMLSLFQVLEPTVNVSAQRLSDQVRVIQRDHRLTDAALDRLRSEVQSNAIISLQSQTAAQPRTPTVVPPLPTHANEESDDRVTNVSTQCNEQLRSALELAIREYRFTPPNIRPRIPRLPMHRKNRALMCALDSLLSSYFDNSENLEDTHSILYCAAVAACRVAHAKFDNNDKATRPKPAVPAWQCRIERRINEARALIGKLICFREGNTRPRVMRFVRRAFSGTDINPRDYMSRVTERIDFLKQKVYAWANRIRRYKRRVERYTQNRMFHSDERWVYRTWERPDHDVSDAHPPDNDVMNTFWRNIWSMPVTHTEGDWMQEVQRACEPIKEMGDITIVPQDVTSAVRPMANWKSPGPDGLHNFWIKWLRSSHARLASQFQSSLESGSLPEFLTTGVTHLLHKSGSTAEPKNYRPITCLPTVYKLLTSILRAKINSHILYNSIMSVSQNGCKNGSRGTKELLLIDMAISQQVRRSRKDLSTCWIDYKKAYDSVPHTWLMRVLELYKVNTTLCAFLTSCMGQWRTVLHYPGCRQIQGRGEPIRIERGIFQGDSLSPLWFCLALNPLSTLLEGSGLGYRLRRGGQVISHLLYMDDLKLFAPNNLQLMKLLKVTETFSNSIRMEFGVDKCAVMHVKRGGIMESVGTQLSDSIHLRSLSSTETYKYLGMSEALGINETDMKQSLRERFYGRLKKVLKSLLSGGNKVRAFNGWVMPVLMYSFGILKWTQTELDALDRRVRTLLTAYRMHHPRSSVMRLYIPRKCGGRGFLNAKTLHNREVCSLREYFLQADVGMHRDVVAVDKGFTPLSLAKENWRKPVVLDTNGRREVWQSKELHGRFYRALHGPDVDFLASVAWLRFGDLFGETEGFVCAIMDEVMMTNNYRKYIVKDGTVDICRACHCPGESIRHIISGCSRLANGEYLHRHNLVARIIHQQLALKYNLVDAEVPYYKYVPDPVLENGHITLYWDRSIITDRTIVANKPDIVVIDRTERLTMIVDITVPHDENLVKAEKDKEIKYQDLAHEVVDMWEVDSAVIVPIVVTANGLIAKSLDHHLTRLSLGSWVKGLIQKAVLLDTARIVRKFLSLRP

SEQ ID NO: 11895 - protein, 1111 aa, Amphipyra berbera
MRWTLTMNENCMRAYFGATEGGTNLTAYRGRMLSLFQVLEPTVNVSAQRLSDQVRVIQRDHRLTDAALDRLRSEVQSNRIISLQSQTAAQPQTPTVVPPLPIHADEESDDRVTNVSTQCNEQLRSALELAIREYRFTPPNIRPRIPRLPMHRKNRALMCALDSLLSSYFDNSENLEDTHSILYCAAVAACRVAHAKFDNNDRATRPKPAVPAWQCRIERRINEARALIGKLICFREGNTRPRVMRFVRRAFSGTDINPRDYLSRVTERIDFLKQKVYAWANSIRRYKRRVERYTQNRMFHSDERWVYRTWERPDHDVSDTHLPDNDVMNTFWRNIWSMPVTHTEGDWMQEVQRACEPIEEMGDITIVLQDVTSAVRPMANWKSPGPDGLHNFWLKWLRSSHARLASQFQSSLESGSLPEFLTTGVTHLLHKSGSTAEPKNYRPITCLPTVYKLLTSILRAKINSHIINNSIMSVSQNGCKNGSRGTKELLLIDMAISQQVRRSRKDLSTCWIDYKKAYDSVPHTWLMRVLELYKVNTTLCAFLTSCMGQWRTVFHYPGCRQIQGRGEPIRIERGIFQGDSLSPLWFCLALNPLSTLLEGSGLGYRLRRGGQVISHLLYMDDLKLFAPNNLQLMKLLKVTETFSNSIRMEFGVDKCAVMHVKRGGIMESVGTQLSDSIHLRPLSSTETYKYLGMSEALGINETDMKQSLRERFYGRLKKVLKSLLSGGNKVRAFNGWVMPVLMYSFGILKWTQTELDALDRRVRTLLTAYRMHHPRSSVMRLYIPRKCGGRGFLNAKTLHNREVCSLREYFLQADVGMHRDVVAVDKGFTPLSLAKENWRKPVVLDTNGRREVWQSKELHGRFYRALYGPDVDFLASVAWLRFGDLFGETEGFVCAIMDEVMMTNNYRKYIVKDGTVDICRACHCPGESIRHIISGCSRLANGEYLHRHNLVARIIHQQLALKYNLVDAEVPYYKYVPDPVLENGHITLYWDRSIITDRTIVANKPDIVVIDRSERLTMIVDITVPHDENLVKAEKDKEIKYQDLAHEVVDMWEVDSAVIVPIVVTANGLIAKSLDQHLTRLALGSWVKGLIQKAVLLDTARIVRKFLSLRP

SEQ ID NO: 11896 - protein, 868 aa, Noctua janthe
MRFVRRAFSGTDISPRDYMSRVTERIDFLKQKVYAWANRIRRYKRRVDRYTQNRTFQRDERWVFRAWERPDQGVADTRLPDDDAMCSFWRSIWSVPVSHTEGEWTRRVERACDLVPEIGAINISPQDVVRAVRPLPNWKSPWPDGLHNFWIKWFTRSHARLAILFQSALESGSLPEFLTTGITHLLHKSGSTAEPKNYRPITCLPTVYKVLTSILRAKINKHIDDNSVMSASQNGCKNGSRGTKELLLIDMAISQQVRRSRKDLSTCWIDYKKAYDSVPHTWLMRVLELYKIDATLRTFLMSCMGQWRTVLRYPGCRQIQRNSEPIRIERGIFQDDSLSPLWFCLALNPLSTLLEDSGLGYRLRRGGQVISHLLYMDDLKLFAPNDLQLMELLKVTETFSSAIRMEFGVDKCAVMHVKRGEIVESVGTQLSDSINLRSLSATETYKYLGMSEALGINVADMKQSLKERFFGRLKKVFNRLLLGGNKVRAFNGWVMPVLMYSFGILKWTQTELDALDRRVRTLLTAYRMHHPRSSVMRLYIPRRCGGRGFLNAKTLHNREICSLREYFLETDVGMHRDVVAVDKGLTPLSLAKENWRKPVVLDTNDRMEVWQSKELHGRFFRALHGLDVDLSASVAWLRSGDLFGETEGFVCAIMDEVMMTNNYRRFIVKDGTVDICRACHRPGESIRHIISGCSRLANGEYLHRHNLVARIIHQQLALKYNLVESEVPYYKYVPDPVLENGSITLYWDRFIITDRTIVANKPDIVVVDRSERRAMIVDITVPHDENLVKAEKDKQIKYLDLAREVVDMWDVDSAIIVPIVVSAHGLIAKSLDQYLRRLSLGSWIKGLIQKAVLLDTARIVRRFLSLEP

SEQ ID NO: 11897 - protein, 1197 aa, Noctua janthe
MLTRSATRRARLSPPDPSLSSASPPPESSPIVSAVTPAVAVASSSSDEYFSPPTTPPPVRRRGGRRPPDGLGPRGPPASDRVPAPGGSVPRMRWTQSINANVMRAYYGATEGGNNLTAYRVRMLSLFQVLEPAVNVSAQRLSDQVRVIQRNGMLDDTVLDRLRTEMQSSHVIATPAQTVVPPQSTIIPTHDNNVSNDMVTNVSTQCNEEMRCALEGAIREYRFMQPDLRPRVPRLPMHNKNKVLVAVLDSQLSNYFDNCENLTDAHSVLYCAAVAACRVAHVKFSDDRATRPKPAVPSWQYRIERRIGEARALIGKLICFREGNTRPRVMRFVRRAFSGTDISARDYMSRVTERIDFLKPKVYAWANRIRRYKRRVDRYTQNRTFQRDERWVYRAWERPDQGVADTHLPDDDAMCSFWRSIWSVPVSHTEGEWTREVERACDLVPEMGAITISPQDVVRAVRPLPNWKSPGPDGLHNFWIKWFTRSHARLAILFQSALESGSLPEFLTTGITHLLHKSGSTAEPKNYRPIACLPTVYKVLTSILRAKINKHIDDNSVMSASQNGCRNGSRGTKELLLIDMAISQQVRRSRRDLSTCWIDYKKAYDSVPHTWLMRVLELYKVDSTLRIFLMSCMGQWRTVLCYPGCRQIQRNSEPIRIERGIFQGDSLSPLWFCLALNPLSTLLEDSGLGYRLRRGGQVISHLLYMDDLKLFAPNDLQLMELLKVTETFSSAIRMEFGVDKCAVMHVKRGEIVESVGTQLSDSINLRSLSATETYKYLGMSEALGINVADMKQSLKERFFGRLKKVFNSLLSGGNKVRAFNGWVMPVLMYSFGILKWTQTELDALDRRVRTLLTTYRMHHPRSSVMRLYIPRRCGGRGFLNAKTLHNREIYSLREYFLETDVGMHRDVVAVDKGLTPLSLAKENWRKPVVLDTNDRMEVWQSKELHGRFFRALHGPDVDLPASVAWLRSGDLFGETEGFVCAIMDEVMMTNNYRRFIVKDGTVDICRACHRPGESIRHIISGCSRLANGEYLHRHNLVARIIHQQLALKYNLVESEVPYYKYVPDPVLENGNITLYWDRSIVTDRTIVANKPDIVVVDRSERRAMIVDITVPHDGNLVKAEKDKQIKYLDLAHEVVDMWDVDSAIIVPIVVSAHGLIAKSLDQYLRRLSLGSWIKGLIQKAVLLDTARIVRRFLSLEP

SEQ ID NO: 11898 - protein, 1197 aa, Noctua janthe
MLTRSATRRARLSPPDPSLSSASPPPESSPIVSAVTPAVAVASSSSDEYFSPPTTPPPVRRRGGRRPPDGLGPRGPPASDRVPAPGGSVPRMRWTQSINANVMRAYYGATEGGNNLTAYRVRMLSLFQVLEPAVNVSAQRLSDQVRVIQRNGMLDDTVLDRLRTEMQSSHVIATPPQTVVPPQSTIIPTHDNNVSNDMVTNVSTQCNEEMRCALEGAIREYRFMQPDLRPRVPRLPMHNKNKVLVAVLDSQLSNYFDNCENLTDAHSVLYCAAVAACRVAHVKFSDDRATRPKPAVPSWQYRIERRIGEARALIGKLICFREGNTRPRVMRFVRRAFSGTDISARDYMSRVTERIDFLKQKVYAWANRIRRYKRRVDRYTQNRTFQRDERWVYRAWGRPDQGVADTHLPDDDAMCSFWRSIWSVPVSHTEGEWTREVERACDLVPEMGAITISPQDVVRAVRPLPNWKSPGPDGLHNFWIKWFTRSHARLAILFQSALESGSLPEFLTTGITHLLHKSGSTAEPKNYRPIACLPTVYKVLTSILRAKINKHIDDNSVMSASQNGCRNGSRGTKELLLIDMAISQQVRRSRRDLSTCWIDYKKAYDSVPHTWLMRVLELYKVDSTLRIFLMSCMGQWRTVLRYPGCRQIQRNSEPIRIERGIFLGDSLSPLWFCLALNPLSTLLEDSGLGYRLRRGGQVISHLLYMDDLKLFAPNDLQLMELLKVTETFSSAIRMEFGVDKCAVMHVKRGEIVESVGTQLSDSINLRSLSATETYKYLGMSEALGINVADMKQSLKERFFGRLKKVFNSLLSGGNKVRAFNGWVMPVLMYSFGILKWTQTELDALDRRVRTLLTTYRMHHPRSSVMRLYIPRRCGGRGFLNAKTLHNREIYSLREYFLETDVGMHRDVVAVDKGLTPLSLAKENWRKPVVLDTNDRMEVWQSKELHGRFFRALHGPDVDLPASVAWLRSGDLFGETEGFVCAIMDEVMMTNNYRRFIVKDGTVDICRACHRPGESIRHIISGCSRLANGEYLHRHNLVARIIHQQLALKYNLVESEVPYYKYVPDPVLENGNITLYWDRSIVTDRTIVANKPDIVVVDRSERRAMIVDITVPHDGNLVKAEKDKQIKYLDLAHEVVDMWDVDSAIIVPIVVSAHGLIAKSLDQYLRRLSLGSWIKGLIQKAVLLDTARIVRRFLSLEP

SEQ ID NO: 11899 - protein, 1200 aa, Mythimna ferrago
MLTRSRARSQIAHPTSSGSSLSSASQPPGPAPAVSPEIPAAAVASSSSDEYFSPPTTPPPARRRGRGRPPACLGLRGPPASDRVPAAGGSVQRMRWTESINENVMRSYFGATEGGTNLTAYRGRMLSLFQVLEPAVNVSAQRLSDQVRVIQRNRMLDDAVLDRLRLESRNGRVTPISPPAAVQRQPSVSPRPDHVGEDDDDGAISVSTQCNARLRSALEDAFREYRSIPPELRPRLPRLPMHRKNRALVCALDSQLSNCFDSSKDLTDTHSILYCAAAAACRVAHVKIPNSDRAIRPAKPAWQCRIERRIGEARALIGKLICFREGNTRPRVMRFVRRAFSGTDISPRDYLPRITERIDFLRQKVYAWANRIRRYKRRVERYTQNRAFQSNERWVYRAWERPDQSVIDTRLPDDDAMYSFWRSIWSVPVSHTEGDWTREVERECELIPEMGAITISPQDVARAVRPLPNWKSPGPDGLHNFWLKWFKSSHARLASQFQSALESGSLPQFLTTGITHLLHKSGSTAEPKNYRPITCLPTVYKVLTSILRAKINSHIETNSIMSASQNGCRNGSRGTKELLLIDVAISQQVRRSRRDLSTCWIDYKKAYDSVPHTWLMRVLELYKIDVTLRAFLMSCMGQWRTVLHYPGCRRVSENSEPLRIERGIFQGDSLSPLWFCLALNPLSTLLEGSGLGYRLRREGQVISHLLYMDDLKLFASNNLQLMELLKVTETFSSAIRMEFGLDKCAVMHVKRGEIMESVGTQLSDSIHLRSLSSTETYKYLGMSEALGINAADVKQSLRERFFGRLNKVLKSLLSGENKVRAFNGWVMPVLMYSFGILKWTQTELDALDRRVRNLLTANRMHHPRSSVMRLYIPRKCGGRGFLNAKTLHNREVCSLREYFLETDVGMHRDVVAVDKGLTPLSLANENWRKPMVMDTNERKEVWKGKELHGRFYRALHGPDVDLLASVSWLRFGDLFGETEGFVFAIMDEVMMTNNYRKYIVKDGTVDICRACHRPGESIRHIISGCSHLANGDYLHRHNLVARIIHQQLALKYNLVESEVPYYRYVPDPVLENGSVTLYWDRSIITDRTIVANKPDIVVINRLERRTMIVDIAVPHDENLVKAEKDKQTKYLDLAREVVDMWEVDRAIIVPIVVTANGLIAKSLDQHLRRLSLGSWIKGLIQKAVLLDTARIVRRFLSQEP

SEQ ID NO: 11900 - protein, 1109 aa, Mythimna ferrago
MRWTQSINENVMRSYYGATEGGNSLTAYRVRMLSLFQVLEPAVNVSAQRLSDQVRVILRNHMLDDTVLDRLRTEMSDRVITPPSQPVVPLVVPPSSHISFDTNEVSSDTVTNVSNQCNSELRSALECAIREYRNIPSELRPRIPRLPMCNKNRALVAALDSQLSSYFDDCEDLTDTHSIMYCAAVAACRVAHVKFPNSDVATRPKPAVPAWQCRIERRIGGARALIAKLICFREGNTRPRVMRFVRRAFSGTDISPRDYMSRVTERIDFLKQKVYAWANRIRRYKRRVERYTQDRTFRSNERWVYRAWERPDQGVTDARLPDDDAMSSFWRSIWSVPVSHTEGDWIRGVERACDPIPQMGAIGISPQDVARAVRPLPNWKSPGPDGLHNFWIKWFTRSHARLAYQFQSALESGSLPQFLTTGMTHLLHKSGSTAEPKNYRLITCLPTVYKVLTSILRSKINNHIDENSIMSPSQNGCRNGSRGTKELLLVDMTISQQVRRSRKDLSTCWIDYKKAYDSVPHTWLMRVLELYKIDTTLRTFLMSCMRQWSTVLCYPGCRNIQRNSEPVRIERGIFQGDSLSPLWFCLALNPLSTLLENSGLGYRLKRGGQVISHLLYMDDLKLFAPNNLQLMELLKVTETFSSAIRMEFGVDKCAVMHVKRGEVVESVSTRLTDSINLRSLSPTETYKYLGMSEALGISITNMKQSLKERFFGRLKKVFNSFLSGGNKVRAFNGWVMPVLMYSFGVLKWTQTELDALDRRVRTLLTAYRMHHPRSSVMRLYIPRKCGGRGFLNAKTLHNREVCSLREYFLATDVGMHRDVVAVDKGLTPLSLAIENWRKPIVLDTNDRREVWQSKELHGRFFRALHGPDVDQLASVAWLRFGDLFGETEGFVCAIMDEVIMTNNYRRFIVKDGTVDICRACHRLGESIRHIISGCSRLANGEYLHRHNLVARIIHQQLALKYSLVESEVPYYRYEPDPVLDNGHITLYWDRPIITDRTIVANKPDIVVVDRSERRAMIVDISVPHDENLVKAEKDKQIKYIDLAREVVDMWEVDSAIIVPIVVSANGLIAKSLDQHLRRLSLSGWIKGLIQKAVLLDTARIVRRFLSLEP

SEQ ID NO: 11901 - protein, 1200 aa, Mythimna ferrago
MLTRAAARRARPPPPASSLSSASPPSEPSLTESAVTPAVAAASSSSDEYYSPPTTPPPTRRRGGRRPPACLGPRGPPASDRVPAAGGSVPRMRWTQSTNENVMRAYYGATEGGNNLTAYRVRMLSLFQVLEPAVNVSAQRLSDQVRVIQRNHMLDDTVLDRLRTEMSDRVITAPSQPVVPVVAPPPSHISFHTDEVSTDTVTNVSTQCNNELRSALECAIREYRNMSLEFRPRLPRLPMRNKNKALVAALDSQLSNYFDDCEDLTDTHSIMYCAAVAACRVAHVKFPNSDVATRPKPAVPAWQCRIERRIGGARALIGKLICFREGNTRPRVMRFVRRAFSGTDINPRDYMSRVTERIDFLKQKVYAWANRIRRYKRRVERYTQNSTFRSNERWVYRAWERPDQGVTDTRLPDDDAMCLFWRNIWSVPVSHTEGGWTREVERACESITEMGAITISPQDVARAVRPLPNWKSPGPDGLQNFWIKWLQRSHARLASQYQAALESGSLPEFLTTGVTHLLHKSGSTAEPKNYRPITCLPTVYKVLTSILRAKINHHVDNNAIMSASQNGCRNGSRGTKELLLIDMAISQQVRRSRKDLSTCWIDYKKAYDSVPHTWLMRVLELYKVDATLRTFLMSCMRQWRTVLRYPGCRNIQRNSEPVRIERGIFQGDSLSPLWFCLALNPLSTLLENSGLGYRLKRGGQAISHLLYMDDLKLFAPNNLQLMELLKVTETFSSAIRMEFGVDKCAVMHIKRGEIVESVGIQLSDSIHLRSLSPTETYKYLGMSEALGINATDMKQSLKERFFGRLKKVLNSLLSGGNRVRAFNGWVMPVLMYAFGVLKWTQTELDALDKRVRTLLTAYRMHHPRSSVMRLYIPRKCGGRGFLNAKTLHNREVCSLREYFLAADGGMHRAVVAVDKGLTPLSLANENWRKPVVLDTNVRKEVWQSKELHGRFFRALHGPDVDQLASVAWLRVGDLFGETEGFVCAIMDEVIMTNNYRRFIVKDGTVDICRACHRPGESIRHIISGCSRLANGEYLHRHNLVARIIHQQLALKYSLVESEVPYYRYVPDPVLDSGDITLYWDRSIITDRTIVANKPDIVVVDRRERRAMIVDISVPHDENLVKAEKDKQIKYIDLAREVVDMWNVDSAIIVPIVVSANGLIAKSLDQHLRRLSLSGWIKGLIQKAVLLDTARIVRRFLSLEP

SEQ ID NO: 11902 - protein, 1200 aa, Mythimna ferrago
MLTRAAARRARPPPLASSLSSASLPPEPSLTVSAVTPAAAAASSSSDEYYSPPTTPPPARRRGGRRPPACLGPRGPPVSDRVPAAGGSVPRMRWTQSTNENVMRAYYGATEGGNNLTAYRVRMLSLFQVLEPAVNVSAQRLSDQVRVIQRNHMLDDTVLDRLRTEMSNRVITPPSQPVVPVVVPQSSHISLHTDEVSTDTVTNVSTQCNNELRSALECAIREYRNMPLELRPRLPRLPMHNKNKALVAALDSQLSNYFDDCEDLTDTHSIMYCAAVAACRVAHVKFPNSDVATRPKPAVPAWQYRIERRIGGARALIGKLICFREGNTRPRVMRFVRRAFSGTDISPRDYMSRVTERIDFLKQKVYAWANRIRRYKRRVERYIQNSTFRSNERWVYRAWERPDQGVTDTRPPDDDAMCLFWRNIWSVPVSHTEGGWTREVERACESVTEMGAITISPQDVARAVRPLPNWKSPGPDGLHNFWIKWLQRSHARLASQYQAALESGSLPEFLTTGVTHLLHKSGSTAEPKNYRPITCLPTVYKVLTSILRAKINHHVDNNAIMSASQNGCRNGSRGTKELLLIDMAISQQVRRSRKDLSTCWIDYKKAYDSVPHTWLMRVLELYKVDATLRTFLMSCMRQWRTVLRYPGCRNIQRNSEPVRIERGIFQGDSLSPLWFCLALNPLSTLLENSGLGYRLKRGGQVISHLLYMDDLKLFAPNNLQLMELLKVTETFSSAIRMEFGVDKCAVMHIKRGEIVESVGIQLSDSIHLRSLSPTETYKYLGMSEALGINATDMKQSLRERFFGRLKKVLNSLLSGGNKVRAFNGWVMPVLMYAFGVLKWTQTELDALDRRVRTLLTAYQMHHPRSSVMRLYIPRKCGGRGFLNAKSLHNREVCSLREYFLAADGGMHRDVVAVDKGLTPLSLANENWRKPVVLDTNVRREVWQSKELHGRFFRALHGPDVDQLASVAWLRVGDLFGETEGFVCAIMDEVIMTNNYRRFIVKDGTVDICRACHRPGESIRHIISGCSRLANGEYLHRHNLVARIIHQQLALKYSLVESEVPYYRYVPDPVLDSGDITLFWDRSIITDRTIVANKPDIVVVDRSERRAMIVDISVPHDENLAKAEKDKQIKYIDLAREVVDMWEVDSAIIVPIVVSANGLIAKSLDQHLRRLSLGDWIKGLIQKAVLLDTARIVRRFLSLEP

SEQ ID NO: 11903 - protein, 1001 aa, Mythimna ferrago
MVTNVSTQCNNELRSALECAIREYRNIPPELRPRIPRLPMCNKNRALVAALDSQLSNYFDDCEDLTETHSIMYCAAVAACRVAHVKFPDSDEATRPKSAVPAWQCRIERRIGGARALIGKLICFREGNTRPRVMRFVRRAFSGTNISPRDYMSRVTERIDFLKQKVYAWANRIRRYKRRVERYTQNRTFRSNERWVYRAWERPDQGVTDARLPEDDAMCSFWRSIWSVPVSHTEGDWTRGVERACDPIPQMGAIDISPQDVARAVRPLPNWKSPGPDGLHNFWIKWFTRSHARLAYQFQSALESGSLPQFLTTGITHLLHKSGSTAEPKNYRPITCLPTVYKVLTSILRSKINSHIDENSIMSPSQNGCRNGPRGTKELLLIDMTISQQVRRSRKDLSTCWIDYKKAYDSVPHTWLMRVLELYKIDTTLRTFLMSCMRQWSTVLRYPGCRNIQRNSEPVRIERGIFQGDSLSPLWFCLALNPLSTLLENSGLGYRLKRGGQVISHLLYMDDLKLFAPNNLQLMELLKVTETFSSAIRMEFGVDKCAVMHVKRGEVVESVGVQLTDSINLRSLSPTETYKYLGMSEALGISTIDMKQSLKERFFGRLKKVFNNLLSGGNKVRAFNGWVMPVLMYSFGVLKWTQTELDALDRRVRTLLTAYRMHHPRSSVMRLYIPRKCGGRGFLNAKTLHNREICSLREYFLAADVGMHRDVVALDKGLTPLSLANENWRKPIVLDTDDRREVWQSKELHGRFFRALHGPDVDQLASVAWLRFGDLFGETEGFVCAIMDEVIMTNNYRRFIVKDGTVDICRACHRPGESIRHIISGCSRLANGEYLHRHNLVARIIHQQLALKYSLVESEVPYYRYEPDPVLDNGHITLYWDRPIITDRTIVANKPDIVVVDRSERRAMIVDISVPHDENLVKAEKDKQIKYIDLAREVVDMWEVDSAIIVPIVVSANGLIAKSLDQHLRRLSLGDWIKGLIQKAVLLDTARIVRRFLSLEP

SEQ ID NO: 11904 - protein, 1098 aa, Mythimna ferrago
MRAYYGATEGGNNLTAYRVRMLSLFQVLEPAVNVSAQRLSDQVRVIQRNNMLDDTVLDRLRTEMSNRVITPPSQPVVPVVVPQSSHISLHTDEVSTDTVTNVSTQCNNELRSALECAIREYRNMPLELRPRLPRLPMHNKNKALVAALDSQLSNYFDDCEDLTETHSIMYCAAVAACRVAHVKFPNSDVATRPKPAVPAWQYRIERRIGGARALIGKLICFREGNTRPRVMRFVRRAFSGTDISPRDYMSRVTERIDFLKQKVYAWANRIRRYKRRVERYIQNSTFRSNERWVYRAWERPDQGVTDTRPPDDDAMCSFWRNIWSVPVSHTEGGWTREVERACESVTEMGAITISPQDVARAVRPLPNWKSPGPDGLHNFWIKWLQRSHARLASQYQAALESGSLPEFLTTGVTHLLHESGSTAEPKNYRPITCLPTVYKVLTSILRAKINHHVDNNAIMSASQNGCRNGSRGTKELLLFDMAISQQVRRSRKDLSTCWIDYKKAYDSVPHTWLMRVLELYKVDATLRTFLMSCMRQWRTVLRYPGCRNNQRNSEPVRIERGIFQGDSLSPLWFCLALNPLSTLLENSGLGYRLKRGGQVISHLLYMDDLKLFAPNNLQLMELLKVTETFSSAIRMEFGVDKCAVMHIKRGEIVESVGIQLSDSIHLRSLSPTETYKYLGMSEALGINATDMKQSLRERFFGRLKKVLNSLLSGGNKVRAFNGWVMPVLMYAFGVLKWTQTELDALDRRVRTLLTAYRMHHPRSSVMRLYIPRNCGGRGFLNAKSLHNREVCSLREYFLAADGGMHRDVVAVDKGLTPLSLANENWRKPVVLDTNVRREVWQSKELHGRFFRALHGPDVDQLASVAWLRVGDLFGETEGFVCAIMDEVIMTNNYRRFIVKDGTVDICRACHRPGESIRHIISGCSRLANGEYLHRHNLVARIIHQQLALKYSLVESEVPYYRYVPDPVLDSGDITLYWDRSIITDRTIVANKPDIVVVDRSERRAMIVDISVPHDENLAKAEKDKQIKYIDLAREVVDMWEVDSAIIVPIVVSANGLIAKSLDQHLRRLSLGDWIKGLIQKAVLLDTARIVRRFLSLEP

SEQ ID NO: 11905 - protein, 1188 aa, Eilema sororculum
MLTRAQARNRNAQTTSPDSSLSSAAQPPAMEPAASSSSSSDEFFSPPTSPTPVRRPGRGRPPTCLGPRRPPASNRAPAAGGNVHRMRWTNSINENVMRAYFAATEGGTNLSAYRTRMLPLFQALEPSINTSAQRLSDQVRVIQRNRMLNETVLETLRQECLRNICVPAPAPTSTAEINNDTCVAPDDTPIPVSIQYNEEIKEALECALREYRSVPVHVRPRLPRLPIHRRNIALVSALDSLLPRYLENSENLGDTHSILYCTAVAACRMAGAKFPIKDPAIRPKSAIPAWQCRIERRVAEARVLIGKLICFRSGNTRPRVMRYVTRAFAGTDISPQDYTSRVTERIDFLKQKVYAWANRIRRYKRRVDRYTVNHMFQRDQRWVYRSWERTDESVDDVRRPDAEATNAFWRSIWSVPVSHTEGDWMREVERACETIPEMEEIYIDATDVDCAVRSLSNWKSPGPDGLHNFWLKWLRSSHVVLASQFQSAIESGTLPAFMTTGVTHLLHKTGSTLEPNNYRPITCLPTVYKLLTSILRAKINNHINNNSIMCASQNGCRNGARGTKELLLIDMAISQQARRNRKDLTACWIDYKKAFDSVPHTWLLRVLELYKVNTTLCTFLRSCMGQWRTVLFYPGCRQALGGGVPITIERGIFQGDSLSPLWFCLALNPLSTLLVNSGLGYRLRREGQTVSHLFYMDDLKLFAHTNPQLIALLKVTETFSNSIKMAFGVDKCAVIHVKRGRVVESEGIQLSDSTNLRSLLVTETYKYLGMSQALCINEVDMKQMLQERFFGRLKKVLNSLLSGGNKVRACNSWVMPLLMYSFGILRWTQTELDTIDRKVRTQLTAFRMHHPRSSVMRLYIPRKCGGRGFLNAKTLHNREVCNLRDYFLKSNVDMHRDVVNVDTGLTPLGLAKENWRRPTIVGTDSRREVWQSKELHGRFYRALHRPEVDLLASVSWLRFSDLFGETEGFVCAIADEVIKTNNYRKYIMRDGTIDICRACHQPGESLRHITSGCSRLANGEYLHRHNQVARIIHQRLALKYNLVEFEVPYYRYVPEPVLENTHITLYWDRSIITDRTVVANKPDIVVIDRSERRALIVDVTIPHDENLVKAEKDKQVKYLDLAHEVVDMWNVDSAIIVPIVVSVNGLIAKSLDQHLKRLGLDGWVKGQMQKAVLLDTARIVRKFLSLEP

SEQ ID NO: 11906 - protein, 920 aa, Eilema sororculum
MAGAKFPIKDPAIRPKPAIPAWQCRIERRVAEARVLIGKLICFRSGNTRPRVMRYVTRAFAGTNISPQDYTSRVTERIDFLKQKVCAWANRIRRYKKRVDRYTVNRMFQRDQRWVYRSWERTDESVDDLRRPDAEATNAFWRSIWSVPVSHTEGDWMREVERACETIPEMEEIYIDATDVDCAVRSLSNWKSPGPDGLHNFWLKWLRSSHVVLASQFQSAIESGTLPAFMTTGVTHLLHKTGSTLEPNNYRPITCLPTVYKLLTSILRAKINNHINNNSIMCTSQNGCRNGARGTKELLLIDMTISQQARRNRKDLVACWIDYKKAFDSVPHTWLLRVLELYKVNTTLCTFLRSCMGQWRTVLLYPGCRQALGSGEPITIERGIFQGDSLSPLWFCLALNPLSTLLVNSGLGYRLRREGQMVSHLFYMDDLKLFAHTNPQLIALLKVTETFSNSIKMAFGVDKCAVIHVKRGRVVESEGIQLSDSTNLRSLLVTETYKYLGMSQALCINEVGMKQMLQERFFGRLKKVLNSLLSGGNKVRACNSWVMPLLMYSFGILKWTQTELDTIDRKVRTQLTAFRMHHPRSSVMRLYIPRKCGGRGFLNAKTLHNREVCNLRDYFLKSNVDMHRDVVNVDTGLTPLGLAKENWRRPTIVGTDSRREVWQSKELHGRFYRALHRPEVDLLASVSWLRFGDLFGETEGFVCAIADEVIKTNNYRKYIMRDGTIDICRACHQPGESLRHITSGCSRLANGEYLHRHNQVARIIHQRLALKYNLVEVEVPYYRYVPEPVLENSHITLYWDRSIITDRTVVANKPDIVVIDRSERRALIVDVTIPHDENLVKAEKDKQVKYLDLAHEVVDMWNVDSAIIVPIVVSVNGLIAKSLDQHLKRLGLDGWVKGQMQKAVLLDTARIVRKFLSLEP

SEQ ID NO: 11907 - protein, 1191 aa, Eilema sororculum
MLTGAQARNRNAQTTSPDSSLSSAAQPPAMEPAASSSSSSDEFFSPPTSPTPVRRPGRGRPPTCLGPRRPPASNRAPAAGGNVHRMRWTNSINENVMRAYFAATEGGTNLSAYRTRMLPLFQALEPSINTSAQRLSDQVRVIQRNRMLNETVLETLRQECLRNICVTPAPAPAPASTAEINNDTCVAPDDTPIPVSIQYNEEIKEALECALREYRSVPVHVRPRLPRLPIHRRNIALVSALDSLLPRYLENSENLGDTHSILYCTAVAACRMAGAKFPIKDSAIRPKSAIPAWQCRIERRVAEARVLIGKLICFRSGNTRPRVMRYVTRAFAGTDISPQDYTSRVTERIDFLKQKVYAWANRIRRYKRRVDRYTVNHMFQRDQRWVYRSWERTDESVDDVRRPDAEATNAFWRSIWSVPVSHTEGDWMREVERACETIPEMEEIYIDATDVDCAVHSLSNWKSPGPDGLHNFWLKWLRSSHVVLASQFQSAIESGTLPAFMTTGVTHLLHKTGSTLEPNNYRPITCLPTVYKLLTSILRAKINNHINNNSIMCASQNGCRNGARGTKELLLIDMAISQQARRNRKDLTACWIDYKKAFDSVPHTWLLRVLELYKVNTTLCTFLRSCMGQWRTVLFYPGCRQALGGGVPITIERGIFQGDSLSPLWFCLALNPLSTLLVNSGLGYRLRREGQMVSHLFYMDDLKLFAHTNPQLIALLKVTETFSNSIKMAFGVDKCAVIHVKRGRVVESEGIQLSDSTNLRSLLITETYKYLGMSQALCINEVDMKQMLQERFFGRLKKVLNSLLSGGNKVRACNSWVMPLLMYSFGILRWTQTELDTIDRKVRTQLTAFRMHHPRSSVMRLYIPRKCGGRGFLNAKTLHNREVCNLRDYFLKSNVDMHRDVVNVDTGLTPLGLAKENWRRPTIVSTDSRREVWQSKELHGRFYRALHRPEVDLLASVSWLRFSDLFGETEGFVCAIADEVIKTNNYRKYIMRDGTIDICRACHQPGESLRHITSGCSRLANGEYLHRHNQVARIIHQRLALKYNLVEVEVPYYKYVPEPVLQNSHITLYWDRSIITDRTVVANKPDIVVIERSERRALIVDVTIPHDENLVKAEKDKQVKYLDLAHEVVDMWNVDSAIIVPIVVSVNGLIAKSLDQHLKRLGLDGWVKGQMQKAVLLDTARIVRKFLSLEP

SEQ ID NO: 11908 - protein, 1192 aa, Eilema sororculum
MLTRAQAKRNRSAPITSPDSSLSSAAQPPAVEPAASSSSSSDEFFSPPTSPTPVRRPGRGRPPTCLGPRRPPASNGAPATGGYVHRMRWTNSINENVMRAYFAATEGGTNLSAYRTRMLPLFQALEPSINVSAQRLSDQVRVIQRNRMLNETVLETLRLECLRNICVTPAPVPVPASTVELNDDTCVAPDDTPIPVSIQYNEEIKEALECALREYRSMPVHVRPRLPRLPIHRRNIALVSALDSLLPRYLENSENLGDTHSILYCTAVAACRMAGAKFPIKDPAIRPKSAIPAWQCRIERRVTEARVLIGKLICFRSGNTRPRVMRYVTRAFAGTDISPQDYTSRVTERIDFLKQKVYAWANRIRRYKKRVDRFTVNRMFQRDQRWVYRSWERTEESVDDVRRPDAEVTNAFWRSIWSVPVSHTEGDWMHEVERACETIPEMEEINIDAIDVDCAVRSLSNWKSPGPDGLHNFWLKWLRSSHVVLASQFLSAVESGTLPAFMTTGVTHLLHKTGSTLEPNNYRPITCLPTVYKLLTSILRAKINNHINNNSIMCASQNGCRNGARGTKELLLIDMAISQQARRNRKDLTACWIDYKKAFDSVPHTWLLRVLELYKVNTTLCTFLRSCMGQWRTVLFYPGCRQALDGGVPITIERGIFQGDSLSPLWFCLALNPLSTLLVNSGLGYRLRREGQMVSHLFYMDDLKLFAHTNPQLIALLKITETFSNSIKMAFGVDKCAVIHVKRGRVVESEGIQLSDSTNLRSLLVTETYKYLGMSQALCINEVDMKQMLQERFFGRLKKVLNSLLSGGNKVRACNSWVIPLLMYSFGILKWTQTELDTIDRKVRTQLTAFRMHHPRSSVMRLYIPRKCGGRGFLNAKTLHNREVCNLRDYFLKSNVDMHRDVVNVDTGLTPLGLAKENWRRPTIVSTDSRREVWQSKELHGRFYRALHRPEVDLLASVSWLRFSDLFGETEGFVCAIADEVIKTNNYRKYIMRDGTIDICRACHQPGESLRHITSGCSRLANGEYLHRHNQVARIIHQRLALKYNLVEFEVPYYRYVPEPVLENSHITLYWDRSIITDRTVVANKPDIVVIDRSERRALIVDVTIPHDENLVKAEKDKQVKYLDLAHEVVDMWNVDSAIIVPIVVSVNGLIAKSLDQHLKRLGLDGWVKGQMQKAVLLDTARIVRKFLSLEP

SEQ ID NO: 11909 - protein, 1106 aa, Eilema sororculum
MRWTNSINENVMRAYFAATEGGTNLSAYRSRMLPLFQALEPSVNTSAQRLSDQVRVIQRNHMLNETVLETLRQECLRNICVTPALAPAPASTTALNEDSHVTRDDTPIPVSIQYNEEIKEALEYALREYRSMPIHVRPRLPRLPIHRRNIALVSALDSLLPKYLENSENLGDTHSILYCTAVAACRMAGAKFPIKDPAIRPKPAIPAWQCRIERRVAEARVLIGKLICFRSGNTRPRVMRYVTRAFAGTNISPQDYMSRVTERIDFLKQKVCAWANRIRRYKKRVDRYTVNRMFQRDQRWVYRSWERTDESVDDLRRPDAEATNAFWRSIWSVPVSHTEGDWMREVERACETIPEMEEIYIDVTDVDCAVRSLSNWKSPGPDGLHNFWLKWLRSSHVVLASQFQSAIESGTLPAFMTTGVTHLLHKTGSTLEPNNYRPITCLPTVYKLLTSILRAKINNHINNNSIMCTSQNGCRNGARGTKELLLIDMTISQQARRNRKDLVACWIDYKKAFDSVPHTWLLRVLELYKVNTTLCTFLRSCMGQWRTVLLYPGCRQALGSGEPITIERGIFQGDSLSPLWFCLALNPLSTLLVNSGLGYRLRREGQMVSHLFYMDDLKLFAHTNPQLIALLKVTETFSNSIKMAFGVDKCAVIHVKRGRVVESEGIQLSDSTNLRSLLVTETYKYLGMSQALCINEVGMKQMLQERFFGRLKKVLNSLLSGGNKVRACNSWVMPLLMYSFGILKWTQTELDTIDRKVRTQLTAFRMHHPRSSVMRLYIPRKCGGRGFLNAKTLHNREVCNLRDYFLKSNVDMHRDVVNVDTGLTPLGLAKENWRRPTIVGTDSRREVWQSKELHGRFYRALHRPEVDLLASVSWLRFSDLFGETEGFVCAIADEVIKTNNYRKYIMRDGTIDICRACHQPGESLRHITSGCSRLANGEYLHRHNQVARIIHQRLALKYNLVEVEVPYYRYVPEPVLENSHITLYWDRSIITDRTVVANKPDIVVIDRSERRALIVDVTIPHDENLVKAEKDKQVKYLDLAHEVVDMWNVDSAIIVPIVVSVNGLIAKSLDQHLKRLGLDGWVRGQMQKAVLLDTARIVRKFLSLEP

SEQ ID NO: 11910 - protein, 1212 aa, Ptilodon capucinus
MTDAPRRNPRRQCRQRSAVRHYAQSTPPDQSPRSASPSPASIIRASVNAVASSESDEYFSPPTSPPPVRRQRGRPPGHLGLLGQPAPNRVLVPSGVVRRMRWTSSMNENVMRAYYEATEGGTNLTAYRDRMLPLFQSLEPAVNVSAQRLSDQVRVIQRGNMLADTVLDRLRSEVQSRRVVPVASSQPAAQPVARATVTSRLAADSDVDRDNAPIDVSTQYNNLLRSTLEDVVREYRSMPNHLRPRIPRLPMHKGNRALVGALDSLLSIYFDSSDDLVDTHSILYCAAITVCRVARVKVFNTDTTTRPKPAVPAWQCRIERRISEARALIGKLSCFREGNTRPRVMRFVKRAFAGTDVSPREYISRVTERIDFLKQKIYAWANRIRRYKARVDRYSQNSMFQRDQRWVYRSWERPNEPVSELQRPDDNAMTTFWRDIWSVPVTHYEGNWIGDVERMCEPIKEMEAISIGPLDVANAVRSLPNWKAPGPDGLHNFWLKWLRSSHVRLASQFQSALQSGSLPEFITTGVTHLLHKTGSTTDPKNYRPITCLPTIYKTLTSILRAKIARHVEDNSIMSASQNGCRSGSRGTKELLLIDMAICQQARRNRKDLSTCWIDYKKAYDSVPHTWLVRVLELYKIDTTLRTFLESCMRQWKTVLLCPGSRQILGNGEPIRIERGIFQGDSLSPLWFCLALNPLSTLLEESGFGFRLRRGGQVISHLLYMDDLKLFAPTALQLSGLLKVTETFSNSIRMEFGVDKCAVMHAKQGRMVESEGIQLSDSIQLRSLAATETYKYLGMSQGLGISETDMKQLLRDCFLGRLKKVLKSILSGGNKVRAYNGWVMPVLMYSFGILKWTQTELDALDRTVRTTLTAYRMHHPRSSVMRLYIPRKCGGRGFLNVKTLHNREICSLREYFLRADGEMHVDVVAVDNGLTPLSLAKENWRKPVVLTTDDRRVVWQGKELHGRYYRALHGPDVDLAASVAWLRFGDLFGETEGFVCAIMDEVVMTNNYRRYILRDGTIDICRACHRPGESLRHIISGCSRLANGQYLHRHNQVARIVHQQLALKYRLVTSEVPYYRYEPQPVLEEGHITLYWDRSIITDRTIVANKPDIVLIDRQERRAMIIDITVPHDENLVKAEKDKESKYLDLAHEVVDMWDIDAAIIVPIVVSAHGLLAKSLDKHLKRLALGSWIKGQIQKAVLLGTARIVRKFISLEP

SEQ ID NO: 11911 - protein, 1212 aa, Ptilodon capucinus
MTDAPRRNPRRQCRQRSAVRHYAQSTPPDQSPRSASPSPASIIRASVNAVASSESDEYFSPPTSPPPVRRQRGRPPGHLGLLGQPAPNRVLVPSGVVRRMRWTSSMNENVMRAYYEATEGGTNLTAYRDRMLPLFQSLEPAVNVSAQRLSDQVRVIQRGNMLADTVLDRLRSEVQSRRVVPVASSQPAAQPVARATVTSRLAADSDVDRDNAPIDVSTQYNNLLRSTLEDVVREYRSMPNHLRPRIPRLPMHKGNRALVGALDSLLSIYFDSSDDLVDTHSILYCAAITVCRVARVKVFNTDTTTRPKPAVPAWQCRIERRISEARALIGKLSCFREGNTRPRVMRFVKRAFAGTDVSPREYISRVTERIDFLKQKIYAWANRIRRYKARVDRYSQNSMFQRDQRWVYRSWERPNEPVSELQRPDDNAMTTFWRDIWSVPVTHYEGNWIGDVERMCEPIKEMEAISIGPLDVANAVRSLPNWKAPGPDGLHNFWLKWLRSSHVRLASQFQSALQSGSLPEFITTGVTHLLHKTGSTTDPKNYRPITCLPTIYKTLTSILRAKIARHVEDNSIMSASQNGCRSGSRGTKELLLIDMAICQQARRNRKDLSTCWIDYKKAYDSVPHTWLVRVLELYKIDTTLRTFLESCMRQWKTVLLCPGSRQLLGNGEPIRIERGIFQGDSLSPLWFCLALNPLSTLLEESGFGFRLRRGGQVISHLLYMDDLKLFAPTALQLSGLLKVTETFSNSIRMEFGVDKCAVMHAKQGRMVESEGIQLSDSIQLRSLAATETYKYLGMSQGLGISETDMKQLLRDRFLGRLKKVLKSLLSGGNKVRAYNGWVMPVLMYSFGILKWTQTELDALDRTVRTTLTAYRMHHPRSSVMRLYIPRKCGGRGFLNVKTLHNREICSLREYFLRADGEMHVDVVAVDNGLTPLSLAKENWRKPVVLTTDDRRVVWQGKELHGRYYRALHGPDVDLAASVAWLRFGDLFGETEGFVCAIMDEVVMTNNYRRYILRDGTIDICRACHRPGESLRHIISGCSRLANGQYLHRHNQVARIVHQQLALKYRLVTSEVPYYRYEPQPVLEEGHITLYWDRSIITDRTIVANKPDIVLIDRQERRAMIIDITVPHDENLVKAEKDKESKYLDLAHEVVDMWDIDAAIIVPIVVSAHGLLAKSLDKHLKRLALGSWIKGQIQKAVLLGTARIVRKFLSLEP

SEQ ID NO: 11912 - protein, 1212 aa, Ptilodon capucinus
MTDAPRRNPRRQCRQRSAVRHYAQSTPPDQSPRSASPSPASIIRTSVTAVASSESDEYFSPPTSPPPVRRQRCRPPGHLGLLGQPAPNRVLVPSGVVRRMRWTSSMNENVMRAYYEATEGGTNLTAYRDRMLPLFQSLEPAVNVSAQRLSDQVRVIQRGNMLADTVLDRLRSEVQSRRVVPVASSQPAAQPVARATVTSRLAADSDVDRDNAPIDVSTQYNNLLRSTLEDVVREYRSMPNHLRPRIPRLPMHKGNRALVGALDSLLSIYFDSSDDLVDTHSILYCAAITVCRVARVKVFNTDTTTRPKPAVPAWQCRIERRISEARALIGKLSCFREGNTRPRVMRFVKRAFAGTDVSPREYISRVTERIDFLKQKIYAWANRIRRYKARVDRYSQNSMFQRDQRWVYRSWERPNEPVSELQRPDDNAMTTFWRDIWSVPVTHYEGNWIGDVERMCEPIKEMEAISIGPLDVANAVRSLPNWKAPGPDGLHNFWLKWLRSSHVRLASQFQSALQSGSLPEFITTGVTHLLHKTGSTTDPKNYRPITCLPTIYKTLTSILRAKIARHVEDNSIMSASQNGCRSGSRGTKELLLIDMTICQQARRIRKDLSTCWIDYKKAYDSVPHTWLVRVLELYKIDTTLRTFLESCMRQWKTVLLCPGSRQILGNGEPIRIERGIFQGDSLSPLWFCLALNPLSTLLEESGFGFRLRRGGQVISHLLYMDDLKLFAPTALQLSGLLKVTEAFSNSIRMEFGVDKCAVMHAKQGRMVESEGIQLSDSIQLRSLAATETYKYLGMSQGLGISETDMKQLLRDRFLGRLKKVLKSLLSGGNKVRAYNGWVMPVLMYSFGILKWTQTELDALDRTVRTTLTAYRMHHPRSSVMRLYIPRKCGGRGFLNVKTLHNREICSLREYFLRADGEMHVDVVAVDNGLTPLSLAKENWRKPVVLTTDDRRVVWQGKELHGRYYRALHGPDVDLAASVAWLRFGDLFGETEGFVCAIMDEVVMTNNYRRYILRDGTIDICRACHRPGESLRHIISGCSRLANGQYLHRHNQVARIVHQQLALKYRLVTSEVPYYRYEPQPVLEEGHITLYWDRSIITDRTIVANKPDIVLIDRQERRAMIIDITVPHDENLVKAEKDKESKYLDLAHEVVDMWDIDAAIIVPIVVSAHGLLAKSLDKHLKRLALGSWIKGQIQKAVLLETARIVRKFLSLEP

SEQ ID NO: 11913 - protein, 1204 aa, Agrochola circellaris
MLTRSRARRLIDTHPTPSDSSLSSASQLPDPAPDVSPVIPAAAAASSSSDEYFSPPTSPPPARRGRGRPPASLGLRGPPASDRVPAPGGSVRRMRWTQTVNENVMRAYFGATEGGSNLTAYRGRMLSLFQVLEPAVNVSAQRLSDQVRVIQRNHMLDDAVLDRLRLESRNNRVTPASPLVAVQLQNSLSATPRPDHVGEEVDDGVISVSSQCNARLRNALEDAFREYRSTPPGLRPRLPRLPMHKKNKALVCTLDSLLSNYFDGSKDLADTHSILYCAAVAACRVAHVKFPSSDRAPRPKPAVPAWQCRIERRIGEARVLIGKLICFREGNTRPRVMRFVKRAFSGTDTSSRDYLTRVTERIDFLKQKICAWANRIRRYRRRVERYTQNRTFQSDERWVYRAWERLDQGVIDTRLPDDDAMCSFWRSIWSAPVNHTEGDWTGKIERACERIPEMGAINISPQDVACAVRPLPNWKSPGPDGLHNFWIKWLQRSHARLASQFQSALESGSLPQFLTTGITHLLHKSGSTAEPKNYRPITCLPTVYKVFTSILRTKINKHIDTNSIMSASQNGCKNGSRGTKELLLIDMAINQQVRRSRRDLSTCWIDYKKAYDSVPHTWLMRVLELYKVDATLRTFLISCMGQWRTVLRYPGCRQIQRNSEPIRIERGIFQGDSLSPLWFCLALNPLSTLLEDSGLGYRLRRGGQVISHLLYMDDLKLFAPNNLQLVELLKVTETFSSAIRMEFGVDKCAVMHVKRGGIVESGGTQLPDSIHLRSLSSIETYKYLGMSEALGINTADMKQSLKERFFDRLNKVLNSLLSGGNKVRAFNGWVMPVLMYSFGILKWTQTELDALDRRVRTLLTVNRMHHPRSSVMRLYIPRKCGGRGFLNAKTLHNREVCSLREYFLEADVGMHRDVVSVDKGLTPLSLANENWRKPIVLDTNDRREVWQSKELHGRFYRALHGPDVDLLASVSWLRFGDLFGETEGFVFAIMDEVMMTNNYRKYIVKDGTVDICRACHRPGESIRHIISGCSRLANGDYLHRHNLVARIIHQQLALKYNLVESEVPYYKYVPDSVLENGNITLYWDRSIITDRTIVANKPDIVVIDRLERRTMIIDIAVPHDENLVKAEKDKQIKYLDLAREVVDMWDVDTAVIVPIVVTANGVIAKSLDQHLRRLSLGSWIKGLIQKAVLLDTARIVRRFLSQEP

SEQ ID NO: 11914 - protein, 1203 aa, Hydraecia micacea
MLTRSRARRLPTTHPTSSGSSLSSASQLPEPAPDVSPVSPAAAVASSSSDEYFSPPTTPPPVCRRGRGRPPASLGLRGPPASERVPAPGGSVQRMRWTQTVNENVMRAYFGATEGGSNLTAYRGRMLSLFQVLEPAVNVSAQRLSDQVRVIQRNHMLDNVVLDRLRLESRNSHVTPASSLVAVQLQPSVPLRPDCVDIEDDDEAISVSSQCNARLRSALEDAFREYRSIPPGLRPRLPRLPMHKKNKALVCALDSQLSNCFNDSKDLADTHSILYCAAVAACRVAHVKFPNSDRAPRPKPAVPAWQCRIECRIGEARALIGKLICFREGNTRPRVMRFVRRAFSGTDISSRDYLSRVTERIDFLKQKICAWANRIRRYRRRVERYTQNRRFQSDERWVYRAWERPDQGVTDTRLPDDDAMCSFWRNIWSVPVSHTEGDWTGKIERACDLIPEMEALIISPQDVARAVRPLPNWKSPGPDGLHNFWIKWFKRSHDRLASQFQSALESGSLPQFLTTGITHLLYKSGSTADPKNYRPITCLPTVYKVLTSILRTKINKHIDTNSIMSVSQNGCKNGSRGTKELLLIDMTINQQVRRSRKDLSTCWIDYKKAYDSVPHTWLMRVLELYKVDTTLCTFLMSCMGQWRTVLRYPGCRNIQRNSEPIRIERGIFQGDSLSPLWFCLALNPLSTLLEDSGLGYRLRRGGQVISHLLYMDDLKLFAPNNLQLMELLKITETFSSAIRMEFGVDKCAVMHVKRGEIVESVGNQLSDSTNLRALSASDTYKYLGMSEALGINVTDMKQSLKERFFGRLKKVFNSLLSGGNKVRAFNDWVMPVLMYSFGILKWTQTELDALDRKVRTLLTANRMHHPRSSVMRLYIPRKCGGRGFLNAKTLHNREICSLREYFLETDVGMHRDVVVVDNGLTPLSLGKENWRKPVVLDTNDRMEVWQSKELHGRFFRALHGPDVDLLASVAWLRFGDLFGETEGFVCAIMDEVMMTNNYRRFIVKDGTVDICRACHRPGESIRHIISGCSRLANGEYLHRHNLVARIIHQQLALKYSLVESEVPYYRYVPDPVLENGNITLYWDRSIITDRTIVANKPDIVVMDRLERRAMIVDITIPHDENLVKAEKDKQIKYLDLAREVVDMWDVDSAIIVPIVVTANGLIAKSLDQHLRRLSLASWIKGLIQKAVLLDTARIVRRFLSLEP

SEQ ID NO: 11915 - protein, 1201 aa, Amphipyra tragopoginis
MLTRARTREARPPPPDSPLSSASQPPESSPTVSAVTPAAAVASSSSDEYFSPPTSPTPVRRQGRRRPPNSLGPRGPPAPSRVLATGGCVQRMKWTQNINENVMRAYYGSTEGGTNLTAYRVRMLTLFQELEPAINVSAQRLSDQVRVIQRNHRLDDAALDRLRLEVQNSRVTPVPSQTAVHHININVVPPRSDCVDGDVDDRAVTVSSQYNDRLRSALEDAIREYRANPELRPRLPRLPMHNKNRALVCALDSLLSSYFESSEDLVDTHSILYCAAVAACRVANVKFNNSERATRPKPAIPAWQCRIERRIDGARALIGKLICFREGNTRPRVMRFVRRAFSGTGISPREYMSQVTERIDFLKQKVCAWASRIRRYKRRVERYAQNRMFQCDQRWVYRAWERPDQGVSDGRLPDDDAMSSFWRSIWSVPVTHTEGDWTRDIERACEPIEEMGEILISPQDVASAARPLPNWKSPGPDGLHNFWIKWLRSSHARLASQFQSSLESGSLPQFLTTGVTHLLHKSGSTAEPKNYRPITCLPTVYKLLTSILRTKINTHVENNSIMSPSQNGCRNGSRGTKELLLIDMAISQQVRRSRKNLSTCWIDYKKAYDSVPHTWLMRVLELYKINTTLRTFLTSCMRQWRTVLRYPGCRPIMGSGEPISIERGIFQGDSLSPLWFCLALNPLSTLLEGSGLGYPLRRGGQVVSHLLYMDDLKLFAPTKLQLVELLKVTETFSNSIRMEFGVDKCAVMHVRRGGIMESEGLQLSDSIHLRSLSANDTYKYLGMSEGLGISEADMKQSLRERFFGRLKKVLKSLLSGGNKVRAFNGWVMPVLMYSFGILKWTQTELDALDRRVRTLLTANRMHHPRSSVMRLYIPRKCGGRGLLNAKTLHNREVCSLREYFLHADAGMHRDVVTVDKGLTPLNLAKENWRKPVVLSTNDRREVWQSKELHGRFYRALHGPDVDFLASVSWLRFGDLFGETEGFVCAIMDEVIMTNNYRKYIVKDGTVDICRACHCPGESLRHIISGCSRLANGEYLHRHNQVARIIHQQLALKYNLVESEVPYYKYVPDPVLENGHITLYWDRSIITDRTIVANKPDIVVIDRSERRTMIVDVTIPHDENLVKAEKDKQIKYLDLAHEVVNMWDVDSATIVPIVVTANGLMAKSLDQHLKRLSLGGWIKGLIQKAVLLDTARIVRRFLSLEP

SEQ ID NO: 11916 - protein, 1107 aa, Amphipyra tragopoginis
MKWTQSINENVMRAYYGSTEGGTNLTAYRVRMLTLFQELEPAINVSAQRLSDQVRVIQRNHRLDDAALDRLRLEVQNSHVTPVPSQTAVHQVNISVVPPRSDCVDGDVDDRAVTVSSQYNDQLRSALEDAIREYRANPELRPRLPRLPMHNKNRALVCALDSLLSSYFESSEDLGDTHSILYCAACRVANVKFNNSERATRPKPAVPAWQCRIERRIDGARALIGKLICFREGNTRPRVMRFVRRAFSGTGISPREYMSRVTERIDFLKQKVCAWASRIRRYKRRVERYTQNRMFQCDQRWVYRAWERPDQGVSDGRLPDDDAMNSFWRSIWSVPVIHTEGDWMRDIERACEPIEEMGEILISPQDVASAARPLPNWKSPGPDGLHNFWIKWLRSSHARLASQFQSSLESGSLPQFFTTGVTHLLHKSGSTAEPKNYRPITCLPTVYKLLTSILRSKINTHIENNSVMSSSQNGCRNGSRGTKELLLIDMAISQQVRRSRKNLSTCWIDYKKAYDSVPHTWLTRVLELYKINATLRTFLTSCMGQWRTVLRYPGCPQIRGSGEPIRIERGIFQGDSLSPLWFCLALNPLSTLLEGSGLGYPLRRGGQVISHLLYMDDLKLFAPTKLQLVELLKVTETFSNSIRMEFGVDKCAVMHDRRGGIMESEGLQLSDSIHLRSLSANDTYKYLGMSEGLGISDADMKQSLKERFFGRLKKVLKSLLSGGNKVRAFNGWVMPVLMYSFGILKWTQTELDALDRRVRTLLTAYRMHHPRSSVMRLYIPRKCGGRGLLNAKTLHNREVCSLREYFLHADAGMHRDVVAVDKGLTPLSLAKENWRKPVVLSTNDRREVWQSKELHGRFYRALHGPDVDFQASVSWLRFGDLFGETEGFVCAIMDEVIMTNNYRKYIVRDGTVDICRACHCPGESLRHIISGCSRLANGEYLHRHNQVARIIHQQLALKYNLVESEVPYYRYVPDPVLENGHITLYWDRSIITDRTIVANKPDIVVIDRSERRTMIVDVTIPHDENLVKAEKDKQIKYLDLAHEVVNMWDVESAIIVPIVVTANGLMAKSLDQHLKRLSLGSWIKGLIQKAVLLDTARIVRRFLSLEP

SEQ ID NO: 11917 - protein, 1080 aa, Amphipyra tragopoginis
MLSLFQALEPAVNVSAQRLSDQVRVIQRDHRLDDAALDRLRNEMQNSHVTPLPAQIRTQPLVPPAVPLEPNHGDEEEEDRAISAGTQCSELMRSALEDALREFRSTPPELRPRLPRLPMHNKNRALVCALDLLLPNVFESSEDLGDTHSILYCAAVAACRVAHVKFPNNNRATRPKSAVPAWQCRIERRIDEARVLIGKLTCFREGNRRPRVMRFVRRAFSGTDIGPGEYVSRITERIDFLKQKVYAWANRIRRYRRRVDRYTQNRIFQSDQRWVYRTWERPDQGVSDAHLPDNDVMNAFWRNIWSVPVTHTEGDWMQEVQRACEPIQEMGAVTIGPQDVASAVRPMPNWKSPGPDGLHNFWIKWLRSSHARLASQFQSSLESGSLPSFLTTGVTHLLFKSGSTAEPKNYRPITCLPSVYKLLTSILRAKLNHHIDSNAIMCATQNGCKNGSRGTKELLLIDMAISQQVRRSRKDLSTCWIDYKKAYDSVPHTWLMRVLELYKINATLRTFLMSCMGQWRTVLHYPGCRQIQGNGELIRIERGIFQGDSLSPLWFCLALNPLSTLLEGSGLGYRLRRGGQVISHLLYMDDLKLFAPNNLQLLELLKVTETFSNSIRMEFGVDKCAVMHVKRGRIMESVGTQLSDFIHLRSLSSTETYKYLGMSEALGINEADMKQSLRERFFGRLIKVLKSLLSGGNKVRAFNGWVMPVLMYSFGILRWTQTELDALDRRVRTLLTAYRMHHPRSSVVRLYIPRKCGGRGFLNAKTLHNREVCSLREYFSQADVGMHRDVVAVDKGLTPLSLAKENWRKPVVLDTNGRRDVWRSKELHGRFYRALHGPDVDFLASVAWLRFGDLFGETEGFVCAIMDEVMMTNNYRKYIVKDGTVDICRACHCPGESIRHIVSGCSRLANGEYLHRHNLVARIIHQQLALKYNLVDTEVPYYRYVPDPVLENGHVTLYWDRSIITDRTIVANKPDIVVIDRLECRTMIVDITVPHDENLVKAENDKKIKYLDLAHEVVDMWDVDSAVIVPIVVTANGLIAKSLDQHLMRLSLGSWIKGLIQKAVLLDTARIVRKFLSLGP

SEQ ID NO: 11918 - protein, 1201 aa, Amphipyra tragopoginis
MLTRARTREARPPPPDSPLSSASQPPESSPTVSAVTPAAAVASSSSDEYFSPPTSPTPVRRQGRRRPPNSLGPRGPPAPSRVLATGGCVQRMKWTQSINENVMRAYYGSTEGGTNLTAYRVRMLTLFQELEPAINVSAQRLSDQVRVIQRNHRLDDAALDRLRLEVQSSRVTPVPSQTAVHHININVVPPRSDCVDGDVDDRAVTVSSQYNDRLRSALEDAIREYRANPELRPRLPRLPMHNKNRALVCALDSLLSSYFESSEDLVDTHSILYCAAVAACRVANVKFNNSERATRPKPAIPAWQCRIERRIDGARALIGKLICFREGNTRPRVMRFVRRAFSGTGISPREYMSQVTERIDFLKQKVCAWASRIRRYKRRVERYAQNRMFQCDQRWVYRAWERPDQGVSDGRLPDDDAMSSFWRSIWSVPVTHTEGDWTRDIERACEPIEEMGEILISPQDVASAARPLPNWKSPGPDGLHNFWIKWLRSSHARLASQFQSSLESGSLPQFLTTGVTHLLHKSGSTAEPKNYRPITCLPTVYKLLTSILRTKINTHVENNSIMSPSQNGCRNGSRGTKELLLIDMAISQQVRRSRKNLSTCWIDYKKAYDSVPHTWLMRVLELYKINTTLRTFLTSCMRQWRTVLRYPGCRPILGSGEPISIERGIFQGDSLSPLWFCLALNPLSTLLEGSGLGYPLRRGGQVVSHLLYMDDLKLFAPTKLQLVELLKVTETFSNSIRMEFGVDKCAVMHVRRGGIMESEGLQLSDSIHLRSLSANDTYKYLGMSEGLGISEADMKQSLGERFFGRLKKVLKSLLSGGNKVRAFNGWVMPVLMYSFGILKWTQTELDALDRRVRTLLTANRMHHPRSSVMRLYIPRKCGGRGLLNAKTLHNREVCSLREYFLHADAGMHRDVVAVDKGLTPLNLAKENWRKPVVLSTNDRREVWQSKELHGRFYRALHGPDVDFLASVSWLRFGDLFGETEGFVCAIMDEVIMTNNYRKYIVKDGTVDICRACHCPGESLRHIISGCSRLANGEYLHRHNQVARIIHQQLALKYNLVESEVPYYKYVPDPVLENGHITLYWDRSIITDRTIVANKPDIVVIDRSERRTMIVDVTIPHDENLVKAEKDKQIKYLDLAHEVVNMWDVDSATIVPIVVTANGLMAKSLDQHLKRLSLGGWIKGLIQKAVLLDTARIVRRFLSLEP

SEQ ID NO: 11919 - protein, 1201 aa, Amphipyra tragopoginis
MLTRSKARARNHHAHPPPPDSSPSSASQQQELDPAPPAAAVASSSSDEYFSPPSSPPPVRRRGGARPPASLGLRDRPAPNRVPAAGGNVSRMRWTQSINENVMRAYYGATEGGINLTAYRDRMLSLFRVLEPAINVSTQRLSDQVRFIQRNRRLDDAVLERLRSEEQNNRAVTPPVQAAEQPQLLAVAPRPIHVDGESDGAVINVSSQCSDELRSALEGAILEYRATPPELKPRLPRLPMHKKNRALVCALDSLLSNYFDGSEDLGDTHSILYCAAIAACRVAHVKLTQNERATRPKPAVPAWQCRIERRIDGARALIGKLICFREGNTRPRVMRFVRRAFSGTDISPRDYMSRVTERIDFLKQKVYAWANRIRRYKRRVERYTQNRTFQSDQRRVYRTWERPVPGVSDMRLPDDDAMSSFWRSIWSVPVAHTEGDWMRDIERACETIPEMGEIVISPQDVATAARPLPNWKSPGPDGLHNFWIKWLRSSHACLASQFQSSLESGSLPQFLTTGVTHLLYKSGSTAEPKNYRPITCLPTVYKLFTSILRVKISNHIDNNYILSPSQNGCRSGSRGTKELLLIDMAISQQVRRSRKDLSTCWIDYKKAYDSVPHTWLMRVMELYKINTTLRTLLMSCMRQWRTVLRYPGCREILGRGEPIRIERGIFQGDSLSPLWFCLALNPLSTLLEGTRLGYRLRREGQVISHLLYMDDLKLFAPTDLQLMELLKVTENFSNSIRMEFGVDKCAVMHVKRGGIVESEGIQLSNSIQLRSLSPTETYKYLGMSAALGISEADMRQSLRERFFGRLNKVLKSVLSGGNKVRAFNGWVMPVLMYSFGILKWTQTDLDALDRRVRALLTVHRMHHPRSSVMRLYIPRKCGGRGFLNAKTLHNREVYSLREYFLQAEGEMHRDVVAVDRGLTPLALAKENWRKPVVLSTNDREEVWQSKELHGRFYRALHGPDVDFSASVSWLRFGDLFGETEGFVCAIMDEVMMTNNYRKYIVKEGTVDICRACHRPGESIRHIVSGCSRLANGEYLHRHNLVARIIHQQLALKYNLVESEVPYYRYVPDPVLENGHATLYWDRSIITDRTIVANKPDIVVIDRSERRTMIVDITVPHDENLVKAEKDKQLKYLDLAHEVVAMWDVDSAVIVPIVVTANGLIAKSLDQHLKRLSLDGWIKGLIQKAVLLDTARIVRRFLSLEP

SEQ ID NO: 11920 - protein, 1198 aa, Amphipyra tragopoginis
MLTRARSKAARPPPPDSPLSSASQPPELGPPVTPAAAAASSSSDEYFSPPTSPRPVRRQGRHRPPTSLGPRGPPAPSRVLATGGCVQRMKWTQSINENVMRAYYGSTEGGTNLTAYRVRMLTLFQELEPAINVSAQRLSDQVRVIQRNHRLDDAALDRLRLEVQNSRVTPFPSQTAVHEVNINIVPPRSDYVDGDMDDRAVTVSSQYNDQLRSALEDAIREYRANPELRPRLPRLPMHNKNRALVCALDSLLSSYFESSEDLGDTHSILYCAAVAACRVANVKFNNSERATRPKPAVPAWQCRIERRIEGARALIGKLICFREGNTRPRVMRFVRRAFSGTGISPREYMSQVTERIDFLKQKVCAWASRIRRYKRRVERYTQNRMFQCDQRWVYRAWERPDQGVSDGRLPDDDAMNSFWRSIWSVPVIHTEGDWMRDIERACEPIEEMGEILISPQDVASAARPLPNWKSPGPDGLHNFWIKWLRSSHARLATQFQSSLESGSLPQFFTTGVTHLLHKSGSTAEPKNYRPITCLPTVYKLLTSILRSKINTHIENNSVMSSAQNGCRNGSRGTKELLLIDMAISQQVRRSRKNLSTCWIDYKKAYDSVPHTWLMRVLELYKINATLRTFLMSCMGQWRTVLRYPGCRPIRESGEPIRIERGIFQGDSLSPLWFCLALNPLSTLLEGSGLGYPLRRGGQVVSHLLYMDDLKLFAPTKLQLVELLKVTETFSNSIRMEFGVDKCAVMHVRRGGIMESEGLQLSDSIHLRPLSANDTYKYLGMSEGLGISEADMKQSLRERFFGRLKKVLKSLLSGGNKVRAFNGWVMPVLMYSFGILKWTQTELDALDRRVRSLLTANRMHHPRSSVMRLYIPRKCGGRGLLNAKTLHNREVCSLREYFLHADAGMHRDVVAVDKGLTPLNLAKENWRKPVVLSTNDRREIWQSKELHGRFYRALHGPDVDFQASVSWLRFGDLFGETEGFVCAIMDEVIMTNNYRKYIVRDGTVDICRACHCPGESLRHIISGCSRLANGEYLHRHNQVARIIHQQLALKYNLVESEVPYYKYVPDPVLENGHITLYWDRSIIADRTIVANKPDIVVIDRSERRTMIVDVTIPHDENLVKAEKDKQIKYLDLAHEVVNMWDVDSATIVPIVVTANGLMAKSLDQHLKRLSLGGWIKGLIQKAVLLDTARIVRRFLSLEP

SEQ ID NO: 11921 - protein, 1201 aa, Amphipyra tragopoginis
MLTRSKARARNHHAHPPPPDSSPSSASQQQELDPAPPAAAVASSSSDEYFSPPSSPPPVRRRGGARPPASLGLRDRLAPNRVPAAGGNVSRMRWTQSINENVMRAYYGATEGGINLTAYRDRMLSLFQVLEPAINVSTQRLSDQVRVIQRNRRLDDAVLERLRSEEQNNRAVTPPVQAAEQPQLLAVSPRPIRVDGESDGAVINVSSQCSDELRSALEGAILEYRATPPELKPRLPRLPMHKKNRALVCALDSLLSNYFDGSEDLGDTHSILYCAAIAACRVAHVKLTQNERATRPKPAVPAWQCRIERRIDGARALIGKLICFREGNTRPRVMRFVRRAFSGTDISPRDYMSRVTERIDFLKQKVYAWANRIRRYKRRVERYTRNRTFQSDQRRVYRTWERPVPGVSDMRLPDDDAMSSFWRSIWSVPVAHTEGDWMRDIERACETIPEMGEIVISPQDVATAARTLPNWKSPGPDGLHNFWIKWLRSSHACLASQFQSSLESGSLPQFLTTGVTHLLYKSGSTAEPKNYRPITCLPTVYKLFTSILRVKISNHIDNNYILSPSQNGCRSGSRGTKELLLIDMAISQQVRRSRKDLSTCWIDYKKAYDSVPHTWLMRVMELYKINTTLRTLLMSCMRQWRTVLRYPGCREILGRGEPIRIERGIFQGDSLSPLWFCLALNPLSTLLEGTRLGYRLRREGQVISHLLYMDDLKLFAPTDLQLMELLKVTENFSNSIRMEFGVDKCAVMHVKRGGIVESEGIQLSNSIQLRSLSPTGTYKYLGMSEALGISEADMRQSLRERFFGRLNKVLKSLLSGGNKVRAFNGWVMPVLMYSFGILKWTQTDLDALDRRVRALLTVHRMHHPRSSVMRLYIPRKCGGRGFLNAKTLHNREVYSLREYFLQAEGEMHRDVVAVDRGLTPLALAKENWRKPVVLSTNDREEVWQSKELHGRFYRALHGPDVDFLASVSWLRFGDLFGEPEGFVCAIMDEVMMTNNYRKYIVKNGTVDICRACHRPGESIRHIISGCSRLSNGEYLHRHNLVARIIHQQLALKYNLVESEVPYYRYVPDPVLENGHATLYWDRSIITDRTIVANKPDIVVIDRSERRTMIVDITVPHDENLVKAEKDKQLKYLDLAHEVVAMWDVDSAVIVPIVVTANDLIAKSLDQHLKRLSLDGWIKGLIQKAVLLDTARIVRRFLSLEP

SEQ ID NO: 11922 - protein, 1204 aa, Amphipyra tragopoginis
MLTRSRAKALSTHLPPSASSLSSASQPPEPASIVSVVTPAAAVASSSSDEYFSPATTPPPARRRGRGRPPACLGPRGPPASDRVPAPGGSVQRMRWTQSMNENCMRAYFGATEGGTNLTAYRGRMLSLFQALEPAVNVSAQRLSDQVRVIQRSHMLDDTVLDRLRSEVQSSPVISPSSQVLAQQQNLAAAFPRPNHAGEEDDDRATNVSTQYNEELRSALEDAMREYRYTRSDLRPRIPRLPMNRKNRALVCALDSLLSNYFDGSEDLGDTHSILYCAAVAACRVAHVKFIDNERATRPKNAVPAWQCRIERRIAEARALIGKLICFREGNIRPRVMRFVRRAFSGTDVSPREYMSRVTERIDFLKQKVCAWANRIRRYRRRVDRYTQNRLFQSDERWVYRTWERPDQRVSDTHLPDNDVMNAFWRNIWSVPVTHTEGDWMQEVQRACEPIQEMGDIIISPQDVASAVRPMSNWKSPGPDGLHNFWLKWLRSSHARLASQFQSSLESGSLPQFLTTGVTHLLHKSGSTAEPKNYRPITCLPTVYKVLTSILRAKINNHIDNNSIMSASQNGCRNGSRGTKELLLIDMAISQQVRRSRKDLSTCWIDYKKAYDSVPHTWLMRVLELYKVNTTLCAFLTSCMGQWRTVLHYPGCRQIQRMGEPIRIERGIFQGDSLSPLWFCLALNPLSSLLEGSGLGYRLRRGGQVISHLLYMDDLKLFAPNNLQLLELLKVTETFSNSIRMEFGVDKCAVMHVKRGRIMESVGTQLSDSIHLRSLSSTETYKYLGMSEALGVNETGMKQSLKERFFGRLKKVFNSLLSGGNKVRAFNGWVMPVLMYSFGILKWTQTELDALDRRVRSLLTANRMHHPRSSVMRLYIPRKCGGRGFLNAKTLHNREVCSLREYFSQADVGMHRDVVAVDKGFTPLSLAKENWRKPVVLDTNDRREVWRSKELHGRFYRALHGPDVDFLASVAWLRFGDLFGETEGFVCAIMDEVMMTNNYRKYIVKDGTVDICRACHCPGESIRHIVSGCSRLANGEYLHRHNLVARIIHQQLALKYNLVDSEVPYYKYVPDPVLENGHVTLYWDRSIITDRTIVANKPDIVVIDRSERLTMIVDITVPHDENLVKAEKDKEIKYQDLAHEVVAMWDVDSAIIVPIVVTANGLIAKSLDQHLKRLSLGSWIKGLIQKAVLLDTARIVRKFLSLRP

SEQ ID NO: 11923 - protein, 1037 aa, Amphipyra tragopoginis
MQNSHAAPLPSQIRTQTLVPPAVPLESNYADEEGEDRAISAGTQYSEIMRSALEDALREFRSTPPELRPRLPRLPMHNKNRALVCALDSLLPNVFESSEDLGDTQSILYCAAVAACRVAHVKFPNDNRATRPKSAVPAWQCRIERRIGEARVLIGKLTCFREGNRRPRVMRFVRRAFSGTDIGPGEYASRVTERIDFLKQKVYAWANRIRRYRRRVDRYTQNRIFQSDQRWVYRTWERPDQGVSDTHLPDNDVMNAFWRNIWSVPVTHTEGEWMQEVQRACEPIQEMGAVTIGPQDVTSAARPMPNWKSPGPDGLHNFWIKWLRSSHARLASQFQSSLESGSLPAFLTTGITHLLFKSGSTAEPKNYRPITCLPTVYKLLTSILRAKLNHHIDSNDIMCATQNGCKNGSRGTKELLLIDMAISQQVRRSRKDLSTCWIDYKKAYDSVPHTWLMRVMELYKVNATLRTFLMSCMGQWRTVLHYPGCRQIQGNGELIRIERGIFQGDSLSPLWFCLALNPLSTLLEGSGLGYRLRRGGQVISHLLYMDDLKLFAPNNLQLVELLKVTETFSNSIRMEFGVDKCAVMHVKRGRIMESVGTQLSDSIHLRSLSSTETYKYLGMSEALGINEADMKQSLRERFFGRLIKVLKSLLSGGNKVRAFNGWVMPVLMYSFGILRWTQTELDALDRRVRTLLTAYRMHHPRSSVMRLYIPRKCGGRGFLNAKTLHNREVCSLREYFSQADVGMHRDVVAVDKGLTPLSLAKENWRKPVVLDAKGRMEVWRSKELHGRFYRALHGPDVDFLASVAWLRFGDLFGETEGFVCAIMDEVMMTNNYRKYIVKDGTVDICRACHCPGESIRHIVSGCSRLANGEYLHRHNLVARIIHQQLALKYNLVNTEVPYYKYVPDPVLENGHVTLYWDRSIITDRTIVANKPDIVVIDRLERRTMIVDITVPHDENLVKAENDKKIKYLDLAHEVVDMWDVDSAVIVPIVVTANGLIAKSLDQHLMRLSLGSWIKGLIQKAVLLDTARIVRKFLSLEP

SEQ ID NO: 11924 - protein, 1206 aa, Noctua pronuba
MLTRLRAKQLAHPPSPGSSLSSASQPPGRATSVSTLSPVAAVASSSSDEFFSPPSTPPPPPPQRRRGRGRPPAGLGPRGQQAPNRVPAAGGNVSRMRWTQSINEQVMRAYYGATEGGSNLTAYRGRMLSLFQVLEPAVSVSAQRLSDQVRVIQRNHMLDDTVLDRLRSESRSNPVTPASPMIAVQLQSATSASPRSDHGGEEDDSEVISVSTQCNAQLRSALEGAFREYRSTPPELRPRLPRLPMHKKNKALMCALDSQLSNYFDSSKDLADTHSMLYCGAVAACRVAHVKFPNNDRATRPKLAVPAWQCRIERRIGEARALIGKLICFREGNTRPRVMRFVRRAFSGTDISFRDYLARVTERIDFLKQKICAWASRIRRYKRRVERYTQNCTFQSDERWVYRAWERPDQGVTDTHLPDDDAICSFWRSIWSVPVSHIEGDWTREVERACDPIPQMGAINISPQDVACAVRPLPNWKSPGPDGLHNFWIKWFQRSHVRLASQFQSALESGSLPQFLTTGITHLLHKSGSTAEPKNYRPITCLPTVYKVLTSILRAKINHHIDSNSIMSASQNGCRNGSRGTKELLLIDMAISQQVRRSRKNLSTCWIDYKKAYDSVPHTWLMRVLELYKVDATLRTFLMSCMGHWRTVLRYPGCRQIQGNSEPIRIERGIFQGDSLSPLWFCLALNPLSTLLEGSGLGYRLRRGGQVISHLLYMDDLKLFAPNNLQLMKLLKVTETFSSAISMEFGVDKCAVMHVKRGEIMESVGTQLSDSIQLRSLSSTDTYKYLGMSEALGINTADMKQSLRERFFGRLNKVLSSLLSGGNKVRAFNGWVMPVLMYSFGILKWTQSELDALDRRVRALLTANRMHHPRSSVMRLYIPRKCGGRGFLNAKTLHNREVCSLREYFLEADVGMHRDVVSVDKGLTPLSLANENWRKPRVLDTNDRKEVWQGKELHGRFYRALHGPDVDFLASVSWLRFGDLFGETEGFVCAIMDEVMMTNNYRKYIVKDGTVDICRACHRPGESIRHIISGCSRLANGEYLHRHNLVARIIHQQLALKYNLVESEVPYYNYAPDPVLDNGNITLYWDRSIITDRTIVANKPDIVVIDRLERRAMIVDITVPHDENLVKAEKDKQFKYLDLAREVVDMWDVNTAVIVPIVVSANGLIAKSLDQHLRRLALGSWIKGLIQKAVLLDTARIVRRFLSQEP

SEQ ID NO: 11925 - protein, 1204 aa, Noctua pronuba
MLTRRRAKLLETHPPSPGSSLSSASQPPGRATSVSAVSPVAAVASSSSDEFFSPPSTPPSPRRRGRRPPAGLGPRGQQAPNRVPAAGGNVSRIRWTQSMNENVMRAYYGATEGGINLTAYRCRMLSLFQALEPAVNVSAQRLSDQVRVIQNNHRLDDATLDRLRSELRISPASNPLPSQNVTHVPAALPLRANQHAEEEDDRAVSAENLCNVELRSALEGAIREYRFMSPDLRPRLPRLPMNKKNRALVCALDALLPNFIESSANLCDTHSILYCTAVAACRVANVKFPKTDSATRPKSAVPVWQCRIERRINEARALIGKLICFREGNTRPRVMRFVRRAFSGTDISPREYISRVTERIDFLKQKVYAWANRIRRYRRRVDRYTQNRMFQSDERWVYRTWERPVTIQGVTDAHLPENDAMSAFWRSIWSVPVSHTEGDWMRVVEQACDSIPEMEAISISPLDVARVVRPLPNWKSPGPDGLHNFWIKWLQRSHACLASQFQSSLETGSLPSFFTTGVTHLLHKSGSTAEPKNYRPITCLPTVYKVLTSILRAKIVRHIDSNSIMSVSQNGCRNGSRGTKELLLIDMAISQQVRRSRRDLSTCWIDYKKAYDSVPHTWLRRVLELYKIDATLRTFLVSCMGQWSTVLLYPGCRQVLGNDEPIRIERGIFQGDSLSPLWFCLALNPLSTLLEDSGLGYRLRRGGQVISHLLYMDDLKIFAPSNLQLMELLKMTETFSSAIRMEFGVDKCAVMHVKRGEIMESVGTQLSDSIYLRSLSSTETYKYLGMSEALGINAADMKQSLKERFFGRLNKVLKSLLSGGNKVRAFNGWVMPVLMYSFGILKWTQTELDALDRKVRTLLTANRMHHPRSSVMRLYIPRKCGGRGFLNAKTLHNREVCSLREYFLETDVGMHRDVVSVDKGLTPLSLANENWRKLVVLDTNDRKEVWQSKELHGRFFRALHGPDVDLLASVSWLRFGDLFGETEGFVCAIMDEVIMTNNYRKYIVKDGTVDICRACHRPGESIRHIVSGCSRLANGEYLHRHNLVARIIHQQLALQYNLVGTEVPYYKYVPDPVLENGHATLYWDRSIITDRTILANKPDIVVIDRRERRAMIVDITVPHDENLVKAENDKKIKYLDLAHEVVDMWDVDSAIIVPIVVTVNGLIAKSLDQHLRRLSLRGWVKGLIQKAVLLDTARIVRRFLSLEP

SEQ ID NO: 11926 - protein, 1206 aa, Noctua pronuba
MLTRLRAKQLAHPPSPGSSLSSASQPPGRATSVSTLSPVAAVASSSSDEFFSPPSTPPPPPPQRRRGRGRPPAGLGPRGQQAPNRVPAAGGNVSRMRWTQSINEQVMRAYYGATEGGSNLTAYRGRMLSLFQVLELGVSVSAQRLSDQVRVIQRNHMLDDTVLDRLRSESRSNPVTPASPMIAVQLQSATSASPRSDHGGEEDDSEVISVSTQCNAQLRSALEGAFREYRSTPPELRPRLPRLPMHKKNKALMCALDSQLSNYFDSSKDLADTHSMLYCGAVAACRVAHVKFPNNDRATRPKLAVPAWQCRIERRIGEARALIGKLICFREGNTRPRVMRFVRRAFSGTDISFRDYLARVTERIDFLKQKICAWASRIRRYKRRVERYTQNRTFQSDERWVYRAWERPDQGVTDTHLPDDDAICSFWRSIWSVPVSHIEGDWTREVERACDPIPQMGAINISPQDVACAVRPLPNWKSPGPDGLHNFWIKWFQRSHVRLASQFQSALESGSLPQFLTTGITHLLHKSGSTAEPKNYRPITCLPTVYKVLTSILRAKINHHIDSNSIMSASQNGCRNGSRGTKELLLIDMAISQQVRRSRKNLSTCWIDYKKAYDSVPHTWLMRVLELYKVDATLRTFLMSCMGHWRTVLRYPGCRQIQGNSEPIRIERGIFQGDSLSPLWFCLALNPLSTLLEGSGLGYRLRRGGQVISHLLYMDDLKLFAPNNLQLMKLLKVTETFSSAISMEFGVDKCAVMHVKRGEIMESVGTQLSDSIQLRSLSSTDTYKYLGMSEALGINTADMKQSLRERFFGRLNKVLSSLLSGGNKVRAFNGWVMPVLMYSFGILKWTQSELDALDRRVRALLTANRMHHPRSSVMRLYIPRKCGGRGFLNAKTLHNREVCSLREYFLEADVGMHRDVVSVDKGLTPLSLANENWRKPRVLDTNDRKEVWQGKELHGRFYRALHGPDVDFLASVSWLRFGDLFGETEGFVCAIMDEVMMTNNYRKYIVKDGTVDICRACHRPGESIRHIISGCSRLANGEYLHRHNLVARIIHQQLALKYNLVESEVPYYKYAPDPVLDNGNITLYWDRSIITDRTIVANKPDIVVIDRLERRAMIVDITVPHDENLVKAEKDKQFKYLDLAREVVDMWDVNTAVIVPIVVSANGLIAKSLDQHLRRLALGSWIKGLIQKAVLLDTARIVRRFLSQEP

SEQ ID NO: 11927 - protein, 1197 aa, Noctua pronuba
MLTRAAARRARLSPPDPSLSSASPLPESSPIVSAVTPAVAVASSSSDEYFSPPTTPPPVRRRRGRRPPDGLGPRGPPASDRVPALGGSVQRMRWTQSINENVMRSYYGATEGGNNRTAYRVRMLSLFQVLEPAVNVSAQRLSDQVRVIQRNRMLDDTVLDRLRTEMQSSHVITPSAQAVVLPQSNTIPNRANDESNDMVTNVSTQCNEEIRSALEGAIREYRSMQPDLRPRIPRLPMHNKNRALVAVLDSQLSNYFDNCEDLTDAHSILYCAAVASCRVAHVKFSDDRATRLKPAVPAWQYRIERRIGGARALIGKLICFREGNTRPRVMRFVRRAFSGTDISPRDYMSRVTERIDFLKQKVYAWANRIRRYKRRVDRYTQNRTFQRDERWVYRAWERPDQGVADTRLPDDDAMCSFWRSIWSVPVSHTEDEWTREVERACDPVQEMGAITISPQDVVCAVRPLPNWKSPGPDGLHNFWIKWFTRSHARLATLFQSALESGSLPEFLTTGITHLLHKSGSTAEPKNYRPITCLPTVYKVLTSILRTKISKHINDNSIMSPSQNGCRNGSRGTKELLLIDMAISQQVRRFRRDLSTCWIDYKKAYDSVPHTWLMRVLELYKVDTTLRTFLMSCMGQWRTVLRYPGCRQIQRDSEPIRIERGIFQGDSLSPLWFCLALNPLSTLLEDSGLGYRLRRGGQVISHLLYMDDLKLFAPNDLQLMELLKVTETFSSAIRMEFGVDKCAVMHVKRGEIVESVRTQLSDSINLRSLSATETYKYLGMSEALGINVADMKQSLKERFFGRLKKVFNSLLSGGNKVRAFNGWVMPVLMYSFGILKWTQTELDALDRRVRTLLTAYRMHHPRSSIMRLYIPRRCGGRGFLNAKTLHNREICSLREYFLEADVGMHRDVVAVDKGLTPLSLAKENWRKPVVLDTNDRREVWQSKELHGRFFRALHGPDVDLSASVAWLRSGDLFGETEGFVCAIMDEVMMTNNYRRFIVKDGTVDICRACHRPGESIRHIISGCSRLANGEYLHRHNLVARIIHQQLALKYNLVESEVPYYKYVPDPVLENGCVTLYWDRSIITDRTIVANKPDIVVVDRSERRAMIVDITVPHDENLVKAEKDKQIKYLDLAHEVVDLWDVDSAIIVPIVVSAHGLIAKSFDQHLRRLSLGSWIKGLIQKAVLLDTARIVRRFLSLEP

SEQ ID NO: 11928 - protein, 1200 aa, Tinea trinotella
MLTRSRALHQSAQLISSGSSLSSASQPPGSTPTVSQVISVAAVASSSSDECFSPPMTPPSARRRGGGRPPASLEPRGPSASGGVPATSGRVQRMRWTQSINENVMRSYFGATEGGISLTAYRGRMLTLFQVLEPAVNVSAQRLSDQVRVIQRNRMLDDVVLDRLRLESRSSHVSAVSPPVAVQLQPSALPRPNNIEENDDDVTISVSNQYNEQLRSALEDAFREYRSTPPGLRPQIPRLPMHKKNRALVCALDSQLANYFESSKDLADTHSILYCAAVAVCRVAHVKFPNNDRAARLAVPAWQCRIERRIGEARALIGKLISFREGNTRPRVVRFVRRAFSGTDISSRDYQTRVTERIDFLKQKIYAWANRIRRYKRRVERYTQNRTFQSNERWVYRAWERPDQDVSDTCLPDDDAMSLFWRNIWSVPVRHTEGEWTREVERACDLIPEMGAINISPQDVACAVRPLPNWKSPGLDGLHNFWLKCFQRSHARLAAQFQSALELGSLPQFLTTGITHLLHKSGSTAEPKNYRPITCLPTVYKVLTSILRAKINKHIDTNCIMSASQNGCRSGSRGTKELLLIDVAISQQVRRSRRDLSTCWIDYKKAYDSVPHTWLMRVLELYKVDAALRTFLVSCMGQWRTVLHYPGCRRILGNGEPIKIERGIFQGDSLSPLWFCLALNPLSTLLDGSGQGYRLRRDGQVISHLLYMDDLKLFAPNNLQLMKLLKVTETFSSAISMEFGADKCATMHVKRGEIMESVGIQLSDSIHLRSLCSTETYKYLGMSEALGINAVDVKQSLKDRFFGRLNKVLNSLLSGGNKVRAFNGWVMPVLMYSFGILKWTQTELDALDRRVRTLLTANRMHHPRSSVMRLYIPRKCGGRGFLNAKTLHNREVCSLREYFLKTDVGMHRDVVAVDKGLTSLSLANENWRKPVVLDTNDRREVWQSKELHGRFFRALHGPDVDFLASVSWLRFGDLFGETEGFVCAIMDEVMMTNNYRKYIVKDGTVDICRACHRPGESIRHIISGCSRLANGDYLHRHNLVARIIHQQLALKYNLVESEVPYYRYVPDPVLENGNITLYWDRSIITDRTIVANKPDIVVIDRLERRTIIVDVAVPHDENLVKAEKDKQIKYLDLAREVVDMWEVDAAIIVPIVVTANGLIAKSLDKHLKRLSLGSWIKRLIQKAVLLDTARIVRRFLAQEP

SEQ ID NO: 11929 - protein, 1272 aa, Tinea trinotella
MLNNSINLYLSGLPLGLEFVYYGVPSVRYNLHKICLILLLCFNYFYSKDTLKRYEDPDSMILTHTQLLLINSEASCLMDLLWPVYSIISLIISLIIIIIIIIIIIISPVISVAAVASSSSDECFSPPTTPPSARRRGGGRPPASLEPRGPSALGGVPATSGRVQRMRWTQSINENVMRSYFGATEGGISLTAYRGRMLTLFQVLEPAVNVSAQRLSDQVRVIQRNRMLDDVVLDRLRLESRSSHVSPVSPPVAVQLQPSALPRPNNIQENDDDVTISVSNQYNEQLRSALEDAFREYRSTPPGLRPRIPRLPMHKKNRALVCALDSQLVNHFKSSKDLADTHSILYCAAVAVCRVAHVQFPNNDRAARLAVPAWQCRIERRIGEARALIGKLISFREGNTRPRVMRFVRRAFSGTDISSRDYQTRVTERIDFLKQKIYAWANRIRRYKRRVERYTQNRTFQSNERWVYRAWERPDQDVSDMCLPDDDAMSLFWRNIWSVPVGHTEGEWTREVERACDLIPEMGAIIISPQDVACAVRPLSNWKSPGLDGLHNFWIKYFQRSHARLAAQFQSALELGSLPQFLTTGITHLLHKSGSTAEPKNYRPITCLPTVYKVLTSILRAKIDKHIDTNCIMSASQNGCRSGSRGTKELLLIDVAISQQVRRSRRDLSTCWIDYKKAYDSVPHTWLMRVLELYKVDAALRTFLVSCMGQWRTVLHYPGCRRILGNGEPIKIERGIFQGDSLSPLWFCLALNPLSTLLDGSGQGYRLRRDGQVISHLLYMDDLKLFAPNNLQLMKLLKVTETFSSAISMEFGVDKCATMHVKRGEIMESVGTQLSDSIHLRSLCSTETYKYLGMSEALGINAVDVKQSLRDRFFGRLNKVLNSLLSGGNKVRAFNGWVMPVLMYSFGILKWTQTELDALDRRVRTLLTANRMHHPRSSVMRLYIPRKCGGRGFLNAKTLHNREVCSLREYFLKTDVGMHRDVVAVDKGLTSLSLANENWRKPVVLDANDRREVWQSKELHGRFYRALHGPDVDFLASVSWLRFGDLFGETEGFVCAIMDEVMMTNNYRKYIVKDGTVDICRACHRPGESIRHIISGCSRLANGDYLHRHNLVARIIHQQLALKYNLVESEVPYYRYVPDPVLENGNITLYWDRSIITDRTIVANKPDIVVIDRLERRTIIVDVAVPHDENLVKAEKDKQIKYLDLAREVVDMWEVDTAIIVPIVVTANGLIAKSLDEHLKRLSLGSWIKRLIQKAVLLDTARIVRRFLSQEP

SEQ ID NO: 11930 - protein, 900 aa, Tinea trinotella
MHKKNRALVCALDSQLVNHFKSSKDLADTHSILYCAAVAVCRVAHVQFPNNDRAARLAVPAWQCRIERRIGEARALIGKLISFREGNTRPRVMRFVRRAFSGTDISSRDYQTRVTKRIDFLKQKIYAWANRIRRYKRRVERYTQNRTFQSNERWVYRAWERPDQDVSDMCLPDDDAMSLFWRNIWSVPVGHTEGEWTREVERACDLIPEMGAIIISPQDVACAVRPLSNWKSPGLDGLHNFWIKYFQRSHARLAAQFQSALELGSLPQFLTTGITHLLHKSGSTAEPKNYRPITCLPTVYKVLTSILRAKIDKHIDTNCIMSASQNGCRSGSRGTKELLLIDVAISQQVRRSRRDLSTCWIDYKKAYDSVPHTWLMRVLELYKVDAALRTFLVSCMGQWRTVLHYPGCRRILGNGEPIKIERGIFQGDSLSPLWFCLALNPLSTLLDGSGQGYRLRRDGQVISHLLYMDDLKLFAPNNLQLMKLLKVTETFSSAISMEFGVDKCAIMHVKRGEIMESVGTQLSDSIHLRSLCSTETYKYLGMSEALGINAVDVKQSLRDRFFGRLNKVLNSLLSGGNKVRAFNGWVMPVLMYSFGILKWTQTELDALDRRVRTLLTANRMHHPRSSVMRLYIPRKCGGRGFLNAKTLHNREVCSLREYFLKTDVGMHRDVVAVDKGLTSLSLANENWRKPVVLDANDRREVWQSKELHGRFYRALHGPDVDFLASVSWLRFGDLFGETEGFVCAIMDEVMMTNNYRKYIVKDGTVDICRACHRPGESIRHIISGCSRLANGDYLHRHNLVARIIHQQLALKYNLVESEVPYYRYVPDPVLENGNITLYWDRSIITDRTIVANKPDIVVIDRLERRTIIVDVAVPHDENLVKAEKDKQIKYLDLAREVVDM

SEQ ID NO: 11931 - protein, 1067 aa, Spilosoma lubricipeda
MVLLYKNLKIHFINGPTFETIYKYLLYYRISNSPFFITDCNQSINQPFTNNNNNNNNKYVDEQVESEVMTVSTQCNDRIRRALEDAIQEYRHVDYKNRPRLPRLPIHKRNLALVSALNSLLPDYFGNSEDLSDTHSILYCAAIAVCRVAGVKFVEQITTTRPKNEAPAWQCRIERRIAETRTLIGKLITFQSGNTRPRVMRFVKQAFLGTTISPQQYMSSVTERIDFLKQKVYAWANRIRRYRKRVDRFIQNRMFQRNEKWVYRKWEEPSPRVGEGRFPDENVTNTFWRNIWSVPVTHTEGNWYRDVERSCESITSMEPITISKDDIGCAVRSLPNWKSPGPDGLHNFWLKWFRSSHACLASQYQAAVDSGSLPQFLTTGITHLLYKSGSAMDPKNFRPITCLPTMYKLLTSILRLKISTHINNNLIMSVSQNGCRSGSRGTKELLIIDMTISQQVRRNRKSLATCWIDYKKAYDSVPHTWLLRVLELYKIDTTLCTFLKACMGQWRTVLRYPGCRQTAVNDVLINIERGIFQGDSLSPLWFCLALNPLSALLEDSGLGYRLQKDDQVISHLFFMDDLKLLAPTKLQLTALLKVTENFSNSIKMEFGVDKCAVMYAKKGVIVESEGTELSDSTRLRSLSATETYKYLGFSQSLGIPEPDMKQSLRERFFGRLKKVLKSLLSGGNKVRAYNGWVMPVLMYSFGILRWTQTELDALDRRVRTLLTAFRMHHPRSSVMRLYIPRKFGGRGLLNAKTLHNREIYNLREYFLHTDVGVHRSVVTVDTGLTPLALAKENWRKPVVLSTNDRREVWKGKELHGRFYRALNGPDIDFKASTSWLRYGDLFGESEGFVCAIMDEVIITNNYRKYILKDGTVDICRACHRPGESIRHIISGCSRLANGEYLHRHNQVARIVHQQLALKYHLVSSEVPYYRYVPDPVLENGRATLYWDRSIITDRTIVANKPDIVVIDRLERRAMIVDIAVPHDENLVKVEKEKQIKYLDLSHEIVDMWNVDSAIIVPIVVSAHGLIAKSLDQHLKRLTLEGWIKGLMQKAVLLDTARIVRRFLSLEP

SEQ ID NO: 11932 - protein, 1202 aa, Spilosoma lubricipeda
MRISDKMLTRARARALLPSSDSSLRSALPSSDARTEVPTVAEASSSSSSDEFFSPPTSPIPVRRQGRDRPPTSLGSRGPLTSNRTPATGGDVRRMKWTQSINENVMRAYFRATELGTNLTAYRVRLVSLFQELEPAVNVSAQRLSDQVRAIQRCHLLDDTVLERICSDIRNSLTVPSSPHVVDVVTNSTPQNEDVSELVVSETISVSTLYNDKIRSTLEDVIREYRCVNFNNRPRLPRLPIHKRNLALVSALDSLLPDYFGNSEDLSDTHSILYCAAIAVCRVAGIKFAENITTTRPENTVPAWQCRIERRIAGARTLIGKLISFRSGNTRPKVMRFVKQAFLGTTISPQQYMSCVTERIDFLKQKVYAWANRIRRYRKRIDRYNQNRMFQRNEKWVYRKWENLSPCMSDGQVPDENATNSFWRSIWSVPVAHTEGDWYRDVERSCESLLPMELINIDKEDVSCAVRSLPNWKAPGPDGLHNFWLKWFRSSHACLASQFQTALDSGSLPQFLTTGITHLLYKSGSAMDPKNFRPITCLPTLYKLLTSILRLKITTHINQNSILSVSQNGCRNGTRGTKELLIIDMTISQQVRRNRKSLATCWIDYKKAFDSVPHTWLLKVLELYKIDTTLCTFLKSCMRQWRTVLRYPGCRQTAVNDVPIKIERGIFQGDSLSPLWFCLALNPLSTLLEGSGLGYRLQKEAPVISHLFYMDDLKLFAPTKLQLTALLRVTENFSNSIKMEFGIDKCAVMHVKKGVIVESEGIELSDSTRLRSLSVTETYKYLGFSQSLGIPESDMKQSLRERFFGRLKKVLRSLLSGGNRVRAYNGWVMPVLMYSFGILRWTQTELDALDRRVRTLLTAFRMHHPRSSVMRLYIPRKFGGRGLLNVKTLHNREIYNLREYFLHTDVGVHRSVVAMDTGLTPLALAKENWRKPVVLGTNERREVWKGKELHGRFYRALNGPDIDFKASTSWLRYGDLFGETEGFVCAIMDEVIMTNNYRKYILKDGTVDICRACHRPGESIRHIISGCSRLANGEYLHRHNQVARIVHQQLALKYKLVNSEVPYYRYVPDPVLENGRATLYWDRSIITDRTIVANKPDIVVIDRSERRAMIVDIAVPHDENLVKVEKEKQIKYLDLSHEIVDMWDVDSVIIVPIVVSVHGLIAKSLDQHLKRLTLDGWIKGLMQKAVLLDTARIVRRFLSLEP

SEQ ID NO: 11933 - protein, 1198 aa, Ochropleura plecta
MITRLAARQHARLPPPDSPLSSASPPPEPSLIVSAVTPAVAVASSSSDEYFSPPTTPPPACRRGGRRPPDGLGLRGPLASDRVPAPGGSVQRMRWTSSINENVMRSYYGATEGGNNLTAYRVRMLSLFQVLEPAVNVSAQRLSDQVRVIQRNRMLDDTVLDRLRTEMQSSQVITSSSQAVVPPQSHQLVSHADEVSNDMATNVSTQCNEEMRIALEGAIQEYRYISPELRPRLPRLPMHNKNRALVAVLDSQLSNYFDNCENLTDAHSILYCAAVAACRVAHVKFPDDGATRPKPAVPFWQCRIERRIGVARALIGKLICFREGNTRPRVMRFVRRAFAGTDISPPDYMSHITERIDFLKQKVYAWANRIRRYKRRVERYTLNRTFQSDERWVYRAWERPDQGVSDTHLPDDDAMCLFWRNIWSVPVSHTEGEWTREVERACDPIPEMGALTISPQDVACAVRPLPNWKSPGPDGLHNFWLKWIQRSHARLATLFQTALESGSLPKFLTTGITHLLHKSGSTTEPKNYRPITCLPTIYKVLTSILRAKITKHIDDNSIMSASQNGCRNGSRGTKELLLIDMAISQQVRRSRRHLSTCWIDYKKAYDSVPHTWLMRVLELYKVDATLCTFLSSCMRQWNTVLRYPGCRQIQRNSEPIRIERGIFQGDSLSPLWFCLALNPLSTLLEDSGLGYRLRRGGRVISHLLYMDDLKLFAPNDSQLMELLKVTETFSSAISMEFGVDKCAVMHVKRGEIVESVGTQLSDSIHLRSLSANETYKYLGMSEALGINVADMKQSLKERFFGRLRKVFNSLLSGGNKVRAFNGWVMPVLMYSFGILKWTQTELDALDRKVRTLLTAYRMHHPRSLVMRLYIPRSCGGRGFLNAKTLHNREICSLREYFLEADVGMHRDVVTVDKGFTPLSLAKENWRKPVVLDTNDRREVWQSKELHGRFFRALHGPDVDQPASVAWLRSGDLFGETEGFVCAIMDEVMMTNNYRRFIVKDGTVDICRACHRPGESIRHIISGCSRLANGEYLHRHNLVARIIHQQLALKYSLVESEVPYYRYEPDPVLEHGNITLYWDRSIITDRTIVANKPDIVVVDRSERRAMIVDITVPHDENLVKAEKDKQIKYIDLAREVVDMWDVDSAIIVPIVVSANGLIAKSLDQHLRRLSLGSWIKGLIQKAVLLDTARIVRRFLSLEP

SEQ ID NO: 11934 - protein, 868 aa, Ochropleura plecta
MRFVRRAFAGTDISPPDYISRVAERIDFLKQKVYAWANRIRRYKRRVERYTQNRTFQSDERWVYRAWERPDQGVSDTHLPDDDAMCLFWRNIWSVPVSHTEGEWTREVERACDPIPEMGALTISPQDVACAVRPLPNWKSPGPDGLHNFWIKWIQRSHVCLAALFQSALESGSLPKFLTTGITHLLHKSGSTAEPKNYRPITCLPTLYKVLTSILRAKITKHIDDNSIMSASQNGCRNGSRGTKELLLIDMAISQQVRRSRRHLSTCWIDYKKAYDSVPHTWLMRVLDLYKIDATLRTFLISCMRQWSTVLRYPGCRQIQRNSEPIRIERGIFQGDSLSPLWFCLALNPLSTLLENSGLGYRLRRGGQVISHLLYMDDLKLFAPNDLQLMELLKVTETFSSAIRMEFGVDKCAVMHVKRGEIVESVGTRLSDSINLRSLSATETYKYLGMSEALGINVADMKQSLKERFFGRLRKVFNSLLSGGNKVRAFNGWVMPVLMYSFGILKWTQTELDALDRKVRTLLTAFRMHHPRSSVMRLYIPRSCGGRGFLNAKTLHNREVCSLREYFLETDVGMHRDVVAVDKGLTPLSLAKENWRKPVVLDTNDRREVWQSKELHGRFFRALHGPDVDQLASVAWLRSGDLFGETEGFVCAIMDEVMMTNNYRRFIVKDGTVDICRACHRPGESIRHIISGCSRLANGEYLHRHNLVARIIHQQLALKYNLVESEVPYYRYEPDPVLEHGNITLYWDRSIITDRTIVANKPDIVVVDRSERRAMIVDITVPHDENLVKAEKDKQIKYIDLAREVVDMWDVDSAVIVPIVVSANGLIAKSLDQHLRRLSLGSWIKGLIQKAVLLDTARIVRRFLSLEP

SEQ ID NO: 11935 - protein, 1200 aa, Hecatera dysodea
MLTRSRTRAQTTQSTSSGSSLSSASQPPGPTPAVSPEIPVAAVASSSSDEYFSPPTTPPPARRRGRGRPPTSLGPRGPPASDRVPAIGGSVQRMRWTQSINENVMRSYFGATEGGTNLTAYRGRMLSLFRVLEPAVNVSAQRLSDQVRVIQRNRMLDDAVLDRLRLESRSSRVSPASPPAAVQIQPSISPRPDHVSEDVDDGAITVSNQCNERLRSALEDAFREYRSTPPGLRPRLPRLPMHNKNRALVCALDSQLENCFNSSKDLADTHSILYCAAAAACRVAHVKFPSSDRAARPAVPAWQCRIERRIGEARALIGKLICFREGNTRRRVMRFVRRAFSGTDISPRDYLTRVTERIDFLKQKVYAWASRIRRYKRRVERYTRNRTFQSNERWVYRAWERPDQVVTDTHLPDDDAMCSFWRSIWSVPVSHTEGDWTREVERTCDPIPEMGAITISPQDVARAVRPLPNWKSPGPDGLHNFWIKWFTRSHARLASQFQSALESRSLPQFLTTGITHLLHKSGSTAEPKNYRPITCLPTVYKVLTSILRAKINDHIESNSIMSTSQNGCRNGARGTKELLLIDVAISQQVRRSRKDLSTCWIDYKKAYDSVPHTWLMRVLELYKVNTVLRTFLMSCMGQWRTVLHYPGCRQTQANSEPIRIERGIFQGDSLSPLWFCLALNPLSTLLEGSGQGYRLRRGGQVISHLLYMDDLKLFAPNNLQLMKLLKVTETFSSDISMGFGVDKCAVMHVKRGEIMESVGTQLSDSIYLRSLCSTETYKYLGMSEALGINATSVKQSLKERFFGRLNKVLNSLLSGGNKVRAFNGWVMPVLMYSFGILKWTQTELDALDRRVRSLLTANRMHHPRSSVMRLYIPRKCGGRGFLNAKTLHNREVCSLREYFLEADVGMHRDVVAVDKGLTPLSLANENWRKPVVLDTNDRREVWQSKELHGRFYRVLHGPDVDFLASVAWLRFGDLFGETEGFICAITDEVMMTNNYRKYIVKDGTVDICRACHRPGESIRHIISGCSSLANGDYLHRHNLVARIIHQQLALKYNLVESEVPYYRYVPDPVLENGNCTLYWDRSIITDRTIVANKPDIVVIDRLERRAMIVDIAVPHDENLVKAEKDKQSKYLDLAREVVDMWNVNTAVIVPIIVTANGIIAKSLDQHLKRLSLGSWIKGLIQKAVLLDTARIVRRFLSREP

SEQ ID NO: 11936 - protein, 1200 aa, Hecatera dysodea
MLTRSRTRAQTTQSTSSGSSLSSASQSPGPTPAVSPEIPVAAVASSSSDEYFSPPTTPPPARRRGRGRPPTSLGPRGPPASDRVPAIGGSVQRMRWTQSINENVMRSYFGATEGGTNLTAYRGRMLSLFQVLEPAVNVSAQRLSDQVRVIQRNRMLDDAVLDRLRLESRSSRVSPASPPAAVQIQPSISPRPDHVSEDVDDGAITVSTQCNERLRSALEDAFREYRSTPPGLRPRLPRLPMHNKNRALVCALDSQLENCFNSSKDLADTHSILYCAAAAACRVAHVKFPNSDRAARPAVPAWQCRIERRIGEARALIGKLICFREGNTRRRVMRFVRRAFSGTDISPRDYLTRVTERIDFLKQKVYAWASRIRRYKRRVERYTQNRTFQSNERWVYRAWERPDQVVTDTHLPDDDAMCSFWRSIWSVPVSHTEGDWTREVERTCDPIPEMGAITISPQDVARAVRPLPNWKSPGPDGLHNFWIKWFTRSHARLASQFQSALESRSLPQFLTTGITHLLHKSGSTAEPKNYRPITCLPTVYKVLTSILRAKINDHIESNSIMSTSQNGCRNGARGTKELLLIDVAISQQVRRSRKDLSTCWIDYKKAYDSVPHTWLMRVLELYKVNTVLRTFLMSCMGQWRTVLHYPGCRQTQANSEPIRIERGIFQGDSLSPLWFCLALNPLSTLLEGSGQGYRLRRGGQVISHLLYMDDLKLFAPNNLQLMKLLKVTETFSSDISMEFGVDKCAVMHVKRGEIMESVGTQLSDSIYLRSLCSTETYKYLGMSEALGINATSVKQSLKERFFGRLNKVLNSLLSGGNKVRAFNGWVMPVLMYSFGILKWTQTELDALDRRVRSLLTANRMHHPRSSVMRLYIPRKCGGRGFLNAKTLHNREVCSLREYFLEADVGMHRDVVAVDEGLTPLSLANENWHKPVVLDTNDRREVWQSKELHGRFYRVLHGPDVDFLASVAWLRFGDLFGETEGFICAITDEVMMTNNYRKYIVKDGTVDICRACHRPGESIRHIISGCSSLANGDYLHRHNLVARIIHQQLALKYNLVESEVPYYRYVPDPVLENGNCTLYWDRSIITDRTIVANKPDIVMIDRLERRAMIVDIAVPHDENLVKAEKDKQSKYLDLAREVVDMWNVNTAVIVPIIVTANGIIAKSLDQHLKRLSLGSWIKGLIQKAVLLDTARIVRRFLSREP

SEQ ID NO: 11937 - protein, 1200 aa, Hecatera dysodea
MLTRSRTRCQNTRLTPSDSSLSSASQPPGPTPPVSPEIPVAAVASSSSDEYFSPPTTPPPARRRGRGRPPNSLGPRGPPASDRVPAIGGSVQRMRWTHSINENVMRSYFGATEGGTNLTAYRGRMLSLFQVLEPAVNVSAQRLSDQVRVIQRNRMLDDAVLDRLRLESRSSRVSPASPPAAVQIQPSISPRPDHVSEDVDDGTISVSTQCNERLRSALEDAFREYRSTPPELRPRLPRLPMHNKNRALVCALDSQLSIYFDSSENLTDTHSILYCGAAAACRVAHVKLPNSDRVARPAVPAWQCRIERRIAEARALIGKLICFREGNTRRRVIRFVRRAFSGTDISPRDYLTRVTERIDFLKQKVYAWANRIRRYKRRVERYTQNRIFQNNERWVYRAWERPDQGVTDTRLPDDEAMLSFWRNIWSVPISHTEGDWTREVERACDSIPEMGAINISPQDVARAVRPLPNWKSPGPDGLHNFWIKWLTRSHARLASQFQSALESRSLPQFFTTGITHLLHKSGSTADPKNYRPITCLPTVYKVLTSILRAKINDHIESNSIMSTSQNGCRSGARGTKELLLIDVAISQQVRRSRKDLSTCWIDYKKAYDSVPHTWLMRVLELYKVDAVLRAFVMSCMGQWRTVLHYPGCRQTQANSEPIRIERGIFQGDSLSPLWFCLALNPLSTLLEGSGQGYRLRRGGQVISHLLYMDDLKLFAPNNLQLMKLLKVTETFSSDISMEFGVDKCAVMHVKRGEIMESVGTQLSDSIHLRSLCSTETYKYLGMSEALGINATSVKQSLKERFFGRLNKVLNSLLSGGNKVRAFNGWVMPVLMYSFGILKWTQTELDALDRRVRSLLTANRMHHPRSSVMRLYIPRKCGGRGFLNAKTLHNREVCSLREYFLEADVGMHRDVVAVDKGFTPLSLANENWRKPVVLDTNDRREVWQSKELHGRFYRVLHGPDVDFLVSVAWLRFGDLFGETEGFICAITDEVMMTNNYRKYIVKDGTVDICRACHRPGESIRHIISGCSSLANGDYLHRHNLVARIIHQQLALKYNLVESEVPYYRYAPDPVLENGNCTLYWDRSIITDRTIVANKPDIVVIDRLERRAMIVDIAVPHDENLVKAEKDKQSKYLDLAREVVDMWDVNTAVIVPIVVTANGIIAKSLDQHLKRLSLGSWIKGLIQKAVLLDTARIVRRFLSREP

SEQ ID NO: 11938 - protein, 868 aa, Hecatera dysodea
MRFVRRAFSGTDISPRDYLTRVTERIDFLKQKVYAWANRIRRYKRRVERYTQNRTFQGNERWVYRAWERPDQGVTDTRLPDDEAILSFWRNIWSVPVSHTEGDWTRKVERACDPIPEMGAINISPQDVARAVRPLPNWKSPGPDGLHNFWIKWFKGSHARLASQFQSALGSGSLPKFLTTGITHLLHKSRSTAEPKNYRPITCLPTVYKVLTSILRAKINNHIDSNSIMSASQNGCRNGSRGTKELLLIDVAISQQVRRSRRDLSTCWIDYKKAYDSVPHTWLMRVLELYKVDAVLRTFLMSCMGQWSTVLHYPGCRQTQANSEPIRIERGIFQGDSLSPLWFCLALNPLSTLLEGSGQGYRLRRGGQVISHLLYMDDLKLFAPNNLQLMKLLKVTETFSSDISMEFGVDKCAVMHVKRGEIMESVGTQLSDSILLRSLCSTETYKYLGMSEALGINATGVKQSLKERFFGRLNKVLNSLLSGGNKVRAFNGWVMPVLMYSFGILKWTQTELDALDRRVRSLLTANRMHHPRSSVMRLYIPRKCGGRGFLNAKTLHNREICSLREYFLEADVGMHRDVVAVDKGLTPLSLANENWRKPVVLDTNDRRVVWQSKELHGRFYRVLHGPDVDFLASVAWLRFGDLFGETEGFICAITDEVMMTNNYRKYIVKDGTVDICRACHRPGESIRHIISGCSSLANGDYLHRHNLVARIIHQQLALKYNLVESEVPYYRYAPDPVLENGNCTLYWDRSIITDRTIVANKPDIVVIDRLERRAMIVDIAVPHDENLVKAEKDKQSKYLDLAREVVDMWNVNTAVIVPIVVTANGIIAKSLDQHLKRLSLGSWIKGLIQKAVLLDTARIVRRFLSREP

SEQ ID NO: 11939 - protein, 868 aa, Mythimna impura
MRFVRRAFLGTDISPQNYLPCVTERIDFLKQKVYAWASRIRRYKRRVERYTQNRTFQSNERWVYRTWERPDQDVTDTRLPDDDAMCSFWRRIWSVPVSHIEGDWIREVERTCDLLPEMGAITISPQDVARAVRPLPNWKSPGPDGLHNFWIKWFQGSHARLASQFQSALESGSLPEFLTTGITHLLHKSGSTADPKNYRPITCLPTVYKVLTSILRAKINTHIETNSIMSASQNGCRNGSRGTKELLLIDMAISQQVRRSRKDLSTCWIDYKKAYDSVPHTWLMRVLELYKVDTTLRTFLMSCMRQWRTVLHYPGCRQIRENSEPIRIERGIFQGDSLSPLWFCLALNPLSTLLEGSGLGYRLKRGGQVISHLLYMDDLKLFAPNNLHLMELLKVTETFSSAIRMEFGVDKCAVMHVKRGEIMESVGTQLSDSIYLRSLCSTETYKYLGMSEALGINAADMKQSLKERFFGRLNRVLKSLLSGGNKVRAFNGWVMPVLMYSFGILKWTQTELDALDRRVRTLLTANRMHHPRSSVMRLYIPRKCGGRGFLNAKTLHNREVCSLREYFLETDVGMHRDVVAVDKGLTPLSLANGNWRKPIILDTNDRREVWQSKELHGRFYRALHGPDVDLLASVSWLRFGDLFGETEGFVCAIMDEVVMTNNYRKYIVKDGTADICRACHRPGESIRHIISGCSHLANGDYLHRHNLVARIIHQQLALKYNLVESEVPYYKYVPDPVLDNGSITLYWDRSIITDRTIVANKPDIVVIDRLERRTVIVDIAVPHDDNLVKAEKDKQTKYLDLAREVVDMWEVDTAVIVPIVVTANGLISKSLDQHLRRLSLSSWIKGLIQKAVLLDTARIVRRFLSPEP

SEQ ID NO: 11940 - protein, 1200 aa, Mythimna impura
MLTRAAARRARLPPPASSLSSASPPPESSPTVSAVTPAVAVASSSSDEYFSPPTSPPPARRRRGRRPPSGLGPRGPPASDRVPAPGGSVQRMRWTQSINENVMRAYYGATEGGNNLTAYRVRMLSLFQVLEPAVNVSAQRLSDQVRVIQRNHMLDDTVLDRLRTEMSNHAIAPSSQPVVPVMVPPSYHLSDHADEEITDMVTHVSTQCNNELRSALECAIREYRNMPLELRPRLPRLPMHNKNKALVAALDLQLSNYFDDCEDLTDAHSIMYCAAVAACRVAHVKFPSCDVSTRPKPAVPAWQCRIERRIGGARALIGKLICFREGNTRPRVMRFVRRAFSGTDISPRDYMSRVTERIDFLKQKVYAWANRIRRYKRRVERYTQNRTFRSNERWVYRAWERPDQGVTDTSLPDDDAMSSFWRSIWSVPVSHTEGDWTREVERACDPIPQMGAIDISPQDVARAVRPLPNWKSPGPDGLHNFWIKWFTRSHARLAYQFQSALESGSLPQFLTTGITHLLHKSGSTAEPKNYRPITCLPTVYKVLTSILRSKINSHIDKNLIMSPSQNGCRNGSRGTKELLLIDMTISQQVRRFRKDLSTCWIDYKKAYDSVPHTWLMRVLELYKIDTTLRTFLMSCMRQWSTVLRYPGCRHIQRNSEPVRIERGIFQGDSLSPLWFCLALNPLSTLLENSGLGYRLKRGGQVISHLLYMDDLKLFAPNNLQLMELLKVTETFSSAIRMEFGVDKCAVMHVKRGEVVESVGTQLTDSINLRSLSPTETYKYLGMSEALGINITDMKQSLKERFFGRLKKVFNSLLSGGNKVRAFNGWVMPVLMYSFGVLKWTQTELDALDRRVRTLLTAYRMHHPRSSVMRLYIPRKCGGRGFLNAKTLHNREVCSLREYFLATDVGMHRDVVAVDKGLTPLSLANENWRKPVVLDTNDRREVWQSKELHGRFFRAFHGPDVDQLASVAWLRFGDLFGETEGFVCAIMDEVIMTNNYRRFIVKDGTVDICRACHRPGESIRHIISGCSRLANGEYLHRHNLVARIIHQQLALKYSLVESEVPYYRYEPDPVLDNGHITLYWDRSIITDRTIVANKPDIVVVDRSERRAMIVDISVPHDENLVKAEKDKQIKYIDLAREVVDMWDVDSAIIVPIVVSANGLIAKSLDQHLRRLALGGWIKALIQKAVLLDTARIVRRFLSLEP

SEQ ID NO: 11941 - protein, 1143 aa, Mythimna impura
MLNDITLNALRIRYQYRVSRGTYLYRVPPMESIYIKAKYHSLINDEISETIIIIIINNLTAYRVRMLSLFQVLEPAVNVSAQRLSDQVRVIQRNHMLDDTVLDRLRTEMSNHAIAPSSQPVVPVMVPPSYHLSDHADEEITDMVTHVSTQCNNELRSALECAIREYRNMPLELRPRLPRLPMHNKNKALVAALDLQLSNYFDDCEDLTDTHSIMYCAAVAACRVAHVKFPSCDVSTRPKPAVPAWQCRIERRIGGARALIGKLICFREGNTRPRVMRFVRRAFSGTDISPRDYMSRVTERIDFLKQKVYAWANRIRRYKRRVERYTQNRTFRSNERWVYRAWERPDQGVTDTRLPDDDAMSSFWRSIWSVPVSHTEGDWTREVERACDPIPQMGAIDISPQDVARAVRPLPNWKSPGPDGLHNFWIKWFTRSHARLAYQFQSALESGSLPQFLTTGITHLLHKSGSTAEPKNYRPITCLPTVYKVLTSILRSKINSHIDKNLIMSPSQNGCRNGSRGTKELLLIDMTISQQVRRFRKDLSTCWIDYKKAYDSVPHTWLMRVLELYKIDTTLRTFLMSCMRQWSTVLRYPGCRHIQRNSEPVRIERGIFQGDSLSPLWFCLALNPLSTLLENSGLGYRLKRGGQVISHLLYMDDLKLFAPNNLQLMELLKVTETFSSAIRMEFGVDKCAVMHVKRGEVVESVGTQLTDSINLRSLSPTETYKYLGMSEALGINITDMKQSLKERFFGRLKKVFNSLLSGGNKVRAFNGWVMPVLMYSFGVLKWTQTELDALDRRVRTLLTAYRMHHPRSSVMRLYIPRKCGGRGFLNAKTLHNREVCSLREYFLATDVGMHRDVVAVDKGLTPLSLANENWRKPVVLDTNDCREVWQSKELHGRFFRAFHGPDVDQLASVAWLRFGDLFGETEGFVCAIMDEVIMTNNYRRFIVKDGTVDICRACHRPGESIRHIISGCSRLANGEYLHRHNLVARIIHQQLALKYSLVESEVPYYRYEPDPVLDNGHITLYWDRSIITDRTIVANKPDIVVVDRSERRAMIVDISVPHDENLVKAEKDKQIKYIDLAREVVDMWDVDSAIIVPIVVSANGLIAKSLDQHLRRLALGGWIKALIQKAVLLDTARIVRRFLSLEP

SEQ ID NO: 11942 - protein, 1200 aa, Mythimna impura
MLTRAAARRARLPPPASSLSSASPPPESSPTVSAVTPAVAVASSSSDEYFSPPTSPPPARRRRGRRPPSGLGPRGPPASDRVPAPGGSVQRMRWTQSINENVMRAYYGATEGGNNLTAYRVRMLSLFQVLEPAVNVSAQRLSDQVRVIQRNHMLDDTVLDRLRTEMSNHAIAPSSQPVVPVMVPPSYHLSDHADEEITDMVTHVSTQCNNELRSALECAIREYRNMPLELRPRLPRLPMHNKNKALVAALDLQLSNYFDDCEDLTDTHSIMYCAAVAACRVAHVKFPSCDVSTRPKPAVPAWQCRIERRIGGARALIGKLICFREGNTRPRVMRFVRRAFSGTDISPRDYMSRVTERIDFLKQKVYAWANRIRRYKRRVERYTQNRTFRSNERWVYRAWERPDQGVTDTRLPDDDAMSSFWRSIWSVPVSHTEGDWTREVERACDPIPQMGAIDISPQDVARAVRPLPNWKSPGPDGLHNFWIKWFTRSHARLAYQFQSALESGSLPQFLTTGITHLLHKSGSTAEPKNYRPITCLPTVYKVLTSILRSKINSHIDKNLIMSPSQNGCRNGSRGTKELLLIDMTISQQVRRFRKDLSTCWIDYKKAYDSVPHTWLMRVLELYKIDTTLRTFLMSCMRQWSTVLRYPGCRHIQRNSEPVRIERGIFQGDSLSPLWFCLALNPLSTLLENSGLGYRLKRGGQVISHLLYMDDLKLFAPNNLQLMELLKVTETFSSAIRMEFGVDKCAVMHVKRGEVVESVGTQLTDSINLRSLSPTETYKYLGMSEALGINITNMKQSLKERFFGRLKKVFNSLLSGGNKVRAFNGWVMPVLMYSFGVLKWTQTELDALDRRVRTLLTAYRMHHPRSSVMRLYIPRKCGGRGFLNAKTLHNREVCSLREYFLATDVGMHRDLVTVDKGLTPLSLANENWRKPVVLDTNDRREVWQSKELHGRFFRAFHGPDVDQLASVAWLRFGDLFGETEGFVCAIMDEVIMTNNYRRFIVKDGAVDICRACHRPGESIRHIISGCSRLANGEYLRRHNLVARIIHQQLALKYSLVESEVPYYRYEPDPVLDNGHITLYWDRSIITDRTIVANKPDIVVVDRSERRAMIVDISVPHDENLVKAEKDKQIKYIDLAREVVDMWDVDSAIIVPIVVSANGLIAKSLDQHLRRLALGGWIKALIQKAVLLDTARIVRRFLSLEP

SEQ ID NO: 11943 - protein, 991 aa, Mythimna impura
MFYACSVVLELYFTGKPWRRDQSPLPTKGNNNNKKNRALVCALDSQLSNCFDSSEDLTDTHSILYCAAVAACRVARVKFPNSDRVTRPAVPAWQCRIERRIGAARALIGKLICFREGNTRPRVMRFVRRAFSGTDISPRDYLPHITERIDFLKQKVYAWANRIRRYKRRVEWYTQNRTFQRNERWVYRAWERPDQGVIDTRLPDDDAMCSFWRSIWSVPVSHTEGDWIREIERTCDLIPEMGAITISPQDVARAVRPLPNWKSPGPDGLHNFWLKWFQRSHARLASQFQSALESGSLPQFLTTGITHLLHKSGSTAEPKNYRPITCLPTVYKVLTSILRAKINSHIETNSIMSASQNGCRNGSRGTKELLLIDVAISQQVRRSRRDLSTCWIDYKKAYDSVPHTWLMRVLELYKVDATLRTFLMSCMRQWRTALHYPGCRQTRESSEPIRIERGIFQGDSLSPLWFCLALNPLSTLLEGSGLGYRLRRGGHVISHLLYMDDLKLFASNNLQLMELLKVTETFSSAIRMEFGLDKCAVMHVKRGEIMESVGTQLSDSIYIRSLCSTETYKYLGMSEALGINAADMKQSLRERFFGRLNKVLNSLLSGGNKVRAFNGWVMPVLMYSFGILKWTQTELDALDRRVRSLLTANRMHHPRSSVMRLYIPRKCGGRGFLNAKTLHNREICSLREYFLKTDVGMHRDVVAVDKGLTPLSLVNENWRKPTVMDTNERRAVWQGKELHGRFYRALHGPDVDLLASVSWLRFGDLFGETEGFVFAIMDEVMMTNNYRKYIVKDGTVDICRACHRPGESIRHIISGCSHLANGDYLHRHNLVARIIHQQLALKYNLVESEVPYYRYVPDPVLENGGVTLYWDRSIITDRTIVANKPDIVVIDRLERRTMIVDIAVPHDENLVKAEKDKQTKYLDLAREVVDMWEVDRAIIVPIVVTANGLIAKSLEQHLRRLSLGSWIKGLIQKAVLLDTARIVRRFLSQEP

SEQ ID NO: 11944 - protein, 930 aa, Mythimna impura
MYCAAVAACRVAHVKFPNCDVATRPKPAVPAWQCRIERRIGGARALIGKLICFREGNTRPRVMRFVRRAFSGTDISPRDYMSRVTERIDFLKQKVYAWANRIRRYKRRVERYTQNRTFRSNERWVYRAWERPDQGVTDACLPDDDAMSSFWRSIWSVPVSHTEGDWTREVERACDPIPQMGAIDISPQDVARAVRPLPNWKSPGPDGLHNFWIKWFTRSHARLAYQFQSALESGSLPQFLTTGITHLLHKSGSTAEPKNYRPITCLPTVYKVLTSILRSKINSHIDKNLIMSPSQNGCRNGSRGTKELLLIDMTISQQVRRSRKDLSTCWIDYKKAYDSVPHTWLMRVLELYKIDTTLRTFLMSCMRQWSTVLRYPGCRHTQRNSEPVRIERGIFQGDSLSPLWFCLALNPLSTLLENSGLGYRLKRGGQVISYLLYMDDLKLFAPNNLQLMELLKVTETFSSAIRMEFGVDKCAVMYVKRGEVVESVGTQLTDSINLRSLSPTETYKYLGMSEALGINITDMKQSLKERFFGRLKKVLNSLLSGGNKVRAFNGWVMPVLMYSFGVLKWTQTELDALDRRVRTLLTAYRMHHPRSSVMRLYIPRKCGGRGFLNAKTLHNREVCSLREYFLAADVGMHRDVVAVDKGLTPLSLANENWRKPVVLDTNDRREVWQSKELHGRFFRALHGPDVDQLASVTWLRFGDLFGETEGFVCAIMDEVIMTNNYRRFIVKDGTVDICRACHRPGESIRHIISGCSRLANGEYLHRHNLVARIIHQQLALKYSLVESEVPYYRYEPDPVLDNGHITLYWDRSIITDRTIVANKPDIVVVDRSERRAMIVDISVPHDENLVKAEKDKQIKYIDLAHEVVDMWDVDSAIIVPIVVSANGLIAKSLDQHLRRLALGGWIKGLIQKVVLLDTARIVRRFLSLEP

SEQ ID NO: 11945 - protein, 1200 aa, Mythimna impura
MLTRSRAQKLHTHPTSSGSSLSSASQPPGPAPTVSPEIPVAAVASSSSDEYFSPPTTPPPSRRRGRGRPPASLGPRGPPASDRVPAAGGSVQRMRWTSSINENVMRSYFGATEGGINLTAYRSRMLSLFQVLEPAVNVSVQRLSDQVRVIQRNRMLDDAVLDRLRLESQSSRVSPATTPAAVQRLPTASPRPVQVGDADDDAAISVSTQCNDRLRGALEDAFREYRSTPPGLRPRLPRLPMHKRNRALVCALDSQLSNCFDSSKDLTDTHSILYCAAVAACRVAHVKFPNCDRATRPAVPAWQCRIEHRIGEARALIGKLICFREGNTRPRVMRFVRRAFSGTDISPRDYLPCVTERIDFLKQKIYAWANRIRRYKRRVERYTRNRTFQSNERWVYRDWERSDQGVTDTRLPDDDAMCSFWRSIWSAPVSHTEGDWIREVERACDLLPEMGAITISPQDVARAVRPLPNWKSPGPDGLHNFWVKWFQRSHARLASQFQSALESGSLPQFLTTGITHLLHKSGSTAEPKNYRSITCLPTVYKVLTSILRAKINSHIETNSIMSASQNGCRNGSRGTKELLLIDIAISQQVRRSRKNLSACWIDYKKAYDSVPHTWLMRVLELYKVDATLRTFLMSCMGQWRTVLHYPGCRQIQENNEPIRIERGIFQGDSLSPLWFCLALNPLSTLLEGSGLGYRLKRGGQVISHLLYMDDLKLFAPNNLQLVELLKVTKTFSSAIRMEFGVDKCAVIHVKRGEIMESVGIQLSDSIHLRSLCSTETYKYLGMSESLGINTDDVKQSLKERFFGHLNKVLNSLLSGGNKVRAFNGWVMPVLMYSFGILKWTQTELDALDRRVHTLLTANRMHHPRSSVMRLYIPRKCGGRGFLNAKTLHNREVCSLREYFLKTDVGMHRDVVAVDKGLTPLSLANENWRKPIVLDTNDRREVWQSKELHGRFYRALHGPDVDLLASVSWLRFGDLFGETEGFVFAIMDEVMMTNNYRKYIVKDGTVDICRACHRPGESIRHIISGCSHLANGDYLHRHNLVARIIHQQLALKYNVVESEVPYYRYVPDPVLDNGNITLYWDRSIITDRTIVANKPDIVVIDRLERRTMIVDIAVPHDENLVKAEKDKQNKYLDLAREVVDMWEVDKAIIVPIVVTANGLIAKSLEQHLRRLSLGSWIKGLIQKAVLLDTARIVRRFLSQEP

SEQ ID NO: 11946 - protein, 1109 aa, Mythimna impura
MRWTHSINENVMRAYYGATEGGNNLTAYRVRMLSLFQVLEPAVNVSAQRLSDQVRVIQRNHMLDDTVLDRLRTEMSNHAIAPSSQSVVPVMVPPSYHLSGHVDEEITDMVTHVSTQCNNELRSALECAIREYRNMPLELRPRLPRLPMHNKNKALVAALDLQLSNYFDDCKDLTDTHSIMYCAAVAACRLAHVKFPNCDVATRPKPAVPAWQCRIERRIGGARALIGKLICFREGNTRPRVMRFVRRAFSGTDISPRDYMSRVTERIDFLKQKVYAWANRIRRYKRRVDRYTQNRTFRSNERWVYRAWERPDQGVTDACLPDDDAMSSFWRSIWSVPVSHTEGDWTREVERACDPIPQMGAIDISPQDVARAVRPLPNWKSPGPDGLHNFWIKWFTRSHARLAYQFQSALESGSLPQFLTTGITHLLHKSGSTAEPKNYRPITCLPTVYKVLTSILRSKINSHIDKNLIMSPSQNGCRNGSRGTKELLLIDMTISQQVRRSRKDLSTCWIDYKKAYDSVPHTWLMRVLELYKIDTKLRTFLMSCMRQWSTVLRYPGCRHTQRNSEPVRIERGIFQGDSLSPLWFCLALNPLSTLLENSGLGYRLKRGGQVISHLLYMDDLKLFAPNNLQLMELLKVTETFSSAIRMEFGVDKCAVMHVKRGEVVESVGTQLTDFINLRSLSPTETYKYLGMSEALGINITDMKQSLKERFFGRLKKVFNSLLSGGNKVRAFNGWVMPVLMYSFGVLKWTQTELEALDRKVRTLLTAYRMHHPRSSVMRLYIPRKCGGRGFLNAKTLHNREVCSLREYFLAADVGMHRDVVTVDKGLTPLSLANENWRKPVVLDTNDRREVWQSKELHGRFFRALHGPDVDQLASVAWLRSGDLFGETEGFVCAIMDEVIMTNNYRRFIVKDGTVDICRACHRPGESIRHIISGCSRLANGEYLHRHNLVARIIHQQLALKYSLVESEVPYYRYEPDPVLDNGHITLYWDRSIITDRTIVANKPDIVVVDRSERRAMIVAISVPHDENLVKAEKDKQIKYIDLAREVVDMWDVDSAIIVPIVVSGNGLIAKSLDQHLRRLALGDWIKGLIQKAVLLDTARIVRRFLSLEP

SEQ ID NO: 11947 - protein, 1200 aa, Mythimna impura
MLTRSRAQKLHTHPTSSGSSLSSASQPPGPAPTVSPEIPVAAVASSSSDEYFSPPTTPPPARRRGRGRPPASLGPRGPPASDRVPAAGGSVQRMRWTSSINENVMRSYFGATEGGINLTAYRGRMLSLFQVLEPAVNVSVQRLSDQVRVIQRNRMLDDAVLDRLRLESQSSRVSPATTPAAVQRLPTASPRPVQVGDADDDAAISVSTQCNDRLRGALEDAFREYRSTPPGLRPRLPRLPMHKRNRALVCALDSQLSNCFDSSKDLTDTHSILYCAAVAACRVAHVKFPNCDRATRPAVPAWQCRIEHRIGEARALIGKLICFREGNTRPRVMRFVRRAFSGTDISPRDYLPCVTERIDFLKQKIYAWANRIRRYKRRVERYTRNRTFQSNERWVYRDWERSDQGVTDTRLPDDDAMCSFWRSIWSAPVSHTEGDWIREVERACDLLPEMGAITISPQDVARAVRPLPNWKSPGPDGLHNFWVKWFQRSHARLASQFQSALESGSLPQFLTTGITHLLHKSGSTAEPKNYRPITCLPTVYKVLTSILRAKINSHIETNSIMSASQNGCRNGSRGTKELLLIDIAISQQVRRSRKNLSTCWIDYKKAYDSVPHTWLMRVLELYKVDATLRTFLMSCMGQWRTVLHYPGCRQIQENNEPIRIERGIFQGDSLSPLWFCLALNPLSTLLEGSGLGYRLKRGGQVISHLLYMDDLKLFAPNNLQLVELLKVTETFSSAIRMEFGVDKCAVIHVKRGEIMESVGIQLSDSIHLRSLCSTETYKYLGMSESLGINTDDVKQSLKERFFGRLNKVLNSLLSGGNKVRAFNGWVMPVLMYSFGILKWTQTELDALDRRVRTLLTANRMHHPRSSVMRLYIPRKCGGRGFLNAKTLHNREVCSLRKYFLKTDVGMHRDVVAVDKGLTPLSLANENWRKPIVLDTNDRKEVWQSKELHGRFYRALHGPDVDLLASVSWLRFGDLFGETEGFVFAIMDEVMMTNNYRKYIVKDGTVDICRACHRPGESIRHIISGCSHLANGDYLHRHNLVARIIHQQLALKYNLVESEVPYYRYVPDPVLDNGNITLYWDRSIITDRTIVANKPDIVVIDRIERRTMIVDIAVPHDENLVKAEKDKQTKYLDLAREVVDMWEVDRAIIVPIVVTANGLIAKSLEQHLRRLSLGSWIKGLIQKAVLLDTARIVRRFLSQEP

SEQ ID NO: 11948 - protein, 1200 aa, Mythimna impura
MLTRSRAREQETHPTSSGSSLSSASQPQGPAPAVSPVIPAAAVASSSSDEYFSPPTTPPPARRRGRGRPPASLRPRGPPASDRVPAAGGSVQRMRWTQSINENVMRSYFGATEGGSNLTAYRGRMLSLFQVLEPTVNVSAQRLSDQVRVIQRNRMLDDAVLDRLRLESQRSRASSATPPAAVQLQPSALPRPDHVGDADDDAAISVSTQCNERLRSALEDAFREYRSTPPGLRPRLPRLPMHKRNRALVCALDSQLSNCFDSSKDLADTHSILYCAAAAACRVAHVKFPNCDRATRPAVPAWQRRIERRIGEARALIGKLICFREGNTRPRVMRFVRRAFLGTDISPQNYLPCVTERIDFLKQKVYAWASRIRRYKRRVERYTQNRTFQSNERWVYRTWERPDQDVTDTRLPDDDAMCSFWRRIWSVPVSHIEGDWIREVERTCDLLPEMGAITISPQDVARAVRPLPNWKSPGPDGLHNFWIKWFQGSHARLASQFQSALESGSLPEFLTTGITHLLHKSGSTADPKNYRPITCLPTVYKVLTSILRAKINTHIETNSIMSASQNGCRNGSRGTKELLLIDMAISQQVRRSRKDLSTCWIDYKKAYDSVPHTWLMRVLELYKVDTTLRTFLMSCMRQWRTVLHYPGCRQIRENSEPIRIERGIFQGDSLSPLWFCLALNPLSTLLEGSGLGYRLKRGGQVISHLLYMDDLKLFAPNNLHLMELLKVTETFSNAIRMEFGVDKCAVMHVKRGEIMESVGTQLSDSIYLRSLCSTETYKYLGMSEALGINAADVKQSLKERFFGRLNRVLKSLLSGGNKVRAFNGWVMPVLMYSFGILKWTQTELDALDRRVRTLLTANRMHHPRSSVMRLYIPRKCGGRGFLNAKTLHNREVCSLREYFLETDVGMHRDVVAVDKGLTPLSLANGNWRKPIILDTNDRREVWQSKELHGRFYRALHGPDVDLLASVSWLRFGDLFGETEGFVCAIMDEVVMTNNYRKYIVKDGTADICRACHRPGESIRHIISGCSHLANGDYLHRHNLVAKIIHQQLALKYNLVESEVPYYKYVPDPVLDNGSITLYWDRSIITDRTIVANKPDIVVIDRLERRTVIVDIAVPHDDNLVKAEKDKQTKYLDLAREVVDMWEVDTAVIVPIVVTANGLISKSLDQHLRRLSLGSWIKGLIQKAVLLDTARIVRRFLSQEP

SEQ ID NO: 11949 - protein, 1200 aa, Mythimna impura
MLTRSRAREQETHPTSSGSSLSSASQPPGSAPAVSPVIPAAAVASSSSDEYFSPLTTPPPARRRGRGRPPASLRPRGPPASDRVPAAGGSVQRMRWTQSINENVMRSYFGATEGGSNLTAYRGRMLSLFQVLEPTVNVSAQRLSDQVRVIQRNRMLDDAVLDRLRSESQRSRASSATPPAAVQLQPSALPRPDHVGDADDDAAISVSTQCNERLRSALEDAFREYRSTPPGLRPRLPRLPMHKRNRALVCALDSQLSNCFDSSKDLADTHSILYCAAAAACRVAHVKFPNCDRATRPAVPAWQRRIERRIGEARALIGKLICFREGNTRPRVMRFVRRAFLGTDISPQNYLPCVTERIDFLKQKVYAWASRIRRYKRRVERYTQNRTFQSNERWVYRTWERPDQDVTDTRLPDDDAMCSFWRRIWSVPVSHIEGDWIREVERTCDLLPEMGAITISPQDVARAVRPLPNWKSPGPDGLHNFWIKWFQGSHARLASQFQSALESGSLPEFLTTGITHLLHKSGSTADPKNYRPITCLPTVYKVLTSILRAKINTHIETNSIMSASQNGCRNGSRGTKELLLIDMAISQQVRRSRKDLSTCWIDYKKAYDSVPHTWLMRVLELYKVDTTLRTFLMSCMRQWRTVLHYPGCRQIRENSEPIRIERGIFQGDSLSPLWFCLALNPLSTLLEGSGLGYRLKRGGQVISHLLYMDDLKLFAPNNLHLMELLKVTETFSSAIRMEFGVDKCAVMHVKRGEIMESVGTQLSDSIYLRSLCSTETYKYLGMSEALGINAADMKQSLKERFFGRLNRVLKSLLSGGNKVRAFNGWVMPVLMYSFGILKWTQTELDALDRRVRTLLTANRMHHPRSSVMRLYIPRKCGGRGFLNAKTLHNREVCSLREYFLETDVGMHRDVVAVDKGLTPLSLANGNWRKPIILDTNDRREVWQSKELHGRFYRALHGPDVDLLASVSWLRFGDLFGETEGFVCAIMDEVVMTNNYRKYIVKDGTADICRACHRPGESIRHIISGCSHLANGDYLHRHNLIARIIHQQLALKYNLVESEVPYYKYVPDPVLDNGSITLYWDRSIITDRTIVANKPDIVVIDRLERRTVIVDIAVPHDDNLVKAEKDKQTKYLDLAREVVDMWEVDTAVIVPIVVTANGLISKSLDQHLRRLSLGSWIKGLIQKAVLLDTARIVRRFLSQEP

SEQ ID NO: 11950 - protein, 1200 aa, Mythimna impura
MLTRSRAQKLYTHPTSSGSSLSSASQPPGPAPTVSPESPVAAVASSSSDEYFSPPTTPPPARRRGRGRPPASLGPRGPPASDRVPAAGGSVQRMRWTSSINENVMRSYFGATEGGINLTAYRGRMLSLFQVLEPAVNVSVQRLSDQVRVIQRNRMLDDAVLDRLRLESQNSRVSPATTPAAVQRLPTASPRPVQVGDADDDAAISVSTQCNDRLRGALEDAFREYRSTPPGLRPRLPRLPMHKRNRALVCALDSQLSNYFDSSKDLTDTHSILYCAAVAACRVAHVKFSNCDRATRPAVPAWQCRIEHRIGEARALIGKLICFREGNTRPRVMRFVRRAFSGTDISPRDYLPCVTERIDFLKQKIYAWANRIRRYKRRVERYTRNRTFQSNERWVYRDWERSDQGLTDTRLPDDDAMCSFWRSIWSAPVSHTEGDWIREVERACDLLPEMGAITISPQDVARAVRPLPNWKSPGPDGLHNFWVKWFQRSHARLASQFQSALESGSLPQFLTTGITHLLHKSGSTAEPKNYRPITCLPTVYKVLTSILRAKINSHIETNSIMSVSQNGCRNGSRGTKELLLIDFAISQQVRRSRKNLSACWIDYKKAYDSVPHTWLMRVLELYKVDATLRTFLMSCMGQWRTVLHYPGCRQIQENNEPIRIERGIFQGDSLSPLWFCLALNPLSTLLEGSGLGYRLKRGGQVISHLLYMDDLKLFAPNNLQLVELLKVTETFSSAIRMEFGVDKCAVIHVKRGEIMESVGIQLSDSIHLRSLCSTETYKYLGMSESLGINTDDVKQSLKERFFGRLNKVLNSLLSGGNKVRAFNGWVMPVLMYSFGILKWTQTELDALDRRVRTLLTANRMHHPRSSVMRLYIPRKCGGRGFLNAKTLHNREVCSLREYFLKTDVGMHRDVVAVDKGLTPLSLANENWRKPIVLDTNDRREVWQSKELHGRFYRALHGPDVDLLASVSWLRFGDLFGETEGFVFAIMDEVMMTNNYRKYIVKDGTVDICRACHRPGESIRHIISGCSHLANGDYLHRHNLVARIIHQQLALKYNLVESEVPYYRYVPDPVLDNGNITLYWDRSIITDRTIVANKPDIVVIDRLERRTMIVDIAVPHDENLVKAEKDKQTKYLDLAREVVDMWEVDRAIIVPIVVTANGLIAKSLEQHLRRLSLGSWIKGLIQKAVLLDTARIVRRFLSQEP

SEQ ID NO: 11951 - protein, 1200 aa, Mythimna impura
MLTRSRAREQETHPTSSGSSLSSASQPPGPAPAVSPVIPAAAVASSSSDEYFSPPTTPPPARRRGRGRPPASLRPRGPPASDRVPAAGGSVQRMRWTQSINENVMRSYFGATEGGSNLTAYRGRMLSLFQVLEPTVNVSAQRLSDQVRVIQRNRMLDDAVLDRLRLESQRSRASSATPLAAVQLQPSALPRPDHVGDADDDAAISVSTQCNERLRSALEDAFREYRSTPPGLRPRLPRLPMHKRNRALVCALDSQLSNCFDSSKDLADTHSILYCAAAAACRVAHVKFANCDRATRPAVPAWQRRIERRIGEARALIGKLICFREGNTRPRVMRFVRRAFLGTDISPQNYLPCVTERIDFLKQKVYAWASRIRRYKRRVERYTQNRTFQSNERWVYRTWERPDQDVTDTRLPDDDAMCSFWRRIWSVPVSHIEGDWIREVERTCDLLPEMGAITISPQDVARAVRPLPNWKSPGPDGLHNFWIKWFQGSHARLASQFQSALESGSLPEFLTTGITHLLHKSGSTADPKNYRPITCLPTVYKVLTSILRVKINTHIETNSIMSASQNGCRNGSRGTKELLLIDMAISQQVRRSRKDLSTCWIDYKKAYDSVPHTWLMRVLELYKVDTTLRTFLMSCMGQWRTVLHYPGCRQIRENSEPIRIERGIFQGDSLSPLWFCLALNPLSTLLEGSGLGYRLKRGGQVICHLLYMDDLKLFAPNNLHLMELLKVTETFSSAIRMEFGVDKCAVMHVKRGEIMESVGTQLSDSIYLRSLCSTETYKYLGMSEALGINAADVKQSLKERFFGRLNRVLKSLLSGGNKVRAFNGWVMPVLMYSFGILKWTQTELDALDRRVRTLLTANRMHHPRSSVMRLYIPRKCGGRGFLNAKTLHNREVCSLREYFLETDVGMRRDVVAVDKGLTPLSLANGNWRKPIILDTNDRREVWQSKELHGRFYRALHGPDVDLLASVSWLRFGDLFGETEGFVCAIMDEVVMTNNYRKYIVKDGTADICRACHRPGESIRHIISGCSHLANGDYLHRHNLVARIIHQQLALKYNLVESEVPYYKYVPDPVLDNGSITLYWDRSIITDRTIVANKPDIVVIDRLERRTVIVDMAVPHDENLVKAEKDKQTKYLDLAREVVDMWEVDTAVIVPIVVTANGLISKSLDQHLRRLSLGSWIKGLIQKAVLLDTARIVRRFLSQEP

SEQ ID NO: 11952 - protein, 1202 aa, Phlogophora meticulosa
MLTRSRARVLNAPTTSSGSSLSSASQLPGPAPDVNPVTPAAAVASSSSDEYYSPPTSPPPVRRCGRGRPPASLGLRGPPASARVPASGGSVQRMRWTQSINENVMRSYYGATEGGINLTAYRGRMLSLFQVLEPAINVSAQRLSDQVRVIQRNHMLDDAVLDRLRLNSRSNRVTPASLPVAVQLQNLPSVSPRPDYVGEEDDDAAISVSSQCNVRLRSALEDAFREYRSTPPGLRQRLPRLPMHKKNKALMCTLDSLLSNSFDSSRDLADTHSILYCAAVAACRVANVKFPNSVRSTRPAIPAWQCRIERRIGEARVLIGKLICFREGNTRPRVMRFVRRAFSGTDISSRDYLTRVTERIDFLKQKICAWANRIRRYKRRVERYTQNRTFRSDERWVYRTWERPDQGVTDTFLPDDEAMCLFWRSIWSVPVSHTEGDWTREVERTCEPLPEMGAINISPQDVACAVRPLPNWKSPGPDGLHNFWIKWLKSSHARLASQFQSALESGSLPQFLTTGITHLLHKSGSTAEPKNYRPITCLPTVYKVLTSILRSKINNHIDSTSIMSVSQNGCKNGSRGTKELLLIDMAISQQVRRSRKDLSTCWIDYKKAYDSVPHTWLMRVLELYKIDATLRTFLKSCMGQWRTVLHYPGCRQFQENSEPIRIERGIFQGDSLSPLWFCLALNPLSTLLEGSGLGYRLRRGGQVISHLLYMDDLKLFAHNNLQLMKLLKVTETFSSAIRMDFGVDKCAVMHVKRGGIVESAGTQLSDSIYLRSLSSTETYKYLGMSEALGINTADMKQSLKERFFGRLNKVLNSLLSGGNKVRAFNSWVMPVLMYSFGILKWTQTELDALDRRVRTLLTANRMHHPRSSVMRLYISRKCGGRGFLNAKTLHNREVCSLREYFLEADVGIHRDVVAMDKALTPLSLANENWRKPIVLDTTDRMEIWKSKELHGRFYRVLHGPDVDLSASVSWLRFGDLFGETEGFVCAIMDEVIMTNNYRKYIVKDGTVDICRACHRPGESIRHIISGCSRLANGDYLHRHNLVAKIIHQQLALKYNLVESEVPYYKYVPDPVLENGNITLYWDRSIITDRTIVANKPDIVVIDRLDRRTMIVDITVPHDENLVKAEKEKQIKYLDLAREVVDMWDVNTAVIVPIVVTANGIIAKSLDQHLRRLSLGSWIKGLIQKAVLLDTARIVRRFLSQEP

SEQ ID NO: 11953 - protein, 1198 aa, Phlogophora meticulosa
MLTRSAARRARPPPPASSLSSASSPPKPSTIVSTVKPAVPVASSSSDEYFSPPTSPPPARRRRGRRPPDGLGPRGPPASDRVPAPGGSVQRMRWTQSINENVMRSYYGATEGGSNLTAYRVRMLSLFQVLEPAVNVSAQRLSDQVRVIQRNHMLDDVVLDRLRTEMQSSRVITSPSHTVVPPQYNIVLSSFADGEGSDKVTNVSTQYNEELRSALEGAIREYRFMLPALRPRLPRLPMHNKNRALVAALDSQLSNYFDNCDDLTDAHSIFYCAAVAACRVAHVKFPYDIATRPKPAVPAWQCRIERRIAGARALIGKLVCYREGNTRPRVMRYVRRAFLGTDISPRDYMSRVTERIDFLKQKVYAWASRIRRYKRRVERYTQNRTFQSNERWVYRAWERPVQGVTDTHLPDDDVMCSFWRNIWSVPVSHTEGDWTREVERACDPIPQMGAITISPQDVARAVRPLPNWKSPGPDGLHNFWIKWLQKSHARLASQFQSALETGSLPQFLTTGITHLLHKSGSTAEPKNYRPITCLPTVYKVLTSILRVKINNHIDSNSIMSASQNGCRNGSRGTKELLLIDTAISQQVRRSRKDLSTCWIDYKKAYDSVPHTWLKRVLELYKVDATLRTFLTSCMGQWRTVLRYPGCRQIQRNSEPIRIERGIFQGDSLSPLWFCLALNPLSTLLEDSGLGYRLKRGGQVVSHLLYMDDLKLFAPSDLQLMELLTVTKTFSSAIRMEFGVDKCAVMHVKRGKIVESVGTQLPDFINFRALSPIETYKYLGMSEALGINAADMKQSLKERFFGRLKKVCNSLLSGGNKVRAFNGWVMPVLMYSFGILKWTQTELDALDRRVRTFLTASRMHHPRSSVMRLYIPRKCGGRGFLNAKTLHNREICSLRDYFLETDVGMHRDVVAVDQGLTPLSLAKENWRKPVVLDTNDRKEVWQSKELHGRFFQALHGPDVDQLASVSWLRFGDLFGETEGFVCAIMDEVIMTNNYRRFIVKDGTVDICRACHRPGESIRHIISGCSRLANEEYLHRHNLVARIIHQQLALKYSLVESEVPYYKYVPDPVLENGSVTLYWDRSIITDRTIVANKPDIVVMDRIERRATIIDVTVPHDGNLVKAEKDKQIKYLDLAREVVDMWDVDSAIVVPIVVSANGLIAKSLDQHLRRLALGSWIKGLIQKAVLLDTARIVRRFLSLEP

SEQ ID NO: 11954 - protein, 962 aa, Xestia xanthographa
MHNKNKALMCALDSQLSNCFDSSKDLADTHSILYCGAVAACRVAHVKFPNNDRATRPKLAVPAWQCRIERRIGEARALIGKLICFREGNTRPRVMRFVRRAFSGTDISFRDYLARVTERIDSLKQKICAWASRIRRYKRRVERYTQNRAFQSDERWVYRAWERPDQGVTDTRLPDDSAMYSFWRNIWSVPVSHTEGDWTREVEQACDPIPEMGAIIISPQDVARAVRPLPNWKSPGPDGLHNFWIKWFQRSHTRLASQFQSALESGSLPQFLTTGITHLLHKSGSAAEPKNYRPITCLPTVYKVLTSILRAKINQHIDSNSIMSASQNGCRNGSRGTKELLLIDMAISQQVRRSRKNLSTCWIDYKKAYDSVPHTWLMKVLELYKIDATLRTFLMSCMGHWRTVLRYPGCRQIQGNSEPIRIERGIFLGDSLSPLWFCLALNPLSTLLERSGLGYLLRRDGQVISHLLYMDDLKLFAPNDLQLMKLLKVTATFSSAIRMEFGVDKCAVMHVKREEIMESEGTQLSDSIHLRSLSSTETYKYLDMSEALGINTADMKQSLRERFFGRLNKVLGSLLSGGNKKRAFNGWIMPVLMYSFGILKWTETELDALDRRVRTLLTANRMHHPRSSVMRLYIPRKCGGRGFLNAKTLHNREVCSLREYFLEADGEMHRDVVSVDKGLTPLSLANENWRKPKVLDTNDRKVEWQGKELHGRFYRALHGPDVDVLASVSWLRFGDLFGETEGFICAIMDEVMMTNNYRKYIVKDGTVDICRACHRPGESIRHIISGCSSLANGEYLHRHNLVARIIHQQLALKYNLVESEVPNYKYAPDPVLDNGHITLYWDRPITTDRTVVANRPDIVVIDRLERRTMIVDITIPHDENLVKAEKDKQFKYLDLAREVVDMWDVGTAVIVPIVVSANGLIAKSLDQHLRRLSLGSWIKGLIQKAVLLDTARIVRRFLSQEP

SEQ ID NO: 11955 - protein, 868 aa, Xestia xanthographa
MRFVRQAFSGTDISPRDYMSRVTERIDFLKQKVYAWANRIRRYKRRVDRYTQNRTFQKDERWVYRAWERPDQGVADTHLPDDDAMCSFWRSIWSVPVSHAEGEWTRVIERACDPVSEMGAITISPQDVARAVRPLPNWKSPGPDGLHNFWIKWFTRSHARLATLFQSALESGSLPEFLTTGITHLLRKSGSTAEPKNYRPITCLPTVYKVLTSILRTKISKHIDDNSVISASQNGCRNGSRGTKELLLIDMAISHQVRRSRKDLSTCWIDYKKAYDSVPHTWLMRVLELYKVDATLRTFLMSCMGQWRTVLRYPGCRQIQRNSEPIRIERGIFQGDSLSPLWFCLALNPLSTLLEDSGLGYRLRKDGQVISHLLYMDDLKLFAPNDLQLMELLKVTDTFSSAIRMEFGVDKCAVMHVKRGEIVESVGTQLSDSITLRSLSATETYKYLGMSEALGVNVADMKQSLKERFFGRLKKVFISLLSGGNKVRAFNGWVMPVLMYSFGILKWTQTELDALDTKVRKLLTAYRMHHPRSSVMRLYIPRKCGGRGFLNAKTLHNREICSLREYFLGTDVGMHRDVVTVDKGLTPLSLAKENWRKPPVLDTNDRREVWQSKELHGRFFRALHGPDVDLPASVAWLRSGDLFGEIEGFVCAIMDEVMMTNNYRRFIVKDGTVDICRACHRPGETIRHIISGCSRLTNGEYLHRHNLVARIIHQQLALKYNLVESEVPYYRYVPDPVLDNGCITLYWDQSIITDRTIVANKPDIVVVDRSERRAMIVDITVPHDENLVKAEKDKQIKYLDLAREVVDMWEVDSAIIVPIVVSAHGLIAKSLDQYLRRLSLGSWIKGLIQKAVLLDTARIVRRFLSLEP

SEQ ID NO: 11956 - protein, 1197 aa, Xestia xanthographa
MLTRSAAARRARLPPPDSSLSSASPPPEPSPIVSAVTPAVAVASSSSDEYFSPPTTPPPARRRGGHRPPDGLGPRGPPASDRVPAPGGSVQRMRWTQSINENVMRAYYGATEGGNNLTAYRVRMLSLFQVLEPAVNVSAQRLSDQVRVIQRNRMLDDTVLDRLRTEIQSNHVIVTPSQAVVPPQSSIIPCDNDVSNDMVTNVSTQCNVEMRSALEGAIREYRFMQPDLRPRIPRLPMHNKNRALVAVLDSQLSNYFDNCEDLTDVHSILYCAAVAACRVAHVKFPSDRATRPKPAVPAWQYRIERRIGGARALIGKLVCFREGNTRPRVMRFVRQAFSGTDISPRDYMSRVTERIDFLKQKVYAWANRIRRYKRRVDRYTQNRTFQKDERWVYRAWERPDQGVADTHLPDDDTMCSVWRSIWSVPVSHAEGEWTRVIERACDPISEMGAINISPQDVARAVRPLPNWKSPGPDGLHNFWIKWFTRSHARLATLFQSAIESGSLPEFLTTGITHLLHKSGSTAEPKNYRPITCLPTVYKVLTSILRTKISKHIDDNSVMSASQNGCRNGSRGTKELLLIDMAISHQVRRSRKDLSTCWIDYKKAYDSVPHTWLMRVLELYKVDATLRTFLMSCMGQWRTVLRYPGCRQIQRNSEPIRIERGIFQGDSLSPLWFCLALNPLSTLLEDSGLGYQLRKDGQVISHLLYMDDLKLFAPNDLRLMELLKVTETFSNAIRMEFGVDKCAVMHVKRGEIVESVGTQLSDSITLRSLSATETYKYLGMSEALGVNVADMKQSLKERFFGRLKKVLNSLLSGGNKVRAFNSWVMPVLMYSFGILKWTQTELDALDTKVRKLLTAYRMHHPRSSVMRLYIPRKCGGRGFLNAKTLHNREICSLREYFLGTDVGMHRDVVTMDKGFTPLSLAKENWRKPPVLDTNDRREVWQSKQLHGRFFRALHGPDVDLSASVAWLRSGDLFGETEGFVCAIMDEVMMTNNYRRFIVKDGTVDICRACHRPGESIRHIISGCSRLANGEYLHRHNLVARIIHQQLALKYNLVESEVPYYRYVPDPVLDNGCITLYWDQSIITDRTIVANKPDIVVVDRSERRAMIVDITVPHDENLVKAEKDKQIKYLDLAREVVDMWEVDSAIIVPIVVSAHGLIAKSLDQYLRRLSLGSWIKGLIQKAVLLDTARIVRRFLSLEP

SEQ ID NO: 11957 - protein, 1203 aa, Cosmia trapezina
MLTRSAARARPPPPDSSLSSASPPPVSSPTVNALTTPVAAVASSSSDEYFSPPSSPTPPRRRGRGRTPAGLGPRGQPAPNRVPAAGGNVSRMRWTQSINENVMRAYYGATEGGINLTAYRGRMLSLFQVLEPAVNVSAQRLSDQVRVIQHNHRLDNATLDRLRSEMQSSSASNRPPSQNVMHMPADFPLRANQRDEEENARAISADNLCNVEIRSALEDAIREYRFTSPDLRPRLPRLPMNKKNRALVCALDALLPNFIESSADLCDTHSILYCTAVATCRVACVKFPNTDRATRPKPAAPAWQCRIERRINEARVLIGKLICFREGNTRPRVMRFVRRAFSGTNISPQEYVSRVTERIDFLKQKVYAWANRIRRYRRRVDRYSQNRMFQSDERWVYRAWERPIPTQGVTDVRPPDNETMSAFWRSIWSVPVSHTEGDWMRVVEQACDSIPNMEAVTISPLDVACAVRPLPNWKSPGPDGLHNFWIKWLQRSHACLASQFQSSLETGSLPLLFTTGVTHLLHKSGSTAEPKNYRPITCLPTVYKVLTSILRAKIAHHIYNNSIMSVSQNGCRNGSRGTKELLLIDMTISQQVRRSRRDLSTCWIDYKKAYDSVPHTWLIRVLELYKIDATLRTFLMSCMGQWKTVLLCPGCRWIPGIDEPIRIERGIFQGDSLSPLWFCLALNPLSTLLEDSGLGYRLRRGGQVISHLLYMDDLKLFAPNNLRLMELLKVTENFSSAIRMEFGVDKCAVMHVKRGEIMESVGTQLSDSIHLRSLSSTETYKYLGMSEALGINVADMKQSLKERFFGRLKKVFNSLLSGGNKVRAFNGWVMPVLMYSFGVLKWTQTELDALDRRVRTLLTAYRMHHPRSSVMRLYIPRKCGGRGFLNAKTLHNREICSLREYFLEAEVEMHRDVVAVDKGLTPLSLAKENWRKPAVLDTNDRREVWQGKELHGRFFRALHGPDVDFLASVSWLRFGDLFGETEGFVCAIMDEVIMTNNYRKYIVKDGTVDICRACHRPGESIRHIVSGCSRLANGEYLHRHNLVARIIHQQLALQYNLVESEVPYYRYVPDPVLENGQATLYWDRSIITDRTIVANKPDIVVIDRRERRAIIVDIAVPHDENLVKAEKDKKIKYLDLAHEVVDMWDVDSAIIVPIIVTVNGLIAQSLDQHLRRLSLRGWIKGLIQKAVLLDTARIVRRFLSLEP

SEQ ID NO: 11958 - protein, 1205 aa, Cosmia trapezina
MMQTRAKTRIQAHPPSPDSSLSSASQPPVRASTVSAVSPVAAVASSSSDEFFSPPSSPTPPRRRGRGRPPAGLGPRGQPAPNRVPAAGGNVSRMRWTQSINENVMRAYYGATEGGINLTAYRGRMLSLFQVLEPAVNVSAQRLSDQVRVIQHNHRLDNATLDRLRSEMQSSSASNPPPSQNVMHVPAEIPLRANQRDEEENARAISAENLCNVEIRSALEDAIREYRFTSPDLRPRLPRLPMNKKNRALVCALDALLPNFIESSADLCDTHSILYCTAVAACRVACVKFPNTDRATRPKPAAPAWQCRIERRINEARVLIGKLICFREGNTRPRVMRFVRRAFSGTNISPQEYVSRVTERIDFLKQKVYAWANRIRRYRRRVDRYSQNRMFQSDERWVYRAWERPIPTQGVTDVRPPDNETMSAFWRSIWSVPVSHTEGDWMRIVEQACDSIPNMDAVTISPLDVACAVRPLPNWKSPGPDGLHNFWIKWLQRSHACLASQFQSSLETGSLPLLFTTGVTHLLHKSGSTAEPKNYRPITCLPTVYKVLTSILRAKIAHHIYNNSIMSVSQNGCRNGSRGTKELLLIDMTISQQVRRSRKDLSTCWIDYKKAYDSVPHTWLIRVLELYKIDATLRTFLMSCMGQWKTVLLCPGCRRIPGIDEPIRIERGIFQGDSLSPLWFCLALNPLSTLLEDSGLGYRLRRGGQVISHLLYMDDLKLFAPNNLRLMELLKVTENFSSAIRMEFGVDKCAVMHVKRGEIMESVGTQLSDSIHLRSLSSTETYKYLGMSEALGINVADMKQSLKERFFGRLKKVFNSLLSGGNKVRAFNGWVMPVLMYSFGVLKWTQTELDALDRRVRTLLTAYRMHHPRSSVMRLYIPRKCGGRGFLNAKTLHNREICSLREYFLEADVGMHRDVVAVDKGLTPLSLAKENWRKPAVLDTNDRREVWQGKELHGRFFRALHGPDVDFLASVSWLRFGDLFGETEGFVCAIMDEVIMTNNYRKYIVKDGTVDICRACHHPGESIRHIVSGCSRLANGEYLHRHNLVARIIHQQLALQYNLVESEVPYYRYVPDPVLENGQATLYWDRSIITDRTIVANKPDIVVIDRRERRAIIVDIAVPHDENLVKAEKDKKIKYLDLAHEVVDMWDVDSAIIVPIIVTVNGLIAQSLDQHLRRLSLRGWIKGLIQKAVLLDTARIVRRFLSLEP

SEQ ID NO: 11959 - protein, 960 aa, Mamestra brassicae
MHNKNRALVCALDSQLTNCFDSSEDLADTHSILYCAAAAACRVAHVKFLNSDRATRPAVPAWQCRIERRIGEARALIGKLICFREGNTRRRVMRFVRRAFSGTDTSPRDYLTRVTERIDFLKQKIYAWANRIRRYKRRVERYTQNRTFQSNERWVYRAWERPDQGVTDTRLPDDDVMCSFWRNIWSVPVSHTEGDWIREVEHACDPILEMGATTISPQDVARAVRPLPNWKSPGPDGLHNFWIKWFTGSHARLASQFQSALESGSLPQFLTTGITHLLHKSGSTAEPKNYRPITCLPTVYKVLTSILRAKINHHIESNSIMSASQNGCRNGSRGTKELLLMDIAISQQVRRSRKDLSTCWIDYKKAYDSVPHTWLMRVLELYKVDAVLRTFLMSCMGQWRTVLRYPGCRQNQVNGDLIRIERGIFQGDSLSPLWFCLALNPLSTLLEGSGQGYRLRRGGQVISHLLYMDDLKLFAPNNLQLMELLKVTETFSSAISMEFGVDKCAVMHVKRGEIMESVGTQFSDSIHLRSLSSTETYKYLGMSEALGINANDMKQSLKERFFGRLNKVLNSLLSGGNKVRAFNGWVMPVLMYSFGILKWTQTELDALDRRVRSLLTANRMHHPRSSVMRLYIPRKCGGRGFLNAKTLHNREICSLREFFLEADVGMHRDVVAVDKGLTALSLANENWRKPVVLDTNDRRKVWQSKELHGRFYRVLHGPDVDFLASVAWLRFGDLFGETEGFVCAIMDEVMMTNNYRKYIVKDGTVDICRACHRPGESIRHIISGCSSLANGDYLHRHNLVARIIHQQLALKYNLVESEVPYYRYVPDPVLENGNCTLYWDRSIITDRTIVANKPDIVAIDRLERRAMIVDIAVPHDENLVKTEKDKQTKYLDLAREVVDMWDVNTAVIVPIVVTANGIIAKSLDQHLKRLSLGSWIKGLIQKAVLLDTARIVRRFLSQGP

SEQ ID NO: 11960 - protein, 1198 aa, Mamestra brassicae
MLTRAAAQRARLPPPASSLSSASPPPEPSPTVSAVIPAVAVASSSSDEYFSPPKSPPPARRRRGRRPPDGLRPRGPPASDRVPAPGGSVQRMRWTQTINENVMRSYYGATEGGTNLTAYRGRMLSLFQVLEPAVNVSAQRLSDHVRVIQRNRMLDDAVLDRLRLESRNGRVSAASPPAAVQIQSSVSPRPNIVGEDDDDGAISVSTQCNERLRSALEDAFREYRSTPPELRPRLPRLPMHNKNRALVCALDSQLANCFDSSEDLADTHSILYCAAAAACRVAHVKFPNSDRATRPAVPAWQCRIERRIGEARALIGKLICFREGNTRRRVMRFVRRAFSGTDTSPRDYLTSVTERIDFLKQKIYAWANRIRRYKRRVERYTQNRTFQSNERWVYRAWERPDQGVTDTRLPDDDVMCSFWRNIWSVPVSHTEGDWTREVERACDPIPEMGAITISPQDVARAVRPLPNWKSPGPDGLHNFWIKWFKRSHARLASQFQSALESGSLPQFLTTGITHLLHKSGSTTEPKNYRPITCLPTVYKVITSILRAKINQHIGTNSIMSASQNGCRNRSRGTKELLLIDVAISQQVRRSRRDLSTCWIDYKKAYDSVPHTWLMRVLELYKVDAVLRTFLMSCMGQWRTVLRYPGCRQIQANSDPIRIERGIFQGDSLSPLWFCLALNPLSTLLEGSGQGYRLRRGGQVISHLLYMDDLKLFAPNNLQLMKLMKVTETFSSAISMEFGVDKCAVMHVKRGEIMESVGTQLSDSIHLRSLSSTETYKYLGMSEALGINANDVKQSLKERFFGRLNKVLNSLLSGGNKVRAFSGWVMPVLMYSFGILKWTQTELDALDRRVRSLLTANRMHHPRSSVMRLYIPRKCGGRGFLNAKTLHNREICSLREFFLEADVGMHRDVVAVDKGLTALSLANENWRKPVVLDTNDRREVWQSKELHGRFYRVLHGPDVDFLASVAWLRFGDLFGETEGFVCAIMDEVMMTNNYRKYIVKDGTVDICRACHRPGESIRHIISGCSSLANGDYLHRHNLVARIIHQQLALKYNLVESEVPYYRYVPDPVLENGNCTLYWDRSIITDRTIIANKPDIVVIDRLERRAMIVDIAVPHDVNLVKTEKDKQTKYLDLAREVVDMWDVNTAVIVPIVVTANGIIAKSLDQHLKRLSLGSWIKALIQKAVLLDTARIVRRFLSQGP

SEQ ID NO: 11961 - protein, 1102 aa, Mamestra brassicae
MRWTQTINENVMRSYYGATEGGTNLTAYRGRMLSLFQVLEPAVNVSAQRLSDQVRVILRNRMLDDAVLDRLRLESRSGRVSPAVQIQSSISPRSNNVGEDDDDGAISVSTQCNERLRSALEDAFREYRSTPPELRPRLPRLPMHNKNRALVCALDSQLTNCFDSSEDLADTHSILYCAAAAACRVAHVKFLNSDRATRPAVPAWQCRIERRIGEARALIGKLICFREGNTRRRVMRFVRRAFSGTDTSPRDYLTRVTERIDFLKQKIYAWANRIRRYKRRVERYTQNRTFQSNERWVYRAWERPDQGVTDTRLPDDDVMCSFWRNIWSVPVSHTEGDWIREVERACDPILEMGATTISPQDVARAVRPLPNWKSPGPDGLHNFWIKWFTGSHARLASQFQSALESGSLPQFLTTGITHLLHKSGSTAEPKNYRPITCLPTVYKVLTSILRAKINHHIESNSIMSASQNGCRNGSRGTKELLLMDIAISQQVRRSRKDLSTCWIDYKKAYDSVPHTWLMRVLELYKVDAVLRTFLMSCMGQWRTVLRYPGCRQIQVNGDPIRIERGIFQGDSLSPLWFCLALNPLSTLLEGSGQGYRLRRGGQVISHLLYMDDLKLFAPNNLQLMELLKVTETFSSAISMEFGVDKCAVMHVKRGEIMESVGTQLSDSIHLRSLSSTETYKYLGMSEALGINANDMKQSLKERFFGRLNKVLNSLLSGGNKVRAFNGWVMPVLMYSFGILKWTQTELDALDRRVRSLLTANRMHHPRSSVMRLYIPRKCGGRGFLNAKTLHNREICSLREFFLETDVGMHRDVVAVDKGLTALSLANENWRKPVVLDTNDRRKVWQSKELHGRFYRVLHGPDVDFLASVAWLRFGDLFGETEGFVCAIMDEVMMTNNYRKYIVKDGTVDICRACHRPGESIRHIISGCSSLANGDYLHRHNLVARIIHQQLPLKYNLVESEVPYYRYVPDPVLENGNCTLYWDRSIITDRTIVANKPDIVVIDRLERRAMIVDIAVPHDENLVKTEKDKQTKYLDLAREVVDMWDVNTAVIVPIVVTANGIIAKSLDQHLKRLSLGSWIKGLIQKAVLLDTARIVRRFLSQGP

SEQ ID NO: 11962 - protein, 1197 aa, Mamestra brassicae
MLTRSRARHLATHPSPSASSLSSASPPPEPSPTVSAVTPAVAVASSSSDEYFSPPTTPPPARRRRGRRPPDGLGPRGPPASDRVPAPGGSVQRMRWTQSINENVMRSYFGATEGGTNLTAYRGRMLSLFQVLEPAVNVSAQRLSDQVRVIQRNRMLDDSVLDRLRMEMCGHVITPPSQTVSPPQSQISSHADEESNDRVTNVSTQCNEELRSVLECAIREYRYIPPELRPRLPRLPMHNKNRALVAALDSQLSNYFDDCEDLTDTHSIMYCAAVAACRVAHVKMTNDRVTRPKPAVPAWQCRIERRIGGARALIGKLICFREGNTRPRVMRFVRRAFSGTDISPRDYMSRVTERIDFLKQKVYAWANRIRRYRRRVERYTQNRTFRSNERWVYRVWEQPDQGVTDTRLPDDDAMCSFWRNIWSVPVSHTEGGWIREVERACDPLPEMGAITISPQVVARALRPLPNWKSPGPDGLHNFWIKWLQRSHARLASQYQTALESGSLPEFLTTGVTHLLHKSGSTAEPKNYRPITCLPTVYKVLTSILRDKINNHINSNNIMSVSQNGCRNGSRGTKELLLIDMAISQQVRRFRKDLSTCWIDYKKAYDSVPHTWLMRVLELYKIDTMLRTFLMSCMGQWRTVLRYPGCRNIQRNSEPVRIERGIFQGDSLSPLWFCLALNPLSTLLENSGLGYRLKRGGQVISHLLYMDDLKLFAPSNLQLMELLKVTETFSSAIRMEFGVDKCAVMHVKRGEIMGSVGTQLSDSINLRSLSSTETYKYLGMSEALGINVTDMKQSLRERFFGRLKKVFNSLLSGGNKVRAFNGWVMPVLMHSFGVLKWTQTELDALDRRVRTLLTAYRMHHPRSSVMRLYIPRKCGGRGFLNAKTLHNREICSLREYFLAVDVGMHRDVVTVDKGLTPLSLANENWRKPAVLDTNDRRAVWQSKELHGRFFRALHGPDVDQLASVAWLRFGDLFGETEGFVCAIMDEVIMTNNYRRFIVKDGTVDICRACHRPGESIRHIVSGCSRLANGEYLHRHNLVARIIHQQLALKYSLVESEVPYYRYAPDPVLDNGNITLYWDRSIITDRTIVANKPDIVVVDRIERRAMIVDITVPHDENLVKAEKDKQIKYIDLAREVVDMWDVDSAIIVPIVVSANGLIATSLDQHLRRLSLGSWIKGLIQKAVLLDTARIVRRFLSLEP

SEQ ID NO: 11963 - protein, 1198 aa, Noctua fimbriata
MLTRSAARRARLSPPDPSLSSASPPPESSPVVSAVTPAVAVASSSSDEYFSPPTTPPPVRRRGGRRPPDGLGPRGPPASDRVPAPGGSVQRMRWTQSINANVMRAYYGATEGGNNLTAYRVRMLSLFQVLEPAVNVSAQRLSDQVRVIQRNRMLDDTVLDRLRTEMQSSHVIATPPPQAVVPPQSTIIPNRDNDVSNDIVTNVSTQCNEEMRSALEGAIREYRFMQPDLRPRIPRLPMHNKNRALVAVLDSQLSNYFDNCEDLTDAHSILYCAAVAACRVAHVKFSDDRATRPKPAVPPWQYRIERRIGGARALIGKLICFREGNTRPRVMRFVRRAFSGTDISPRDYMSRITERIDFLKQKVYAWANRIRRYKRRVDRYTQNRTFQRDERWVYRAWERPDQGVADTRLPDDDAMCSFWRSIWSVPVSHTEGEWTQGVERACDLVPEMGAITISPQDVVRAVRPLPNWKSPGPDGLHNFWIKWFTRSHARLAILFQSALESGSLPEFLTTGIIHLLYKSGSTAEPKNYRPITCLPTVYKVLTSILRAKINKHIDDNSIMSASQNGCRNGSRGTKELLLIDMAISQQVRRSRSDLSTCWIDYKKAYDSVPHTWLMRVLELYKVDATLRTFLMSCMGQWRTVLRYPGCRQIQRNSEPIRIERGIFQGDSLSPLWFCLALNPLSTLLEDSGLGYRLRRGGQVISHLLYMDDLKLFAPNDLQLMELLKVTETFSSAIRMEFGVDKCAFMHVKRGEIVESVGTQLSDSINLRSLSATETYKYLGMSEALGINVADMKQSLKERFFGRLKKVFNSLLSGGNKVRAFNGWVMPVLMYSFGILKWTQTELDALDRRVRTLLTAYRMHHPRSSVMRLYIPRKCGGRGFLNAKTLHNREICSLREYFLETDVGMHRDVVAVDKGLTPLSLAKENWRKPLVPDTNGRMEVWQSKELHGRFFRALHGPDVDLSASVAWLRCGDLFGETEGFVCAIMDEVMMTNNYRRFIVKDGTVDICRACHRPGESIRHIISGCSRLANGEYLHRHNLVARIIHQQLALKYNLVESEVPYYKYVPDPVLENGSITLYWDQSIITDRTIVANKPDIVVVDRSERRTMIVDITVPHDENLVKAEKDKKIKYLDLAREVVDMWDVDSAIIVPIVVSAHGLIAKSLDQYLRRLSLGSWIKGLIQKAVLLDTARIVRRFLSLEP

SEQ ID NO: 11964 - protein, 1198 aa, Noctua fimbriata
MLTRSAARRARLSPPDPSLSSASPPPKFSPVVSAVTPAVAVASSSSDEYFSPPTTPPPVRRRGGRRPPDGLGPRGPPASDRVPAPGGSVQRMRWTQSINANVMRAYYGATEGGNNLTAYRVRMLSLFQVLEPAVNVSAQRLSDQVRVIQRNRMLDDTVLDRLRTEMQSSHVIATPPPQAVVPPQSTIIPNRDNDVSNDIVTNVSTQCNEEMRSALEGAIREYRFMQPDLRPRIPRLPMHNKNRALVAVLDSQLSNYFDNCEDLTDAHSILYCAAVAACRVAHVKFSDDRATRPKPAVPPWQYRIERRIGGARALIGKLICFREGNTRPRVMRFVRRAFSGTDISPRDYMSRITERIDFLKQKVYAWANRIRRYKRRVDRYTQNRTFQRDERWVYRAWERPDQDVADTRLPDDDAMCSFWRSIWSVPASHTEGEWTQGVERACDLVPEMGAITISPQDVVRAVRPLPNWKSPGPDGLHNFWIKWFTRSHARLAILFQSALESGSLPEFLTTGITHLLHKSGSTTEPKNYRPITCLPTVYKVLTSILRAKINKHIDDNSIMSASQNGCRNGSRGTKELLLIDMAISQQVRRSRSDLSTCWIDYKKAYDSVPHTWLMRVLELYKVDATLRTFLMSCMGQWRTVLRYPGCRQIQRNSEPIRIERGIFQGDSLSPLWFCLALNPLSTLLEDSGLGYRLRRGGQVISHLLYMDDLKLFAPNDLQLMELLKVTETFSSAIRMEFGVDKCAVMHVKRGEIVESVGTQLSDSINLRSLSATETYKYLGMSEALGINVADMKQSLKERFFGRLKKVFNSLLSGGNKVRAFNGWVMPVLMYSFGILKWTQTELDALDRRVRTLLTAYRMHHPRSSVMRLYIPRKCGGRGFLNAKTLHNREICSLREYFLETDVGMHRDVVAVDKGLTPLSLAKENWRKPLVPDTNDRMEVWQSKELHGRFFRALHGPDVDLSASVAWLRCGDLFGETEGFVCAIMDEVMMTNNYRRFIVKDGTVDICRACHRPGESIRHIISGCSRLANGEYLHRHNLVARIIHQQLALKYNLVESEVPYYKYVPDPVLENGSITLYWDQSIITDRTIVANKPDIVVVDRSERRTMIVDITVPHDENLVKAEKDKKIKYLDLAREVVDMWDVDSAIIVPIVVSAHGLIAKSLDQYLRRLSLGSWIKGLIQKAVLLDTARIVRRFLSLEP

SEQ ID NO: 11965 - protein, 1198 aa, Noctua fimbriata
MLTRAAAKRARLSPPDPSLSSASPPPESSPVMSAVTPAVAVASSSSDEYFSPPTTPPPVRRRGGRRPPDGLGPRGPPASDRVPAPGGSVQRMRWTQSINENVMRSYYGATEGGNNLTAYRVRMLSLFQVLEPAVNVSAQRLSDQVRVIQRNRMLDDTVLDRLRTEMQSSHVIATPPPQAVVPPQSTIIPNRDNDVSNDIITNVSTQCNEEMRSALEGAIREYRFMQPDLRPRIPRLPMHNKNRALVAVLDSQLSNYFDNCEDLTDAHSILYCAAVAACRVAHVKFSNDRATRPKQAVPPWQYRIERRIGGARALIGKLICFREGNTRPRVMRFVRRAFSGTDISPRDYMSRITERIDFLKQKVYAWANRIRRYKRRVDRYTQNRTFQRDERWVYRAWERPDQGVADTRLPDDDAMCSFWRSIWSVPVSHTEGEWTQGVERACDLVPEMGAITISPQDVVRAVRPLPNWKSPGPDGLHNFWIKWFTRSHARLAILFQSALESGSLPEFLTTGITHLLHKSGSTAEPKNYRPITCLPTVYKVLTSILRAKINKHIDDNSIMSASQNGCRNGSRGTKELLLIDMAISQQVRRSRRDLSTCWIDYKKAYDSVPHTWLMRVLELYKVDATLRTFLMSCMGQWRTVLRYPGCRQIQRNSEPIRIERGIFQGDSLSPLWFCLALNPLSTLLEDSGLGYRLRRGGQVISHLLYMDDLKLFAPNDLQLMELLKVTETFSSAIRMEFGVDKCAVMHVKRGEIVESVGTQLSDSINLRSLSATETYKYLGMSEALGINVADMKQSLKERFFGRLKKVFNSLLSGGNKVRAFNGWVMPVLMYSFGILKWTQTELDALDRRVRTLLTAYRMHHPRSSIMRLYIPRKCGGRGFLNAKTLHNREICSLREYFLETDVGMHRDVVAVDKGLTPLSLAKENWRKPLLLDTNDRMEVWQSKELHGRFFRALHGPDVDLSASVAWLRSGDLFGETEGFVCAIMDEVMMTNNYRRFIVKDGTVDICRACHRPGESIRHIISGCSRLANGEYLHRHNLVARIIHQQLALKYNLVESEVPYYKYVPDPVLENGSITLYWDQSIITDRTIVANKPDIVVVDRSERRTMIVDITVPHDENLVKAEKDKKIKYLDLAREVVDMWDVDSAIIVPIVVSAHGLIAKSLDQYLRRLSLGSWIKGLIQKAVLLDTARIVRRFLSLEP

SEQ ID NO: 11966 - protein, 868 aa, Noctua fimbriata
MRFVRRAFSGTDISPRDYMSRITERIDFLKQKVYAWASRIRRYKRRVDRYTQNRTFQRDERWVYRAWERPDQGVADTRIPDDDAMCSFWRSIWSVPVSHTEGEWTREVERACDLVPEMGAITISPQDVVRAVRPLPNWKSPGPDGLHNFWIKWFTRSYARLAILFQSALESGSLPEFLTTGITHLLHKSGSTAEPKNYRPITCLPTVYKVLTSILRAKINKHIDDNSIMSASQNGCRNGSRGTKELLLIDMAISQQVRRSRRDLSTCWIDYKKAYDSVPHTWLMRVLELYKVDATLRTFLMSCMGQWRTVLRYPGCRQIQRNSEPIRIERGIFQGDSLSPLWFCLALNPLSTLLEDSGLGYRLRRGGQVISHLLYMDDLKLFAPNDLQLMELLKVTETFSSAIRMEFGVDKCAVMHVKRGEIVESVGTQLSDSINLRSLSATETYKYLGMSEALGINVADMKQSLKERFFGRLKKVFNSLLSGGNKVRAFNGWVMPVLMYSFGILKWTQTELDALDRRVRTLLTAYRMHHPRSSVMRLYIPRKCGGRGFLNAKTLHSREICSLREYFLETDVGMHRDVVAVDKGLTPLSLAKENWRKPVVFDTNDRMEVWQSKELHGRFFRALHGPDVDLSASVAWLRSGDLFGETEGFVCAIMDEVMMTNNYRRFIVKDGTVDICRACHRQGESIRHIISGCSRLANGEYLHRHNLVARIIHQQLALKYNLVESEVPYYKYVPDPVLENGSITLYWDQSIITDRTIVANKPDIVVVDRSERRAMIIDITVPHDENLVKAEKDKKIKYLDLAREVVDMWDVDSAIIVPIVVSAHGLIAKSLDQYLRRLSLGSWIKGLIQKAVLLDTVRIVRRFLSLEP

SEQ ID NO: 11967 - protein, 1200 aa, Noctua fimbriata
MKMLTRAAAKRARLSPQDPSLSSASPPPKSSPVVSAVTPAVAVASSSSDEYFSPPTTPPPVRRRGGRRPPDGLGPRGPPASDRVPAPGGSVQRMRWTQSINANVMRAYYGATEGGNNLTAYRFRMLSLFQVLELAVNVSAQRLSDQVRVIQRNRMLDDTVLDRLRTAMQSSHVIATPPPQAVVPPQSTIIPNRDNDVSNDIVTNVSTQCNEEMRSALEGAIREYRFMQPDLRPRIPRLPMHNKNRALVAVLDSQLSNYFDNCEDLTDAHSILYCAAVAACRVAHVKFSDDRATRPKPAVPPWQYRIERRIGGARALIGKLICFREGNTRPRVMRFVRRAFSGTDISPRDYMSRITERIDFLKQKVYAWANRIRRYKRRVDRYTQNRTFQRDERWVYRAWERPDQGVADTRLPDDDAMCSFWRSIWSVPVSHTEGEWTQGVERTCDLVPEMGAITISPQDVVRAVRPLPNWKSPGPDGLHNFWIKWFTRSHARLAILFQSALESGSLPEFLTTGITHLLHKSGSTAEPKNYRPITCLPTVYKVLTSILRAKINKHIDDNSIMSASQNGCRNGSRGTKELLLIDMAISQQVRRSRSDLSTCWIDYKKAYDSVPHTWLMRVLELYKVDATLRTFLMSCMGQWRTVLRYPGCRQIQRNSEPIRIERGIFQGDSLSPLWFCLALNPLSTLLEDSGLGYRLRRGGQVISHLLYMDDLKLFAPNDLQLMELLKVTETFSSAIRMEFGVDKCAVMHVKRGEIVESVGTQLSDSINLRSLSATETYKYLGMSEALGINVADMKQSLKERFFGRLKKVFNRLLSGGNKVRAFNGWVMPVLMYSFGILKWTQTELDALDRRVRTLLTAYRMHHPRSSVMRLYIPRKCGGRGFLNAKTLHNREICSLREYFLETDVGMHRDVVAVDKGLTPLSLAKENWRKPLVLDTNDRMEVWQSKELHGRFFRALHGPDVDLSASVAWLRSGDLFGETEGFVCAIMDEVMMTNNYRRFIVKDGTVDICRACHRPGESIRHIISGCSRLANGEYLHRHNLVARIIHQQLALKYNLVESEVPYYKYVPDPVLENGSITLYWDQSIITDRTIVANKPDIVVVDRSERRTMIVDITVPHDENLVKAEKDKKIKYLDLAREVVDMWDVDSAIIVPIVVSAHGLIAKSLDQYLRRLSLGSWIKGLIQKAVLLDTARIVRRFLSLEP

SEQ ID NO: 11968 - protein, 961 aa, Noctua fimbriata
MHNKNRALVAVLDSQLSNYFDNCEDLTDAHSILYSAAVAACRVAHVKFSDDRATRPKPAVPPWQYRIERRIGGARALIGKLICFREGNTRPRVMRFVRRAFSGTDISPRDYMSRITERIDFLKQKVYAWANRIRRCKRRVDRYTQNRTFQRDERWVYRAWERPDQGVADTRLPDDDAMCSFWRSIWSVPVSHTEGEWTQGVERACDLVPEMGAITISPQDVVRAVRPLPNWKSPGPDGLHNFWIKWFTRSHARLAILFQSALESGSLPEFLTTGITHLLHKSGSTAEPKNYRPITCLPTVYKVLTSILRAKINKHIDDNSIMSASQNGCRNGSRGTKELLLIDMAISQQVRRSRSDLSTCWIDYKKAYDSVPHTWLMRVLELYKVDATLRTFLMSCMGQWRTVLRYPGCRQIQRNSEPIRIERGIFQGDSLSPLWFCLALNPLSTLLEDSGLGYRLRRGGQVISHLLYMDDLKLFAPNDLQLMELLKVTETFSSAIRMEFGVDKCAVMHVKRGEIVESVGTQLSDSINLRSLSATETYKYLGMSEALGINVADMKQSLKERFFGRLKKVFNSLLSGGNKVRAFNGWVMPVLMYSFGILKWTQTELDALDRRVRTLLTAYRMHHPRSSVMRLYIPRKCGGRGFLNAKTLHNREICSLREYFLETDVGMHRDVVAVDKGLTPLSLAKENWRKPLVPDTNDRMEVWQSKELHGRFFRALHGPDVDLSASVAWLRCGDLFGETEGFVCAIMDEVMMTNNYRRFIVKDGTVDICRACHRPGESIRHIISGCSRLANGEYLHRHNLVARIIHQQLALKYNLVESEVPYYKYVPDPVLENGSITLYWDQSIITDRTIVANKPDIVVVDRSERRTMIVDITVPHDENLVKAEKDKKIKYLDLAREVVDMWDVDSAIIVPIVVSAHGLIAKSLDQYLRRLSLGSWIKGLIQKAVLLDTARIVRRFLSLEP

SEQ ID NO: 11969 - protein, 1045 aa, Atethmia centrago
MLDDTVLERLRSEIQSSHVIAPPSQTVVVLPQLDTYQADEGSDDRATNVSTQCNVELRSALEDAIREYRFMSPEVRPRLPRLPMHKKNRALVAVLDSQLSNYFDDCEDLTDTHSILYCAAVAVCRVAHVIFPNDSRATRPKPTVPIWQCRIERRIGGARALIGKLICFREGNTRPRVMRFVRRAFSGTDISPQDYMSRVTERIDFLKQKVYAWANRIRRYKRRVDRYTQNRTFQSDERWVYRGWEQRDQGVTDTRLPDDDVMCSFWRSIWSVPVSHTEGDWARKIERACDPLPEMGAITICPQDVARAVRPLPNWKSPGPDGLHNFWLKWFLGSHARLAAQYQTALESGSLPQFLTIGVTHLLHKSGSTAEPKNYRPITCLPTVYKVLTSILRAKINKHIDTNSIMSASQNGCRNGSRGTKELLLIDMTISQQVRRFRKDLSTCWIDYKKAYDSVPHTWLMRVLELYKVDATLRTFLMSCMGQWRTVLRYPGCRNIQRNSEPIRIERGIFQGDSLSPLWFCLALNPLSTLLEDSGLGYRLRRGGQVISHLLYMDDLKLFASNNLQLMELLKITETFSSAIRMEFGVDKCAVMHVKRGEIVESVGTQLSDSINLRALSASETYKYLGMSEALGINVTDMKQSLKQRFFDRLKKVFNSLLSGGNKVRAFNGWVMPVLMYSFGILKWTQTELDALDRRVRTLLTAYRMHHPRSSVMRLYIPRKCGGRGFLNAKTLHNREVCSLREYFLEADVGMHRDVVAVDKGLTPLSLAKENWRKLVVLDTNDRREVWQSKELHGSFFRALHEPDVDFQASVAWLRFGDLFGETEGFVCAIMDEVIMTKNYRRFIVKDGTVDMCRACHRPGESIRHIISGCSRLANEEYLHRHNLVARIIHQQLALKYSLVESEVPYYRYVPDPVLDNGNITLYWDRSIITDRTIVANKPDIVVVDRTERRAMIVDITVPHDGNLVKAEKDKQIKYLDLAREVVDMWDVDSAIIVPIVVSANGLIAKSLDQHLRRLTLDGWIKGLIQKAVLLDTARIVRRFLSLEP

SEQ ID NO: 11970 - protein, 962 aa, Atethmia centrago
MHKKNRALVAVLDSQLSNYFDDCEDLTDTHSILYCAAVAVCRVAHVIFPNDSRATRPKPTVPIWQCRIERRIGGARALIGKLICFREGNTRPRVMRFVRRAFSGTDISPQDYMSHVTERIDFLKQKVYAWANRIRRYKRRVDRYTQNRTFQSDERWVYRGWEQRDQGVTDTRLPDDDVMCSFWRSTWSVPVSHTEGDWARKVERACDPLPEMGAITICPQDVARAVRPLPNWKSPGPDGLHNFWLKWFLGSHARLAAQYQTALESGSLPQFLTIGVTHLLHKSGSTAEPKNYRPITCLPTVYKVLTSILRAKINKHIDTNSIMSASQNGCRNGSRGTKELLLIDMTISQQVRRFRKDLSTCWIDYKKAYDSVPHTWLMRVLELYKVDATLRTFLMSCMGQWRTVLRYPGCRNIQRNSEPIRIERGIFQGDSLSPLWFCLALNPLSTLLEDSGLGYRLRRGGQVISHLLYMDDLKLFASNNLQLMELLKITETFSSAIRMEFGVDKCAVMHVKRGEIVESVGTQLSDSINLRALSASETYKYLGMSEALGINVTDMKQSLKQRFFDRLKKVFNSLLSGGNKVRAFNGWVMPVLMYSFGILKWTQTELDALDRRVRTLLTAYRMHHPRSSVMRLYIPRKCGGRGFLNAKTLHNREVCSLREYFLEADVGMHRDVVAVDKGLTPLSLAKENWRKLVVLDTNDRREVWQSKELHGRFFRALHEPDVDFQASVAWLRFGYLFGETEGFVCAIMDEVIMTKNYRRFIVKDGTVDMCRACHRPGESIRHIISGCSRLANEEYLHRHNLVARIIHQQLALKYSLVESEVPYYRYVPDPVLDNGNITLYWDRSIITDRTIVANKPDIVAVDRTERRAMIVDITVPHDGNLVKAEKDKQIKYLDLAREVVDMWDVDSAIIVPIVVSANGLIAKSLDQHLRRLTLDGWIKGLIQKAVLLDTARIVRRFLSLEP

SEQ ID NO: 11971 - protein, 1194 aa, Autographa gamma
MLTRSKTRTPAHPPSPDPSPSSASQLPDHVPAPAPEVASSSSDEYYSPPTTPTPVRRQGRRRPPSSLAPAGQPASSRAPAPGGDVRRMKWTLSINENVMRAYYGATEGGTNLTAYRARMLSLFQGLEPDVNVSAQRLSDQVRVIQRNHRLDDATLDRLRSEVQRSPATSTPSPAVVPVTGSPPTNLVDGEEEDGAITVSTQCSENIRSTLEDTIREFRSTPPDIRPRLPRLPMHNRNKAIMGVLDSLLLAYFGSSEDLSDTHSILYCAALAACRVANVKINNQNLDTRPKPAVPAWQCRIERRVAEARALIGKLIAFKDGNSRPRVMRFVRRAFTGTSISPSEYTARVTERIDFFKQKVCAWANRIRRYKRRVDRFHLNRMFQRDQRWVFRTWERPVLGVDDGRLPDEDATNSFWRNIWSVPVSHSEGDWMRDVEESCEPIQEMGAITISPQDVANAIRPMSNWKAPGPDGLQNFWLKWFKSSHGCLASQFQCAIESESLPQLFTTGSTHLLHKTGSTTDPKNYRPITCLPTIYKLLTSILRVKINEHIDSNSIMSASQNGCRNGSRGTKELLLIDMAICQQVRRSKKNLSTCWIDYKKAYDSVPHSWLMRVLELYKINTTLRAFLLSCMRRWTTVLRYPGCRDIQQSGGPIRIERGIFQGDSLSPLWFCLALNPLSTLLENSRLGYSLRRGSQVISHLLYMDDLKLFASNELQLMGLLKITESFSNSIRMEFGVDKCAVMHVKQGGIVESQGIQLSDSINLRSLSAADTYKYLGMSEALGINVADMKQSLLTRFFGRLNKVLKSLLSGGNRVRAFNGWVMPVLMYSFGILKWTQTELDALDRRVRTLLTANRMHHPRSSVMRLYIPRKCGGRGFLNAKTLHNREVCNLREYFLQVDVGMHRDVVVVDKGFTPLSLGKENWHKPVVLSVKDRKDVWQSKELHGRYYRSLHGPDVDFLASVAWLRFGDLFGETEGFVCAIMDEVVMTNNYRKYIIKDGTVDICRACHCPGESIRHIISGCSRLANGEYLHRHNQVARIIHQQLALRYKLVEAEVPYYRYVPDPVLDNGHVTLYWDRSIITDRTIVANKPDIVVIDRSERRAMIVDVTIPHDENLVKAEKEKQLKYLDLAHEVVDMWEVDSAVIVPIVVTANGIIAKSLDQHLKRLSLGIWVKGLMQKAVLLDTARIVRRFLSLEP

SEQ ID NO: 11972 - protein, 962 aa, Mesoligia furuncula
MHKKNKALVCALDSQLSNCFNNSKDLTDTHSILYCAAVAACHVAHVKFPNSDRAPRPKPAVPAWQCRIECRIGEARALIGKLICFREGNTRPRVMRFVRRAFSGTDISSRDYLSRVTERIDFLDQKIYAWANRIRRYRRRVERYTQNRTFQNDERWVYRAWERPDQGVTDTRLPDDDAMCSFWRNIWSVPVSHTEGDWTAKIERACDLIPEMGVLTISPQDVARAVRPLPNWKSPGPDGLHNFWIKWFQGSHARLASQFQSALESGSLPQFLTTGITHLLHKSGSTADPKHYRPITCLPTVYKVLTSILRAKINKHIDTNSIMSVSQNGCGNGSRGTKELLLIDMTISQQVRRSRKDLSTCWIDYKKAYDSVPHTWLMRVLELYKVDTTLRTFLMSCMGQWRTVLRYPGCRNIQRNSEPIRIERGIFQGDSLSPLWFCLALNPLSTLLEDSGLGYRLRRGGQVISHLLYMDDLKLFAPNNLQLMELLKITETFSSAIRMEFGVDKCAVMHVKRGEIVESVGTQLSDSTNLRALSASETYKYLGMSEALGINVTDMKQSLKERFFGRLKKVFNSLLSGGNQVRAFNGWVMPVLMYSFGILKWTQTELDALDRKVRTLLTANRMHHPRSSVMRLYIPRKCGGRGFLNAKTLHNREICSLREYFLETDVGMHRDVVAVDKGLTPLSLGKENWRKPVVLDTNDRMEVWQSKELHGRFFRALHGPDVDLLASVAWLRFGDLFGETEGFVYAIMDEVMMTNNYRRFIVKDGTVDICRACHRPGESIRHIISGCSRLANGEYLHRHNLVARIIHQQLALKYSLVESEVPYYRYVPDPVLENGNITLYWDRSIITDRTIVANKPDIVVVDRSELRAMIVDITVPHDENLVKAEKDKQVKYLDLAREVVDMWDVDSAIIVPIVVTANGLIAKSLDQHLKRLSLGSWIKGLIQKAVLLDTARIVRRFLSLEP

SEQ ID NO: 11973 - protein, 880 aa, Spilarctia lutea
MSFRSGNTRPRVMRFVKRAFLGTTISPQEYMSCVTERIDFLKQKVYAWANRIRRYRKRVDRYNQNRMFQRNEKWVYRKWENLSPCMSDGQVPDENATNSFWRNMWSVPVTHTEGDWYRDVERSCESLLPMEPISIDEEDVGYAVRSLPNWKAPGPDGLHNFWLKWFRSSHACLASQFQTALDSGSLPQFLTTGITHLLYKSGDAMDPKNFRPITCLPTLYKLLTSILRLKITTHINHNSILSISQNGCRSGTRGTKELLIIDMTISQQVRRNRKSLATCWIDYKKAFDSVPHTWLLRVLELYKIDTTLCTFLRVCMGQWRTALRYPGCRQSAMNDVLIKIERGIFQGDSLSPLWFCLALNPLSTLLEGSGLGYRLQKDDRVISHLFYMDDLKLLAPTKLQLTALLKVTENFSNSIKMGFGVDKCAVMYVKKGEIVESEGIELSDSTKLRSLSATETYKYLGFSQSLGMPESDMKQTLRERFFSRLKKVLKSLLSGGNKVRACNGWVMPVLMYSFGVLRWTQTELDAIDRRVRTLLTAFRMHHPRSSVMRLYIPRRLGGRGLLNIKTLHNREVYNLREYFLQTDVGVHRSVVTVDTGLTPLALAKENWRKPVVLSTNDRREVWKGKELHGRFYRALHGPDIDFKTSTSWLRYGDLFGETEGFVCAIMDEVIMTNNYRKYILKDGTVDICRACHRPGESIRHIISGCSRLANGEYLHRHNQVARIVHQQLALKYHLVNSEVPYYRYVPDPVLENGRATLYWDRSIITDRTIVANKPDIVVIDRLERRAIIIDIAVPHDENLVKVEKEKQIKYLDLSHEIVDMWNLDSVIIVPIVVSAHGLIAKSLDQHLKRLTLEGWIKGLIQKAVLLGTARIVRRFLSLEP

SEQ ID NO: 11974 - protein, 1197 aa, Spilarctia lutea
MLTRAKLRAQLSPSDSSLRSALPRMEATVEVSAVHEASSSSSSDEYFSPPTSPTPVRRQGRGRPPTSMGSRGPLTSNRAPATGGDVRRMKWTHCINENVMRAYFRATELGTNLTAYRVRLVSMFQELEPAVNVSAQRLSDQVRAIQRCRLLDDALLERIRSDVRNTLTVPSSSHSVDVVVNTPQLPCNDDVDEQRESEIISVSTQYNNRIRSALEDAIQAYRYVNYNNRPRLPRLPIHKRNLALVGALNSLLPDYFGNSEDLGDTHSILYCAAIAVCRVAGVKFIERITTRTKNTMPAWQYRIERRIAVTRTLIGKLIAFKSGNTRPRVMRFVKQAFLGTTISPQQYMSSVTERIDFLKQKVCAWANRIRRYKKRGDRFNQNRMFQTNEKWVYRKWEAPNPCDRDGHLPDENATNTFWRNIWSVPVTHTDGDWMRDVKRSCESITNMKPVSIDREDVSCAVRSLPNWKAPGPDGLHNFWLKWFRSSHACLASQFQAALDSGSLPQFLTTGITHLLYKSGGTMDPKNFRPITCLPTLYKLLTSILRLKITTHINHNSIFSISQNGCRSGTRGTKELLIIDMTISQQVRRNRKSLATCWIDYKKAYDSVPHTWLLKVLELYKIDTTLCTFLKSCMGQWRTVLRYPGCRQSAMNDVLIKIERGIFQGDSLSPLWFCLALNPLSTLLEGSKLGYGLRKDDRVISHLLYMDDLKLLAPTKLQLTALLKITENFSNSIKMEFGVDKCAVMYVKKGLIVESEGVELSDSTKLRSLSATESYKYLGFSQSLGIPESDMKQALRERFFSRLKKVLKSLLSGGNKVRAYNGWVMPVLMYSFGILRWTQTELDALDRRVRTLLTAFRMHHPRSSVMRLYIPRKLGGRGLLNIKTLHNREIYNLREYFLHTDVGMHRSVVAVDTGLTPLALAKENWRKPVVLSTDDRREVWKGKELHGRFYRALHGPDIDFKTSTSWLRYGDFFGETEGFVCAIMDEVIMTNNYRKYILKDGTVDICRACHRPGESIRHIISGCSRLANGEYLHRHNQVARIVHQQLALKYHLVNSEVPYYRYVPDPVLENGRATLYWDRSIITDRTIVANKPDIVVIDRLERRAIIIDIAVPHDENLVKVEKEKQIKYLDLSHEIVDMWNVDSVIIVPIVVSAHGLIAKSLDQHLKRLTLEGWIKGLIQKAVLLDTARIVRRFLSLEP

SEQ ID NO: 11975 - protein, 1199 aa, Spilarctia lutea
MLTRARRRAQLSPPDSSLRSALPSPEEAIEVPAGAEASSSSSSDEFFSPPTSPIPVRRQGRGRPPTSLGSRGPLTSNRAPAAGGDVRRMKWTHSINENVMRAYFRATELGTNLTAYRVRLVSLFQELEPAVNVSAQRLSDQVRAIQRCHLLDDAALERIRSDIRNSLTVPSPSHVLNVVTNSTPQVPQNDDISELVDSEIISVSTQYNDRIRSTLEDAIREYRYVNLNNRPRLSRLPIHKRNLALVSALDSLLPKYFSNSEDLSDTHSILYCAAIAVCRVAGVKFAEYTTTTRQENTLPAWQYRIERRIAEARTLIGKLMSFRSGNTRPRVMRFVKRAFLGTTISPQEYMSCVTERIDFLKQKVYAWANRIRRYRKRVDRYNQNRMFQRNEKWVYRKWENLSPCMSDGQVPDENATNSFWRNMWSVPVTHTEGDWYRDVERSCESLLPMEPISIDEEDVSCAVRSLPNWKAPGPDGLHNFWLKWFRSSHACLASQFQTALDSGSLPQFLTTGITHLLYKSGDAMDPKNFRPITCLPTLYKLLTSILRLKITTHINHNSILSISQNGCRSGTRGTKELLIIDMTISQQVRRNRKSLATCWIDYKKAFDSVPHTWLLKVLELYKIDTTLCTFLKVCMGQWRTALRYPGCRQSAMNDVLIKIERGIFQGDSLSPLWFCLALNPLSTLLEGSGLGYRLQKDDRVISHLFYMDDLKLLAPTSLQLTALLKVTENFSNSIKMEFGVDKCAVMYVKKGEIVESEGIELSDSTKLRSLSATETYKYLGFSQSLGMPESDMKQTLRERFFSRLKKVLKSLLSGGNKVRACNGWVMPVLMYSFGVLRWTQTELDAIDRRVRTLLTAFRMHHPRSSVMRLYIPRRLGGRGLLNIKTLHNREVYNLREYFLQTDVGVHRSVVTVDTGLTPLALAKENWRKPVVLSTNDRREVWKGKELHGRFYRALHGPDIDFKTSTSWLRYGDLFGETEGFVCAIMDEVIMTNNYRRYILKDGTVDICRACHRPGESIRHIISGCSRLANGEYLHRHNQVARIVHQQLALKYHLVNSEVPYYRYVPDPVLENGRATLYWDRSIITDRTIVANKPDIVVIDRLERRAIIIDIAVPHDENLVKVEKEKQIKYLDLSHEIVDMWNVDSVIIVPIVVSAHGLIAKSLDQHLKRLTLEGWIKGLIQKAVLLDTARIVRRFLSLEP

SEQ ID NO: 11976 - protein, 869 aa, Xestia c-nigrum
MRFVRRAFSGTDISPRDYISRVTERIDFLKQKVYAWASHIRRYKRRVDRYTQNRTFQRDERWVYRAWERPDQGVADTRLPDDDAMCSFWRSIWSVPVSHAEGEWTRVVERACDPVLEMGASTISPQDVACAVRPLPCNWKSPGPDGLHNFWIKWFTRSHARLATLFQSALESGSLPEFLTTGITHLLHKSGSTTEPKNYRPITCLPTVYKVLTSILRTKISKHIHDNSIMSASQNGCRNGSRGTKELLLIDMAISQQVRRSQKDLSTCWIDYKKAYDSVPHTWLMRVLELYKVDATLRTFLMSCMGQWRRVLRYPGCRQIQRNSEPIRIERGIFQGDSLSPLWFCLALNPLSTLLEDSGLGYRLRKDGRVISHLLYMDDLKLFAPNDLQLMELLKVTETFSSAIRMEFGVDKCAVMHVKRGEIVESVGTQLSDSINLRSLSATETYKYLGMSEALGISVADMKQSLKERFFGRLKKVFNSLLSGGNKVRAFNGWVMPVLTYSFGILKWTQTELDALDTKVRKLLTAYRMHHPRSSVMRLYIPRKCGGRGFLNAKTLHNREICSLREYFLAADVGMHRDVVAMDKSLTPLSLARENWRKPIILTTDDRRKEWQCKELHGRFYRALHGPDVDFLASVSWLRSGDLFGETEGFVCAIMDEVMMTNNYRRFIVKDGTVDICRACHRPGESIRHIISGCSRLANGEYLHRHNLVARTIHQQLALKYNLVESEVPYYRYVPDPVLNNGSITLYWDQSIITDRTVIANRPDIVVMDRSERRAMIVDITVPHDENLVKAEKDKQIKYLDLAREVVDMWEVDSAIIVPIVVSAHGLIAKSLDQYLRRLSLGSWIKGLIQKAVLLDTARIVRRFLSLEL

SEQ ID NO: 11977 - protein, 974 aa, Xestia c-nigrum
MTPELRPRLPCLPMHNKNRMLVAVLDSQLSNYFDNCEDLTDVHSILYCAAVAACRVARVKFSDDRATRPKPAVPAWQYRIEQRIGGARALIGKLICFREGNTRPRVMRFVRRAFSGTDINPRDYMSRVTERIDFLKQKVYAWASRIRRYKRRVDRYTQNRTFQRDERWVYRAWERPDQGVADTRLPDDDAMCSFWRSIWSVPVSHAEGEWTRVIERACDPVPEMGAITISPQDVACAVRPLPNWKSPGPDGLHNFWIKWFTRSHARLASLFQSALESGSLPEFLTTGITHLLHKSGSTAEPKNYRPITCLPTVYKVLTSILRTKICKHVDDNSVMSASQNGCRNGSRGTKELLLIDMAISQQVRRSRKDLSTCWIDYKKAYDSVPHTWLMRVLELYKVDATLRTFLMSCMRQWRTVLRYPGCRQIQRNSEPIRIERGIFQGDSLSPLWFCLALNPLSTLLEDSGLGYQLRKDGRVISHLLYMDDLKLFAPNDLQLMELLKVTETFSSAIRMEFGVDKCAVMHVKRGEIVESVGTQLSDSINLRSLSATETYKYLGMSEALGINVADMKQSLKERFFGRLKKVFNSLLSGGNKVRAFNGWVMPVLMYSFGILKWTQTELDALDTKVRKLLTAFRMHHPRSSVMRLYIPRKCGGRGFLNAKTLHNREICSLRNYFLEADVGMHRDVVTMDKGLTPLSLAKENWRKPIVLTTDDRRKEWQGKELHGRFYRALHGPDVDFLASVSWLRSGELFGETEGFVCAIMDEVMMTNNYRRFIVKDGTVDICRACHRPGESIRHIISGCSRLANGEYLHRHNLVARIIHQQLALKYNLVESEVPYYRYVPDPVLVNGSITLYWDQSIITDRTVIANRPDIVVMDRSERRAMIVDITVPHDENLVKAEKDKQIKYLDLAREVVDMWEVDTAIIVPIVVSAHGLIAKSLDQHLRRLSLGSWIKGLIQKAVLLDTARLVRRFLSLEP

SEQ ID NO: 11978 - protein, 988 aa, Xestia c-nigrum
MRSALEGAIREYRFMTPELRPRLPRLPMHNKNRMLVAVLDSQLSNYFDNCEDLTDVHSVLYCAAVAACRVARVKFPDDRATRPKPAVPAWQYRIEQRIGGARALIGKLICFREGNTRPRVMRFVRRAFSGTDINPRDYMSRVTERIDFLKQKVYAWASRIRRYKRRVDRYTQNRTFQRDERWVYRAWERPDQGVADTRLPDDDAMCSFWRSIWSVPVSHAEGEWTRVVERACDPVSEMGAITISPQDVACAVRPLPNWKSPGPDGLHNFWIKWFTRSHARLATLFQSALESGSLPEFLTTGITHLLHKSGSTAEPKNYRPITCLPTVYKVLTSILRAKITKHIDENSVMSASQNGCRNGSRGTKELLLIDMAISQQVRRSRKDLSTCWIDYKKAYDSVPHTWLMRVLELYKVDATLRTFLMSCMGQWRTVLRYPGCRKIQRNSEPIRIERGIFQGDSLSPLWFCLALNPLSTLLEDSGLGYQLRKDGRVISHLLYMDDLKLFAPNDFQLMELLKVTETFSSAIRMEFGVDKCAVMHVKRGEIVESVGTQLSDSINLRSLSATETYKYLGMSEALGINVADMKQSLKERFFGRLKKVFNSLLSGGNKVRAFNGWVMPVLMYSFGILKWTQTELDALDTKVRKLLTAFRMHHPRSSVMRLYIPRKCGGRGFLNAKTLHNREICSLRDYFLEADVGMHRDVVAMDKGLTPLSLAKENWRKPIILTTDDRRKEWQGKELHGRFYRALHGPDVDFLASVSWLRSGDLFGETEGFVCAIMDEVMMTNNYRRFIVKDGTVDICRACHRPGESIRHIISGCSRLANGEYLHRHNLVARIIHQQLALKYNLVESEVPYYRYVPDPVLVNGSITLYWDQSIITDRTVIANRPDIVVMDRSERRAMIVDITVPHDENLVKAEKDKQIKYLDLAREVVDMWEVDSAIIVPIVVSAHGLIAKSLDQHLRRLSLGSWIKGLIQKAVLLDTARIVRRFLSLEP

SEQ ID NO: 11979 - protein, 1198 aa, Xestia c-nigrum
MLTRAAARRARLPPPDPSLSSASPPPEPSPIVSAVTPAVAVASSSSDEYFSPPTTPPPVRRRGGRRPPDGLGPRGPPASDRVPAPGGSVQRMRWTQSNNENVMRAYYGATEGGNNLTAYRVRMLSLFQVLEPAVNVSAQRLSDQVRVIQRNRMLDDTVLDRLRTEMHSSHVIATPPSQAVVPPQSTTITNRDDDVSSDMITNVGTQYSEDMRSALEGAIREYRFMTPELRPRLPRLPMHNKNRMLVAVLDSQLSNYFDNCEDLTDVHSVLYCAAVAACRVARVKFPDDRATRPKPAVPAWQYRIEQRIGGARALIGKLICFREGNTRPRVMRFVRRAFSGTDINPRDYMSRVTERIDFLKQKVYAWASRIRRYKRRVDRYAQNRTFQRDERWVYRAWERPDQGVADTRLPDDDAMCSFWRSIWSVPVSHAEGEWTRVVERACDPVSEMGAITISPQDVACAVRPLPNWKSPGPDGLHNFWIKWFTRSHARLATLFQSALESGSLPEFLTTGITHLLHKSGSTAEPKNYRPITCLPTVYKVLTSILRAKITKHIDENSVMSASQNGCRNGSRGTKELLLIDMAISQQVRRSRKDLSTCWIDYKKAYDSVPHTWLMRVLELYKVDATLRTFLMSCMGQWRTVLRYPGCRQIQRNSEPIRIERGIFQGDSLSPLWFCLALNPLSTLLEDSGLGYQLRKDGRVISHLLYMDDLKLFAPNDFQLMELLKVTETFSSAIRMEFGVDKCAVMHVKRGEIVESVGTQLSDSINLRSLSATETYKYLGMSEALGINVADMKQSLKERFFGRLKKVFNSLLSGGNKVRAFNGWVMPVLMYSFGILKWTQTELDALDTKVRKLLTAFRMHHPRSSVMRLYIPRKCGGRGFLNAKTLHNREICSLRDYFLEADVGMHRDVVAMDKGLTPLSLAKENWRKPIILTTDGRRKEWQGKELHGRFYRALHGPDVDFLASVSWLRSGDLFGETEGFVCAIMVEVMMTNNYRRFIVKDGTVDICRACHRPGESIRHIISGCSRLANGEYLHRHNLVARIIHQQLALKYNLVESEVPYYRYVPDPVLVNGSITLYWDQSIITDRTVIANRPDIVVMDRSERRAMIVDITVPHDENLVKAEKDKQIKYLDLAREVVDMWEVDSAIIVPIVVSAHGLIAKSLDQHLRRLSLGSWIKGLIQKAVLLDTARIVRRFLSLEP

SEQ ID NO: 11980 - protein, 1198 aa, Xestia c-nigrum
MLTRAAARRARLPPPDPSLSSASPPPEPSPIVSAVTPAVAVASSSSDEYFSPPTTPPPVRRRGGRRPPDGLGPRGPPASDRVPAPGGSVQRMRWTQSNNENVMRAYYGATEGGNNLTAYRVRMLSLFQVLEPAVNVSAQRLSDQVRVIQRNRMLDDTVLDRLRTEMHSSHVIAAPPSQAVVPPQSTTITNRDDDVSSDMITNVGTQYSEDMRSALEGAIREYRFMTPELRPRLPRLPMHNKNRMLVAVLDSQLSNYFDNCEDLTDVHSVLYCAAVAACRVARVKFPDDRATRPKPAVPAWQYRIEQRIGGARALIGKLICFREGNTRPRVMRFVRRAFSGTDINPRDYMSRVTERIDFLKQKVYAWASRIRRYKRRVDRYTQNRTFQRDERWVYRAWERPDQGVADTRLPDDDAMCSFWRSIWSVPVSHAEGEWTRVVERACDPVSEMGAITISPQDVACAVRPLPNWKSPGPDGLHNFWIKWFTRSHARLATLFQSALESGSLPEFLTTGITHLLHKSGSTAEPKNYRPITCLPTVYKVLTSILRAKITKHIDENSVMSASQNGCRNGSRGTKELLLIDMAISQQVRRSRKDLSTCWIDYKKAYDSVPHTWLMRVLELYKVDATLRTFLMSCMGQWRTVLRYPGCRQIQRNSEPIRIERGIFQGDSLSPLWFCLALNPLSTLLEDSGLGYQLRKDGRVISHLLYMDDLKLFAPNDFQLMELLKVTETFSSAIRMEFGVDKCAVMHVKRGEIVESVGTQLSDSINLRSLSATETYKYLGMSEALGINVADMKQSLKERFFGRLKKVFNSLLSGGNKVRAFNGWVMPVLMYSFGILKWTQTELDALDTKVRKLLTAFRMHHPRSSVMRLYIPRKCGGRGFLNAKTLHNREICSLRDYFLEADVGMHRDVVAMDKGLTPLSLAKENWRKPIILTTDDRRKEWQGKELHGRFYRALHGPDVDFLASVSWLRSGDLFGETEGFVCAIMDEVMMTNNYRRFIVKDGTVDICRACHRPGESIRHIISGCSRLANGEYLHRHNLVARIIHQQLALKYNLVESEVPYYRYVPDPVLVNGSITLYWDQSIITDRTVIANRPDIVVMDRSERRAMIVDITVPHDENLVKAEKDKQIKYLDLAREVVDMWEVDSAIIVPIVVSAHGLIAKSLDQHLRRLSLGSWIKGLIQKAVLLDTARIVRRFLSLEP

SEQ ID NO: 11981 - protein, 1198 aa, Xestia c-nigrum
MLTRAAARRARLPPPDPSLSSASPPPEPSPIVSAVTPAVAVASSSSDEYFSPPTTPPPVRRRGGRRPPDGLGPRGPPASDRVPAPGGSVQRMRWTQSNNENVMRAYYGATEGGNNLTAYRVRMLSLFQVLEPAVNVSAQRLSDQVRVIQRNRMLDDTVLDRLRTEMQGSHVIATPPSQAVVPPQSTTITNRDDDVSSDMITNVSIQYSEDMRSALEGAIREYRFMTPELRPRLPRLPMHNKNRMLVAVLDSQLSNYFDNCEDLTDVHSVLYCAAVAACRVARVKFPDDRATRPKPAVPAWQYRIEQRIGGARALIGKLICFREGNTRPRVMRFVRRAFSGTDINPRDYMSRVTERIDFLKQKVYAWASRIRRYKRRVDRYTQNRTFQRDERWVYRAWERPDQGVADTRLPDDDAMCSFWRSIWSVPVSHAEGEWTRVVERACDPVPEMGAITISPQDVACAVRPLPNWKSPGPDGLHNFWIKWFTRSHARLATLFQSALESGSLPEFLTTGITHLLHKSGSTAEPKNYRPITCLPTVYKVLTSILRAKITKHIDENSVMSASQNGCRNGSRGTKELLLIDMAISQQVRRSRKDLSTCWIDYKKAYDSVPHTWLMRVLELYKVDATLRTFLMSCMGQWRTVLRYPGCRQIQRNSEPIRIERGIFQGDSLSPLWFCLALNPLSTLLEDSGLGYQLRKDGQVISHLLYMDDLKLFAPNDFQLVELLKVTETFSSAIRMEFGVDKCAVMHVKRGEIVESVGTQLSDSINLRSLSATETYKYLGMSEALGINVADMKQSLKERFFGRLKKVFNSLLSGGNKVRAFNGWVMPVLMYSFGILKWTQTELDALDTKVRKLLTAFRMHHPRSSVMRLYIPRKCGGRGFLNAKTLHNREICSLRDYFLEADVGMHRDVVAMDKGLTPLSLAKENWRKPIILTTDDRRKEWQGKELHGRFYRALHGPDVDFLASVSWLRSGDLFGETEGFVCAIMDEVMMTNNYRRFIVKDGTVDICRACHRPGESIRHIISGCSRLANGEYLHRHNLVARIIHQQLALKYNLVESEVPYYRYVPDPVLVNGSITLYWDQSIITDRTVIANRPDIVVMDRSERRAMIVDITVPHDENLVKAEKDKQIKYLDLAREVVDMWEVDSAIIVPIVVSAHGLIAKSLDQHLRRLSLGSWIKGLIQKAVLLDTARIVRRFLSLEP

SEQ ID NO: 11982 - protein, 1198 aa, Griposia aprilina
MLTRSAARRARPPPPDSSLSSASLPPVSSPTVSAVTTPAAVVASSSSDEYFSPPTTPPPVRRRGGHRPPDGLGPRGPPASDRVPAPGGSVQRMRWTRSINENVMRSYYGATEGGNNLTAYRVRMLSLFQVLEPAVNVSAQRLSDQVRVIQRNHMLDDTVLDRLRNEMQSSHVIAPPSQTVVVLPQSNTSQADEESDDRATNVSTQCNDELRSALEDAIREYRFISPELRPRLPRLPMHNKNRVLVAALDAQLSNYFDDCVDLTDTHSILYCAAVAACRVAHVKFANDSRATRPKPAVPAWQCRIERRIGEARALIGKLICFREGNTRPRVMRFVRRAFAGTNISPQDYMSCVTERIDFLKQKVYAWANRIRRYKRRVERYTQNRTFQRDERWVYRGWERPDQGVADTCLPDDDAMCSFWRNIWSVPVSHTEGDWTREVERACYPIPEMGAITICPQDVTRAVRPLPNWKSPGPDGLHNFWIKWFGRSHARLAAQYQVALESGSLPQFLTTGVTHLLHKSGSTAEPKNYRPIACLPTVYKVLTSILRDKINKHIDTNYIMSPSQNGCRNGSRGTKELLLIDMAISQQVRRSRKDLSTCWIDYKKAYDSVPHTWLMRVLELYKVEATLRTFLMSCMGQWRTVLHYPACLNTQRNSEPIRIERGIFQGDSLSPLWFCLALNPLSTLLEDSGLGYRLRRGGQVISHLLYMDDLKLFAPNNSQLMDLLKVTETFSSAIRMEFGVDKCAVMHVKRGEIVESVGTQLSDSINLRALSASETYKYLGMSEALGINGTDMKQSLKDRFFGRLKKVFNSLLSGGNKVRAFNGWVMPVLMYSFGILKWTQTELDALDRKVRTLLTANRMHHPRSSVMRLYIPRKCGGRGFLNAKTLHNREICSLREYFLEADVGMHRDVVTVDKGLTPLSLAKENWRKPVVLDTNDRMEVWQSKELHGRFFRALHGPDVDQLASVAWLRFGDLFGETEGFVCAIMDEVMMTNNYRRFIVKDGTVDICRACHRPGESIRHIISGCSRLANEEYLHRHNLVARIIHQQLALKFSLVESEVPYYRYVPDPVLENGHITLYWDRSIITDRTIVANKPDIVMVDRLERRAMIVDITVPHDGNLVKAEKDKQIKYLDLAREVVDMWDVDSAIIVPIVVTANGLIAKSLDQHLRRLSLGSWIKGLIQKAVLLDTARIVRRFLSLEP

SEQ ID NO: 11983 - protein, 1045 aa, Griposia aprilina
MLDDTVLDLLRNEMQSSHVIAPPSQTVVVLPQSNTSQAEEESDDRATNVSTQCNDELRSALEDAIREYRFISPELRPRLPRLPMHNKNRVLVAALDAQLSNYFDDSVDLTDTHSILYCAAVAACRVAHVKFANDSRATRPKPAVPAWQCRIERRIGGARALIGKLICFREGNTRPRVMRFVRRAFAGTNISPQDYMSCVTERIDFLKQKVYAWANRIRRYKRRVERYTQNRTFQRDERWVYRGWERPDQGVADTCLPDDDAMCSFWRNIWSVPVSHTEGDWTREVERACDPIPEMGAITICPQDVTRAVRPLPNWKSPGPDGLHNFWIKWFGRSHARLAAQYQVALESGSLPQSLTTGVTHLLHKSGSTAEPKNYRPIACLPTVYKVLTSILRDKINKHIDTNYIMSPSQNGCRNGSRGTKELLLIDMAISQQVRRSRKDLSTCWIDYKKAYDSVPHTWLMRVLELYKVEATLRTFLMSCMEQWRTVLRYPACRNTQRNSEPIRIERGIFQGDSLSPLWFCLALNPLSTLLEDSGLGYRLRRGGQVISHLLYMDDLKLFAPNNSQLMDLLKVTETFSSAIRMEFGVDKCAVMHVKRGEIVESVGTQLSDSINLRALSASETYKYLGMSEALGINGTDMKQSLKDRFFGCLKKVFNSLLSGGNKVRAFNGWVMPVLMYSFGILKWTQTELDALDRKVRTLLTANRMHHPRSSVMRLYIPRKCGGRGFLNAKTLHNREICSLREYFLEADVGMHRDVVTVDKGLTPLSLAKENWRKPVVLDTNDRMEVWQSKELHGRFFRALHGPDVDQLASVAWLRFGDLFGETEGFVCAIMDEVMMTNNYRRFIVKDGTVDICRACHRPGESIRHIISGCSRLANEEYLHRHNLVARIIHQQLALKYSLVESEVPYYRYVPDPVLENGHITLYWDRSIITDRTIVANKPDIVMVDRLERRAMIVDITVPHAGNLVKAEKDKQIKYLDLAREVVDMWDVDSAIIVPIVVTANGLIAKSLDQHLRRLSLGSWIKGLIQKAVLLDTARIVRRFLSLEP

SEQ ID NO: 11984 - protein, 1198 aa, Griposia aprilina
MLTRSAARRARPPPPDSSFSSASLPPVSSPTVSAVTTPAAVVASSSSDEYFSPPTTPPPVRRRGGHRPPDGLGPRGPPASDRVPAPGGSVQRMRWTRSINENVMRSYYGATEGGNNLTAYRVRMLSLFQVLEPAVNVSAQRLSDQVRVIQRNHMLDDTVLDRLRNEMQSSHVIAPPSQTVVVLSQSNTSQADEESDDRATNVSTQCNDELRSALEDAIREYRFISPELRPRLPRLPMHNKNRVLVAALDAQLSNYFDDCVDLTDTHSILYCAAVAACRVAHVKFANDSRATRPKPAVPAWQCRIERRIGEARALIGKLICFREGNTRPRVMRFVRRAFAGTNISPQDYMSCVTERIDFLKQKVYAWANRIRRYKRRVERYTQNRTFQRDERWVYRGWERPDQGVADTCLPDDDAMCSFWRNIWSVPVSHTEGDWTREVERACDPIPEMGAITICPQDVTRAVRPLPNWKSPGPDGLHNFWIKWFGRSHARLAAQYQVALESGSLPQFLTTGVTHLLHKSGSTAEPKNYRPIACLPTVYKVLTSILRDKINKHIDTNYIMSPSQNGCRNGSRGTKELLLIDMAISQQVRRSRKDLSTCWIDYKKAYDSVPHTWLMRVLELYKVEATLRTFLMSCMGQWRTVLHYPACRNTQRNSEPIRIERGIFQGDSLSPLWFCLALNPLSTLLEDSGLGYRLRRGGQVISHLLYMDDLKLFAPNNSQLMDLLKVTETFSSAIRMEFGVDKCAVMHVKRGEIVESVGTQLSDSINLRALSASETYKYLGMSEALGINGTDMKQSLKDRFFGRLKKVFNSLLSGGNKVRAFNGWVMPVLMYSFGILKWTQTELDALDRKVRTLLTANRMHHPRSSVMRLYIPRKCGGRGFLNAKTLHNREICSLREYFLEADVGMHRDVVTVDKGLTPLSLAKENWRKPVVLDTNDRMEVWQSKELHGRFFRALHGPDVDQLASVAWLRFGDLFGETEGFVCAIMDEVMMTNNYRRFIVKDGTVDICRACHRPGESIRHIISGCSRLANEEYLHRHNLVARIIHQQLALKYSLVESEVPYYRYVPDPVLENGHITLYWDRSIITDRTIVANKPDIVMVDRLERRAMIVDITVPHDGNLVKAEKDKQIKYLDLAREVVDMWDVDSAIIVPIVVTANGLIAKSLDQHLRRLSLGSWIKGLIQKAVLLDTARIVRRFLSLEP

SEQ ID NO: 11985 - protein, 1106 aa, Griposia aprilina
MRWTRSINENVMRSYYGATEGGNNLTAYRVRMLSLFQVLEPAVNVSVQRLSDQVRVIQRNHMLDDTVLDRLRNEMQSSHVIAPPSQTVVVLPQSNTSQADEESDDRATNVSTQCNDELRSALEDAIREYRFISPELRPRLPRLPMHNKNRVLVAALDAQLSNYFDDCVDLTDTHSILYCAAVAACRVAHIKFANDSRPTRPKPAVPAWQCRIERRIGEARALIGKLICFREGNTRPRVMRFVRRAFAGTNISPQDYMSCVTERIDFLKQKVYAWANRIRRYKRRVERYTQNRTFQRDERWVYSGWERPDQGVADTCLPDDDAMCSFWRNIWSVPVSHTEGNWTREVERACDPIPEMGAITICPQDVTRAVRPLPNWKSPGPDGLHNFWIKWFGRSHARLAAQYQVALESGSLPQFLTTGVTHLLHKSGSTAEPKNYRPIACLPTVYKVLTSILRDKINKHIDTNYIMSPSQNGCRNGSRGTKELLLIDMAISQQVRRSRKDLSTCWIDYKKAYDSVPHTWLMRVLELYKVEATLRTFLMSCMGQWRTVLHYPACRNTQRNSEPIRIERGIFQGDSLSPLWLCLALNPLSTLLEDLGLGYRLRRGGQVISHVLYMDDLKLFAPNNSQLMDLLKVTETFSSAIRMEFGVDKCAVMHVKRGEIVESVGTQLSDSINLRALSASETYKYLGMSEALGINGTDMKQSLKDRFFGRLKKVFNSLLSGGNAVRAFNGWVMPVLMYSFGILKWTQTELDALDRKVRTLLTANRMHHPRSSVMRLYIPRKCGGRGFLNAKTLHNREICSLREYFLEADVGMHRDVVTVDKGLTPLSLAKENWRKPVVLDTNDRMEVWQSKELHGRFFRALHGPDVDQLVSVAWLRFGDLFGETEGFVCAIMDEVMMTNNYRRFIVKDGTVDICRACHRPGESIRHIISGCSRLANEEYLHRHNLVARIIHQQLALKYSLVESEVPYYRYVPDPVLENGHITLYWDRSIITDRTIVANKPDIVMVDRLERRAMIVDITVPHDGNLVKAEKDKQIKYLDLAREVVDMWDVDSAIIVPIVVTANGLIAKSLDQHLRRLSLGSWIKGLIQKAVLLDTARIVRRFLSLDP

SEQ ID NO: 11986 - protein, 1199 aa, Griposia aprilina
MMLTRSAKRRAHPPPPDSSLSSASPPPVSSPTVSAVTTPAAVVASSSSDEYFSPPTTPPPVRRRGGHRPPDGLGPRGPPASDRVPAPGGSVQRMRWTRSINENVMRSYYGATEGGNNLTAYRVRMLSLFQVLEPAVNVSAQRLSDQVRVIQRNRMLDDTVLDRLRNEMQSSHVIAPPSQTVVVLPQSNTSQADEESDDRATNVSTQCNDELRSALEDAIREYRFISPELRPRLPRLPMHNKNRVLVAALDAQLSNYFDDCVDLTDTHSILYCAAVAAYRVAHIKFANDSRPTRPKPAVPAWQCRIERRIGGARALIGKLICFREGNTRPRVMRFVRRAFAGTNISPQDYMSCVTERIDFLKQKVYAWANRIRRYKRRVERYTQNRTFQRDERWVYRGWERPDQGVADTCLPDDDAMCSFWRNIWSVPVSHTEGDWGREVERACDPIPEMGAISICPQDVTRAVRPLPNWKSPGPDGLQNFWIKWFGRSHARLAAQYQVAIESGSLPQFLTTGVTHLLHKSGSTAEPKNYRPITCLPTVYKVLTSILRAKINKHIDTNSIMSTSQNGCRNGSRGTKELLLIDMAISQQVRRSRKDLSTCWIDYKKAYDSVPHTWLVRVLELYKVDATLRTFLKSCMGQWRTILHYPGCRNIQRDNEPIRIERGIFQGDSLSPLWFCLALNPLSTLLEDSGLGYRLRRGGQVISHLLYMDDLKLFAPNNLQLMELLKVTETFSSAIRMEFGVDKCAVMHVKRGEIVESVGTQLSYSINLRALSASDTYKYLGMSEALGINGTDMKQSLKERFFGRLKKVFNSLLSGGNKVRAFNGWVMPILMYSFGILKWTQTELDALDRKVRTLLTANRMHHPRSSVMRLYIPRKCGGRGFLNAKTLHNREICSLREYFLEADVGMHTDVVKVDKGLTPLSLAKENWRKPVVLDTNDRMEVWQSKELHGRFFRALHGPDVDQLASVAWLRFGDLFGETEGFVCAIMDEVILTNNYRRHIMKDGTVDVCRACHRPGESIRHIISGCSRLANEEYLHRHNLVARIIHQQLALKYSLVESEVPYYRYVPDPVLENGHITLYWDRSIITDRTIVANKPDIVVVDRLERRAMIVDITVPHDGNLVKAEKDKQIKYLDLAREVVDMWDVDSAIIVPIVVTANGLIAKSLDQHLRRLSLGSWIKGLIQKAVLLDTARIVRRFLSLEP

SEQ ID NO: 11987 - protein, 1198 aa, Griposia aprilina
MLTRSAARRARPPPPDSSLSSASLPPVSSPTVSAVTTPAAVVASSSSDEYFSPPTTPPPVRRRGGHRPPDGLGPRGPPASDRVPAPGGSVQRMRWTRSINENVMRSYYEATEGGNNLTAYRVRMLSLFQVLEPAVNVSAQRLSDQVRVIQRNHMMDDAVLDRLRNEMQSSHVIAPPSQTVVVLPQSNTSQADEESDDRATNVSTQCNDELRSALEDAIREYRFISPDLRPRLPRLPMHNKNRVLVAALDAQLSNYFDDCVDLTDTHSILYCAAVAVCRVAHVKFANDSRATRPKPAVPAWQCRIERRIGEARALIGKLICFREGNIRPRVMRFVRRAFAGTNISPQDYMSCVTDRIDFLKQKVYAWANRIRRYKRRVERYTQNRTFQRDERWVYRGWERPDQGVADTCLPDDDAMCSFWRNIWSVPVSHTEGDWTREVERACDPIPEMGAITICPQDVTRAVRPLPNWKSPGPDGLHNFWIKWFGRSHARLAAQYQVALESGSLPQFLTTGVTHLLHKSGSTAEPKNYRPIACLPTVYKVLTSILRDKINKHIDTNYIMSPSQNGCRNGSRGTKELLLIDMAISQQVRRSRKDLSTCWIDYKKAYDSVPHTWLMRVLELYKVEATLRTFLMSCIRQWRTVLHYPACRNTQRNSEPIRIERGIFQGDSLSPLWFCLALNPLSPLLEDSGLGYRLRRGGQVISHLLYVDDLKLFAPNNSQLMDLLKVTETFSSAIRMEFGVDKCAVMHVKRGEIVESVGTQLSDSINLRALSASETYKYLGMSEALGINGTDMKQSLKDRFFGRLKKVFNSLLSGGNKVRAFNGWVMPVLMYSFGILKWTQTELDALDRKVRTLLTANRMHHPRSSVMRLYIPRKCGGRGFLNAKTLHNREICSLREYFLEADVGMHRDVVTVDKGLTPLSLAKENWRKPVVLDTNDRMEVWQSKELHGRFFRALHGPDVDQLASVAWLRFGDLFGETEGFVCAIMDEVMMTNNYRRFIVKDGTVDICRACHRPGESIRHIISGCSRLANEEYLHRHNLVARIIHQQLALKYSLVESEVPYYRYVPDPVLENGHITLYWDRSIITDRTIVANKPDIVMVDRLERRAMIVDITVPHDGNLVKAEKDKQIKYLDLAREVVDMWDVDSAIIVPIVVTANGLIAKSLDQHLRRLSLGSWIKGLIQKAVLLDTARIVRRFLSLEP

SEQ ID NO: 11988 - protein, 912 aa, Griposia aprilina
MHNKNRALVAALDAQLSNYFDDCVDLIDTHSILYCAAVAACCVAHVKFANDSRATRAKPAVPAWQCRIERRIGGARALIGKLTCFREGNTRPRVMRFVRRAFAGTNISPQDYMSCVTERIDFLKQKVYAWANRIRRYKRRVERYTQNRTFQRDERWVYRDWERPDQGVTDTYLPDDDAMCSFWRNIWSVPVSHTEGDWTREVERACEPIPEMGAITICPQDVTSAVRPLPNWNSPGPDGLHNFWIKSFLRSHARLAARFQVALESGSLPQFLTTGVTHLLHKSGSTAEPKNYRPITCLPTVHKVLTSILRAKINNHIDTNSIMSPSQNGCRNGSRGTKELLLIDMTISQQVRRSRKDLSTCWIDYKKAYDSVPHTWLMRVLELYKVDSTLRTFLKSCMGQWRTVLHYPGCRNVQRNSEPIRIERGIFQGDSLSPLWFCLALNPLSTLLENSGLGYRLRRGGQVISHLLYMDDLKLFVPNKLQLMELLKVTETFSSAIRMEFGVDKCAVMHVKRGEIVESVGTQLSDSMNLRALSASETYKYLGMSEALGINDTNMKQSSKERFFGRLKKVFNSLLSGGNKVRAFSGWVMPVLMYSFGVLKWTQTELDTLDRRVRTLLTANRMHHPRSSVMRLYIPRKCGGRGFLNAKTLHNREICSLREYFLETDVGMHRDVIAVDKGLTPLSLAKENWRKPVVLDTNDRMEVWQSKELHGRFFRALHGPDVDLQASVAWLRFGDLFGETEGFVCAIMDEVMMTNNYRRFLVKDGTVDICRACHRPGESITHIISGCSRLAKEEYLHRHNLVARIIHQQLALKYSFVESEVPYYRYVPDPVLENGNITLYCDRSIITDRTIVANKPDIVVVDRRERRAMIVDITIPHDVNLVKAEKINKSSILTWLTRLSTCGTWTQRSLCR

SEQ ID NO: 11989 - protein, 1197 aa, Griposia aprilina
MLTRSAALRARLPTPDSSLSSASPPPVSSPIVSAVTTPAAVVASSSSDEYFSPPTTPPPARRRGGHRPPDGLGPRGPPASDRVPAPGGSVQRMRWTQSINENVMRSYYGATEGGNNLTAYRVRMLSLFQVLEPAVNVSAQRLSDQVRVIQRNHMLDDTVLDRLRSEMQSSHVIAPPSQTVVVLPQPITSHDEGSDDRATNVSTQCNEELRSALEGAIREYRFMSPELRPRLPRLPMHNKNRALVAALDSQLSNYFDDCVDLTDTHSILYCAAVAACRVAHVKFANDSRATRPKPAVPAWQCRIERRIGGARALIGKLICFREGNTRPRVMRFVRRAFAGTDVSPQDYISCVTERIDFLKQKVYAWASRIRRYKRRVERYTQNRTFQRDERWVYRDWEQPDQGVADTYLPDDDAMCSFWHNIWSVPVSHTEGDWTREVERACEPIPEMGAITICPQDVARAVRPLPNWKSPGPDGLHNFWIKWFLKSHARLAAQFQAALESGSLPQFLTTGVTHLLHKSGSIAEPKNYRPITCLPTVYKVLTSILRAKINKHIDTNSIMSASQNGCRNGSRGTKELLLIDMAISQQVRRSRKDLSTCWIDYKKAYDSVPHTWLMRVLELYKVDATLRTFLKSCMGQWRTVLRYPTCRNTQRNSEPIRIERGIFQGDSLSPLWFCLALNPLSTLLEDSGLGYRLRRGGRVISHLLYMDDLKVFAPNNLQLIELLKVTETFSSAIRMEFGLDKCAVMHVKRGEIVESVGTQLSDSMNLRALSASETYKYLGMSEALGVNNTDMKQSLKERFFGRLKKVFNSLLSGGNKVRAFNGWVMPVLMYSFGILKWTQTELDTLDRRVRTLLTANRMHHPRSSVMRLYIPRKCGGRGFLNAKSLHNREICSLREYFLEADVGMHRDVVAVDKGLTPLSLAKENWRKPVVLDTNDRMEVWQSKELHGRFFRALHGPDVDVQASVAWLRFGDLFGETEGFVCAIMDEVMMTNNYRRFIVKDGTVDICRACHRPGESIRHIISGCSRLANEEYLHRHNLVARIIHQQLALKYSFVESEVPYYRYVPDPVLENGTITLYWDRSIITDRTIIANKPDIVLVDRRERRAMIVDITIPHDGNLVKAEKDKQIKYLDLAREVVDMWDVDSAIIVPIVVTANGLIAKSLDQHLRRLSLGSWIKGLIQKAVLLDTARIVRRFLSLEP

SEQ ID NO: 11990 - protein, 868 aa, Griposia aprilina
MRFVRRAFAGTNISPQDYMSCVTERIDFLKQKVYALANRIRRYKRRVERYTQNRTFQRDERWVYRGWERPDQGVADTCLPDDDAMCSFWRNIWSVPVSHTEGDWGREVERACDPIPEMGAISICPQDVTRAVRPLPNWKSPGPDGLQNFWIKWFGRSHARLAAQYQVAIESGSLPRFLTTGVTHLLHKSGSTAEPKNYRPITCLPTVYKVLTSILRAKINKHIDTNSIMSPSQNGCRNGSRGTKELLLIDMAISQQVRRSRKDLSTCWIDYKKAYDSVPHTWLVRVLELYKVDATLRTFLKSCMGQWRTILHYPGCRNIQRDNEPIRIERGIFQGDSLSPLWFCLALNPLSTLLEDSGLGYRLRRGGQVISHLLYMDDLKLFAPNNLQLMELLKVTETFSSAIRMEFGVDKCAVMHVKRGEIVESVGTQLSYSINLRALSASDTYKYLGMSEALGINGTDMKQSLKERFFGRLKKVFNSLLSGGNKVRAFNGWVMPVLMYSFGILKWTQTELDALDRKVRTLLTANRMHHPRSSVMRLYIPRKCGGRGFLNAKTLHNREICSLREYFLEADVGMHTDVVKVDKGLTPLSLAKENWRKPVVLDTNDRMEVWQSKELHGRFFRALHGPDVDQLASVAWLRFGDLFEETEGFVCAIMDEVILTNNYRRHIMKDGTVDVCRACHRPGESIRHIISGCSRLANEEYLHRHNLVARILHQQLALKYSLVESEVPYYRYVPDPVLENGHITLYWDRSIITDRTIVANKPDIVVVDRLERRAMIVDITVPHDGNLVKAEKDKQIKYLDLAREVVDMWDVDSAIIVPIVVTANGLIAKSLDQHLRRLSLGSWIKGLIQKAVLLDTARIVRRFLSLEP

SEQ ID NO: 11991 - protein, 1198 aa, Omphaloscelis lunosa
MLTRSAARRARLPPPDSPLSSASSPPVLSPTVNAVMTPAAAVASSSSDEYFSPPTTPPPARRRGRRRPPDGLGPRGPPASDRVPAPGGSVQRMRWTRSINENVMRSYYGATEGGNNLTAYRVRMLSLFQVLEPAVNVSAQRLSDQVRVIQRNHMLDDTVLDRLRSEMQSSHVIAPPVRSVIVPSQIITSQADERIDDRATNVSTQCNEELRSALEGAIHEYRFMSPELRPRLPRLPMHNKNKALVAALDSQLSNYFDDCEDLTDTHSILYCAAVAVCRVAHVKFSNDSRATRPKPAVPAWQCRIERRIDGARTLIGKLICFREGNTRPRVMRFVRRAFLGTDISPQDYMTRVTERIDFLKQKVYAWANRIRRYKRRVERYTQNRTFQSDERWVYRAWERPNQGVTDTHLPDEDAMCSFWRSIWSVPVSHTEGDWTREVERACDSIPEMGAITICPQDVARAVRPLPNWKSPGPDGLHNFWIKWFVRSHARLAAQYQTALESGSLPQFLTTGVTHLLHKSGSTVEPKNYRPITCLPTVYKVLTSVLRAKINKHIDTNSIMSASQNGCRNGSRGTKELLLIDMAISQQVRRSRKDLSTCWIDYKKAYDSVPHTWLMRVLELYKVDITLRTFLMSCMGQWRTVLRYPGCRNIQRNSEPIRIERGIFQGDSLSPLWFCLALNPLSTLLEDSGLGYRLRRGGQVISHLLYMDDLKLFAPNNLQLMELLKVTETFSSAIRMEFGVDKCAVMHVKRGKIMESVGTQLSDSINLRALSASETYKYLGMSEALGINVTDMKQSLKERFFGRLKKVLNSLLSGGNKVRAFNGWVMPVLMYSFGILKWSQTELDALDRRVRTLLTAYRMHHPRSSVMRLYIPRKCGGRGFLNAKTLHNREICSLREYFLEADVGMHRDVVVVDKGLTPLSLAKENWRKPVVLDTKNRMEIWQSKELHGRYFRALHGPDVDLPASVAWLRCGDLFGETEGFVCAIMDEVMMTNNYRRFIVKDGTVDICRACHRPGESIRHIISGCSRLANEEYLHRHNLVARIIHQQLALKYSLVESEVPYYRYVPDPVLENGNITLYWDRSIITDRTIVANKPDIVVVDRGERSAMIIDITVPHDENLVKAEKDKQIKYLDLAREVVDMWDVDSAIIVPIVVTANGLIAKSLDQHLRRLSLGSWIKGLVQKAVLLDTARIVRRFLSLEP

SEQ ID NO: 11992 - protein, 1205 aa, Omphaloscelis lunosa
MLTRSRARKLIDTHPTSSGSSLSSASQLPDPAPNVSPVIPVAAVASSSSDEYFSPPTTPPPTRQRGRGRPPASLGLRGPPASDRVPAPGGSVQRMRWTQTINENVMRAYFGATEGGSNLTAYRGRMLSLFQVLEPAVNVSAQRLSDQVRVTQRNHMLDDVVLDRLRLESRNNNVIPASPLVTVQLQNLTSSSPRPDRVGEEDDDGVISVSSQCNARLRSALEDAFREYRSIPPGLRPHLPRLPMHKKNKALMCTLDSLLSNYFDGSKDLADTHSILYCAAVAACRVAHVKFPNSDRAPRPKPAVPAWQCRIERRIGEARVLIGKLICFREGNTRPRVMRFVKRAFSGTDISSQDYLTRVTERIDFLKQKIYAWANRIRRYRRRVERYTQNRTFQSDERWVYRAWERPDQGVIHTRLPDDDAMCSFWRSIWSAPVSHTEGDWTREIERACEHLPEMEALTISLQDIARAVRPLPNWKSPGPDGLHNFWIKWFQRSHARLASQFQSALDSGSLPQFLTTGITHLLHKSGSTAEPKNYRPITCLPTVYKVLTSIFRTKINKHIDTNSIWSASQNGCKNGSRGTKELLLIDMAINQQVRRSRRDLSTCWIDYKKAYDSVPHTWLMRVLELYKVDATLRTFLMSCMRQWRTVLRYPGCRQILRNSEPIRIERGIFQGDSLSPLWFCLALNPLSTLLEDSGLGYRLRRGGQVISHLLYMDDLKLFAPNNLQLLELLKVTETFSSAIRMEFGVDKCAVMHVKRGEIVESVGTHLSDSIQLRSLSSIETYKYLGMSEALGVNAADMKQSLKERFFNRLNKVLNSLLSGGNKVRAFNGWVMPVLMYSFGILKWTQTELDALDRRVRTLLTANRMHHPRSSVMRLYIPRKCGGRGFLNAKTLHNREVCSLREYFLEADVGMHRDVVTVDKGLTPLSLANENWRKPIVLDTNDRREVWQSKELHGRFYRALHGPDVDLLASVSWLRFGDLFGETEGFVFAIMDEVMMTNNYRKYIVKDGTVDICRACHRPGESIRHIISGCSRLANGDYLHRHNLVARIIHQQLALKYSLVESEVPYYRYVPDPVLENGNITLYWDRSIITDRTIVANKPDIVVIDRLERRTMIIDIAVPHDENLVKAEKDKQIKYLDLAREVVDMWDVDTAIIVPIVVTANGIIAKSLDQHLKRLSLGSWIKGLIQKAVLLDTARIVRRFLSQEP

SEQ ID NO: 11993 - protein, 1205 aa, Omphaloscelis lunosa
MLTRSRARKLIDTHPTSSGSSLSSASQLPDPAPDVSPVIPVAAVASSSSDEYFSPPTTPPPTRQRGRGRPPASLGLRGPPASDRVPAPGGSVQRMRWTQTVNENVMRAYFGATEGGSNLTAYRGRMLSLFQVLEPAVNVSAQRLSDQVRVIQRNHMLDDVVLDRLRLESRNNHVTPASPLVTVQLQNLPSSSPRSDRVGEEDDDGVISVSSQCNVRLRSALEDAFREYRSIPPGLRPQLPRLPMHKKNKALMCTLDSLLSNCFDGSKDLADTHSILYCAAVAACRVAHVKFPNSDRAPRPKPAVPAWQCRIERRIGEARVLIGKLICFREGNTRPRVMRFVKRAFSGTDISFQDYLTRVTERIDFLKQKIYAWANRIRRYRRRVERYTQNRTFQSDERWVYRAWERPDQGVADTHLPDDDAMCSFWRSIWSVPVSHTEGDWTREVERACDPIPEMGAITICPQDVARAVRPLPNWKSPGPDGLHNFWIKWFQRSHARLASQFQSALESGSLPQFLTTGITHLLHKSGSTAEPKNYRPITCLPTVYKVFTSILRTKINKHIDTNSIMSASQNGCRNGSRGTKELLLIDMAINQQVRRSRRDLSTCWIDYKKAYDSVPHTWLMRVLELYKVNATLRTFLMSCMGQWRTVLRYPGCRQILRNSEPIRIERGIFQGDSLSPVWFCLALNPLSTLLEDSGLGYRLRRGGQVISHLLYMDDLKLFAPNNLQLLELLKVTETFSSAIRMEFGVDKCAVMHVKRGEIVESVGTQLSDSIQLRSLSSIETYKYLGMSEALGVNAADMKQSLKERFFNRLNKVLNSLLSGGNKVRAFNGWVMPVLMYSFGILKWTQTELDALDRRVRTLLTANRMHHPRSSVMRLYIPRKCGGRGFLNAKTLHNREVCSLREYFLEADVGMHRDVVTVDKGLTPLSLANENWRKPIVLDTNDRREVWQSKELHGRFYRALHGPDVDLLASVSWLRFGDLFGETEGFVFAIMDEVMMTNNYRKYIVKDGTVDICRACHRPGESIRHIISGCSRLANGDYLHRHNFVARIIHQQLALKYSLVESEVPYYRYVPDPVLENGNITLYWDRSIITDRTIVANKPDIVVIDRLERRTMIIDIAVPHDENLVKAEKDKQIKYLDLAREVVDMWDVDTAIIVPIVVTANGIIAKSLDQHLKRLSLGSWIKGLIQKAVLLDTARIVRRFLSQEP

SEQ ID NO: 11994 - protein, 1197 aa, Sesamia nonagrioides
MLTRSAARRARPPSPDSLLSSASPPPASSATVSAVTTPAAAVASSSSDEYFSPPTTPPPARRRGGRRPPDRLGPRGPSASDRVPAPGGSVQRMRWTQSINENVMRSYYGATEGGNNLTAYRVRMLSLFQVLEPAVNVSAQRLSDQVRVIQRNHMLDDTVLDRLRNEMQSSRIIAHQSQTAEIPPQPTNYADEGSNDRATNVSTQCNEELINALEAAIREYRFTPAELRPRLPRLPMHNRNRALMAALDAQLSDYFDTCEDLTDTHSILYCAAVAACRVAHVKFPSDSRATRPKPVVPAWQHRIERRIGGARALIGKLICFREGNTRPRVMRFVRRAFAGTNISPQNYMARVTERIDFLKQKVYAWANRIRRYKRRVERYTQNRTFQSNERWVYRDWERPEQGVTDTCLPDDDAMCSFWRSIWSVPVSHTEGDWARDVERACDPIPEMGAITICPQDVACAVRPLPNWKSPGPDGLHNFWIKWFPRSHARLASQFQTALVSGSLPQFLTTGITHLLHKSGSTAEPKNYRPITCLPTVYKVLTSILKTKINKHIDSNSIMSASQNGCKSGSRGTKELLLIDMAISQQVRRSRKDLSTCWIDYRKAYDSVPHTWLMRVLELYKVDATLRTFLMSCMKTWRTVLRYPGCRNIQRNSEPIRIERGIFQGDSLSPLWFCLALNPLSTLLEDSGLGYRLRRGGQVISHLLYMDDLKLFAPNNSQLRELLKITETFSSSIRMEFGVDKCAVMHVKRGEIMESVGTQLTDSINLRALSASETYKYLGMSEALGINVTDMKQSLKERFFGRLKKVLNSLLSGGNKVRAFNGWVMPVLMYSFGILKWTQIELDALDQRVRTLLTANRLHHPRSSVMRLYIPRKCGGRGFLNAKTLHNREVCSLRDYFLVNDVGMHRDVVAADKGLTPLSLAKENWRKPVVLDTNDRMEVWKSKELHGRFFRALHGPDVDLQASVAWLRFGDLFGETEGFVFAIMDEVMMTNNYRRFIVKDGTVDICRACHRPGESIRHIISGCSRLANGEYLHRHNLVARIIHQQLALKYNLVESEVPYYRYTPDPVLENGYITLYWDRSIITDRTIVANKPDIVMVDRSERRAMIVDITIPHDENLVKAEKDKQIKYLDLAHEVVDMWEVDSAIIVPIVVTANGLIAKSLDQHLRRLSLGSWIKGLIQKAVLLDTARIVRKFLSLEP

SEQ ID NO: 11995 - protein, 1197 aa, Sesamia nonagrioides
MLTRSAARRARPPSPDSLLSSASPPPASSATVSAVTTPAAAVASSSSDEYFSPPTTPPPVRRRGGRRPPDCLGPRGPSASDRVPAPGGSVQRMRWTQSINESVMRSYYGATEGGNNLTAYRVRMLSLFQVLEPAVNVSAQRLSDQVRVIQRNHMLDDTVLDRLRNEMQSSRVIAHQSQSAEIPPQPTNYADEGSNDRATNVSTQCNEELRNALEAAIREYRSISAELRPRLPRLPMHNRNRALMAALDAQLSNYFDTCENLTDTHSILYCAAVAACRVAHVKFPSDSRATRPKPVVPAWQHRIERRIGGARALIGKLICFREGNTRPRVMRFVRRAFSGTNTSPQNYMARVTERIDFLKQKVYAWANRIRRYKRRVERYTQNRTFQSNERRVYRDWERPEQGVTDTCLPDDDAMCSFWRSIWSVPVSHTEGDWARDVERACDPIPEMGAINICSQDVACAVRPLPNWKSPGPDGLHNFWIKWFPRSHARLASQFQTALVSGSLPQFLTTGITHLLHKSRSTAEPKNYRPITCLPTVYKVLTSILKTKINKHIDSNSILSASQNGCRSGSRGTKELLLIDMAISQQVRRSRKDLSTCWIDYKKAYDSVPHTWLMQVLELYKVDATLRTFLMTCMRTWRTVLRYPGCRNIQRNSEPIRIERGIFQGDSLSPLWFCLALNPLSTLLEDSGLGYRLRRGGQVISHLLYMDDLKLFAPNNSQLRELLKITETFSSSIRMEFGVDKCAVMHVKRGEIMESVGTQLTGSINLRALSASETYKYLGMAEALGINVTDMKQSLKERCFGRLKKVLNSLLSGGNKVRAFNGWVMPVLMYSFGMLKWTQTELDALDQRVRTLLTANRLHHPRSSVMRLYIPRKCGGRGFLNAKTLHNREVCSLREYFLETDVGMHRDVVAADKVLTPLSLAKENWRKPVVLDTNDRLEVWKSKELHGRFFRALHGPDVDFQASVAWLRFGDLFGETEGFVFAIMDEVMMTNNYRRFIVKDGTVDIYRACHRPGESIRHIISGCSRLANGEYLHRHNLVARIIHQQLALKYKLVESEVPYYRYMPDPVLENGHIILYWDRSIITDRTIVANKPDIVLVDRSERRAMSVDITIPHDENLVKAEKDKQIKYLDLAHEVVDMWEVDSAIIVPIVVTTNGLIAKSLDQHLRRLSLGSWIKGLIQKAVLLDTARIVRKFLSLEP

SEQ ID NO: 11996 - protein, 1077 aa, Sesamia nonagrioides
MLSLFQVLEPGVNVSAQRLSDQVRVIQRNHMLDDVVLDRLRLESRNSHVTPASSLVAVQLNSVSPRPNRVDEEDDDRAISVSPQCIEKLRSALEDAFCEYRSTPPELRPRLPRLPMHKKNKALVCALDSQLSYYLKDSKDLTDTHSILYCGAVAICRVAHVKFPDSDRATRPKSAVPAWQCRIERRIGETRALIGKLTSFREGNTRPRVMRFVRRAFSGTDTSTRDYLFRVTERIDFFKQKIYAWANRIRRYKRRVERYSQNRNFQSDERRVYRAWERSDQGVTDTCLPDDDAMCSFWRNIWSVPVSHTEGSWTRVVERACDPVPEMGAITICPQDVARAVRPLPNWKSPGPDGLHNFWIKWFSGSHARLASQFQTALESGSLPQFLTTGVTHLLHKSGSTAEPKNYRPITCLPTVYKVLTSILKSKINTHIDSNSIMSASQNGCRSGSRGTKELLLIDMAISQQVRRSRKDLSTCWIDYKKAYDSVPHTWLMRVLELYKVDATLRTFLMTCMRTWRTVLRYPGCRNIQRNSEPIRIERGIFQGDSLSPLWFCLALNPLSTLLEDSGLGYRLRRGGQVISHLLYMDDLKLFAHTDSQLKELLKITETFSSSIRMEFGVDKCAVMHVKRGEIMESVGTQLMSSINLRALSASETYKYLGMSEALGINVTDMKQSLKERFFGRLKKVLNSLLSGGNKVRAFNGWVMPVLMYSFGILKWTQTELDALDQRVRTLLTANRLHHPRSSVMRLYIPRKCGGRGFLNAKTLHNREVCSLREYFLETDVGMHRDVVAADKGLTPLSLAKENWRKPVVLDTNDRLEVWKSKELHGRFFRALHGPDVDFRASVAWLRFGDLFGETEGFVFAIMDEVMMTNNYRRFIVKDGTVDICRACHRPGESIRHIISGCSRLANGEYLHRHNLVARIIHQQLALKYNLVESEVPYYRYMPDPVLENGHITLYWDRSIITDRTIVANKPDIVLVDRSERRAMIVDITIPHDENLVKAEKDKQIKYLDLAHEVVDMWEVDSAIIVPIVVTANGLIAKSLDQHLRRLSLGSWIKGLIQKAVLLDTARIVRKFLSLEP

SEQ ID NO: 11997 - protein, 1108 aa, Sesamia nonagrioides
MKWTQSINENVMRAYFGATEGGSNLTAYRGRMLSLFQVLEPAVNVSAQRLSDQVRVIQRNHMLDDVVLDRLRLESRNSHVTPASSLVAVQLNSVPSRPNLVNEEDDDEAISVTPQCNEKVRSALEDAFREYRSTPPEFRPRLPRLPMHKKNKALVCALDSQLSNYLKDSKDLADTHSILYCGAVAICRVAHVKFPDSDKATRPKPAVPAWQCRIERRIGETRALIGKLISFREGNTRPRVMRFVRRAFSGTDVSTRDYLLRVTERIDFLKQKIYAWASRIRRYRRRVERYSQNRNFQSDERWVYRAWERSDQGVTDTCLPDDDATRSFWRNIWSVPVSHTEGGWTRDVERACDPVPEMGAITIWPQDVARAVRPLPNWKSPGPDGLHNFWIKWFSGSHACLASQFQTALESGSLPQFLTTGITHLLHKSGSTAEPKNYRPITCLPTVYKVLTSILKAKINTHIDSNSIMSASQNGCRNGSRGTKELLLIDMAISQQVRRSRKDLSTCWIDYKKAYDSVPHTWLMRVLELYKVDATLRTFLMTCMSQWRTVLRYPGCRNIQRNSEPIRIERGIFQGDSLSPLWFCLALNPLSTLLEDSGLGYRLRRGGQVISHLLYMDDLKLFAHTNSQLKELLKITETFSSAIRMEFGVDKCAVMHVQRGEIVESVGTQLTGSINLRSLSASETYKYLGMSEALGINVTDMKQSLKERFFGRLKKVLNSLLSGGNKVRAFNGWVMPVLMYSFGILKWTQTELDALDQRVRTLLTANRLHHPRSSVMRLYIPRKCGGRGFLNAKTLHNREVCSLREYFLKTDVGMHRDVVAVDKGLTPLSLAKENWRKPVVLETNDRMEVWQSKELHGRFFRALRGPDVDFQASVAWLRYGDLFGETEGFVCAIMDEVMMTNNYRKFIVKDGTVDICRACHRPGESIRHIISGCSRLANGEYLHRHNLVARIIHQQLALKYNLVESEVPYYRYMPDPVLENGHITLYWDRSIITDRTIVANKPDIVMVDRSERRAMIVDITIPHDENLVKAEKDKQIKYLDLAHEVVDMWEVDSAIIVPIVVTANGLIAKSLDQHLRRLSLGGWIKGLIQKAVLLDTARIVRKFLSLEP

SEQ ID NO: 11998 - protein, 1047 aa, Sesamia nonagrioides
MLDDVVLDRLRLESRNSHVTPASALVAVQLNSVPSRPNLVDEEDDDEAISVTPQCNEKVRSALEDAFREYRSTPPELRPRLPRLPTHKKNKALVCALDSQLPNYLKDSKDLTDTHSILYCGAVAICRVAHVKFPDSDRAIRPKSAVPAWQCRIERRIGETRALIGKLISFRDGNTRPRVMRFVRRAFSRTDISTRDYLFRVTERIDFLKQKLYAWANRIRRYKRRVERYSQNRNFQSDERRVYRAWERSDQGVTDTCLPDDDATCSFWRNIWSVPVSHTEGGWTRDVERACDPVPEMGAITICPQDVARAVRPLPNWKSPGPDGLHNFWIKWFSRSHACLASQFQTALESGSLPQFLTTGITHLLHKSGSIAEPKNYRPITCLPTVYKVLTSILKAKINTHIDNNSIMSASQNGCDNGSRGTKELLLIDMAISQQVRRSRKDLSTCWIDYKKAYDSVPHTWLMRVLELYKVDATLRTFLMTCMSQWRTVLHYPGCRNIQRNSEPIRIERGIFQGDSLSPLWFCLALNPLSTLLEDSGLGYRLRRGGQVISHLLYMDDLKLFAPNDLQLRELLKITETFSSAIRMEFGVDKCAVMHVKRGEIVESVGTQPTGSINLRALSASDTYKYLGMSEALGINVTDMKQSLKERFFGRLKKVLNSLLSGGNKVRAFNGWVMPVLMYSFGILKWTQTELDALDQRVRTLLTANRLHHPRSSVMRLYIPRKSGGRGFLNVKTLHNREICSLREYFLKTDVGMHRDVVAVDKGLTPLSLAKENWRKTEVLETNDRMEVWKSKELHGRFFRALHGPDVDFQASVAWLRFGDLFGETEGFVCAIMDEVMMTNNYRRFIVKDGTVDICRACHRPGESIRHIISGCSRLANGEYLHRHNLVARIIHQQLALKYNLVESEVPYYRYMPDPVLENDHITLYWDRSIITDRTIVANKPDIVLVDRSERRAMIVDITIPHDENLVKAEKDKQIKYLDLAHEVVDMWEMDSAIIVPIVVTANGLIAKSLDQHLMRLSLGSWIKGLIQKAVLLDTARIVRKFLSLEP

SEQ ID NO: 11999 - protein, 1200 aa, Sesamia nonagrioides
MLTRSAARRARSPPPDSSPSSASPPPVSSPTVNAVMTPAAAVALSSSDEYFSPPTTPPPVRRRGGRRPPDCLGPRGPPASDRAPATGGNVQRMKWTQSINENVMRAYFGATEGGSNLTAYRGRMLSLFQVLEPAVNVSAQRLSDQVRVIQRNHMLDDVVLDRLRLESRNSHVTPASSLVAVQFNSVPSRPNLVDEEDDDEAISVTPQCNEKVRSALEDAFREYRSTPPELRPRLPRLPMHKKNKALVCALDSQLSNYLKDSKDLADTHSILYCGAVAICRVAHVKFPDSDRATRPKPAVPAWQCRIERRIGETRALIGKLISFREGNTRPRVMRFVRRAFSGTDVSTRDYLLRVTERIDFLKQKIYAWANRIRRYRRRVERYSQNRNFQSDERWVYRAWERSDQGVTDTCLPDDDATRSFWRNIWSVPVSHTEGGWTRDVERACDPVPEMGAITICPQDVARAVRPLPNWKSPGPDGLHNFWIKWFSGSHACLASQFQTALESGSLPQFLTTGITHLLHKSGSTAEPKNYRPITCLPTVYKVLTSILKAKINTHIDSNSIMSASQNGCRNGSRGTKELLLIDMAISQQVRRSRKDLSTCWIDYKKAYDSVPHTWLMRVLELYKVDATLRTFLMTCMSQWRTVLRYPGCRNIQRNSEPIRIERGIFQGDSLSPLWFCLALNPLSTLLEDSGLGYRLRRGGQVISHLLYMDDLKLFAHTNSQLKELLKITETFSSAIRMEFGVDKCAVMHVQRGEIVESVGTQLTGSINLRSLSASETYKYLGMSEALGINVTDMKQSLKERFFGRLKKVLNSLLSGGNKVRAFNGWVMPVLMYSFGILKWTQTELDALDQRVRTLLTANRLHHPRSSVMRLYIPRKCGGRGFLNAKTLHNREVCSLREYFLKTDVGMHRDVVAVDKGLTPLSLAKENWRKPVVLETNDRMEVWQSKELHGRFFRALRGPDVDFQASVAWLRYGDLFGETEGFVCAIMDEVMMTNNYRKFIVKDGTVDICRACHRPGESIRHIISGCSRLANGEYLHRHNLVARIIHQQLALKYNLVESEVPYYRYMPDPVLENGHITLYWDRSIITDRTIVANKPDIVMVDRSERRAMIVDITIPHDENLVKAEKDKQIKYLDLAHEVVDMWEVDSAIIVPIVVTANGLIAKSLDQHLRRLSLGGWIKGLIQKAVLLDTARIVRKFLSLEP

SEQ ID NO: 12000 - protein, 1200 aa, Sesamia nonagrioides
MLTRSAARRARSPPSDSSPSSASPPPVSSPTVNAVMTPAAAVALSSSDEYFSPPTTPPPVRRRGGRRPPDCLGSRGPPASDRAPATGGNVQRMKWTQTINENVMRAYFGATEGGSNLTAYRGRMRSLFQVLEPAVNVSAQRLSDQVRVIQRNHMLDDVVLDRLRLESRNSHVTPASSLVAVQVNSVPSRPNLVDEEDDDEAISVTPQCNEKVRSALEDAFREYRSTPPELRPRLPRLPMHKKNKALVCALDSQLSNYLKDSKDLADTHSILYCGAVAICRVAHVKFPDSDKATRPKPAVPAWQCRIERRIGETRALIGKLISFREGNTRPRVMRFVRRAFSGTDVSTRDYLLRVTERIDFLKQKIYAWANRIRRYRRRVERYSQNRNFQSDERWVYRAWERSDQGVTDTCLPDDDATRSFWRNIWSVPVSHTEGGWTRDVERACDPVPEMGAITICPQDVARAVRPLPNWKSPGPDGLHNFWIKWFSGSHACLASQFQTALESGSLPQFLTTGITHLLHKSGSTAEPKNYRPITCLPMVYKVLTSILKAKINTHIDSNSIMSASQNGCRNGSRGTKELLLIDMAISQQVRRSRKHLSTCWIDYKKAYDSVPHTWLMRVLELYKVDATLRTFLMTCMSQWRTVLRYPGCRNIQRNSEPIRIERGLFQGDSLSPLWFCLALNPLSTLLEDSGLGYRLRRGGQVISHLLYMDDLKLFAHTNSQLKELLKITETFSSAIRMEFGVDKCAVMHVQRGEIVESVGTQLTGSINLRSLSASETYKYLGMSEALGNNVTDMKQSLKERFFGRLKKVLNSLLSGGNKVRAFNGWVMPVLMYSFGILKWTQTELDALDQRVRTLLTANRLHHPRSSVMRLYIPRKCGGRGFLNAKTLHNREVCSLRKYFLKTDVGMHRDVVAVDKGLTPLSLAKENWRKPVVLETNDRMEVWQSKELHGRFFRALRGPDVDFQASVAWLRYGDLFGETEGFVCAIMDEVMMTNNYRKFIVKDGTVDICRACHRPGESIRHIISGCSRLANGEYLHRHNLVARIIHQQLALKYNLMESEVPYYRYMPDPVLENGHITLYWDRSIITDRTIVANKPDIVLVDRSERRAMIVDITIPHDENLVKAEKDKQIKYLDLAHEVVDMWEVDSAIIVPIVVTANGLIAKSLDQDLRRLSLGGWIKGLIQKAVLLDTARIVRKFLSLEP

SEQ ID NO: 12001 - protein, 1200 aa, Sesamia nonagrioides
MLTRSAARRARPPSPDSLLGSASSPPVSSATASAVTTPAAAVASSSSDEYFSPPTTPPPARRRGGRRPPDRLGPRGPSASDRVPAPGGSVQRMIWTQSINENVMRSYYGATEGGNNLTAYRVRMLSLFQVLEPAVNVSAQRLSDQVRVIQRNHMLDDVVLDRLRLESRNSHVTPASSLVAVQLNSVSPRPNHVDEEDDDRAISVSPQCIEKLRSALEDAFCEYRSTPPELRPCLPRLPMHKKNKALVCALDFQLSYYLKDSKDLTDTHSILYCGAVAICRVAHVKFPDSDRATRPKSAVPAWQCRIERRIGETRALIGKLTSFREGNTRPRVMRFVRRAFSGTDTSTRDYLSRVTERIDFFKQKIYAWANRIRRYKRRVERYSQNRNFQSDERRVYRAWERSDQGVTDTCLPDDDATCSFWRNIWSVPVSHTEGSWTRVVERACDPVPEMGAITICPQDVARAVRPLPNWKSPGPDGLHNFWIKWFSRSHARLASQFQTALESGSLPQFLTTGVTHLLHKSGSTAEPKNYRPITCLPTVYKVLTSILKSKINTHIDSNSIMSASQNGCRSGSRGTKELLLIDMAISQQVRRSRKDLSTCWIDYKKAYDSVPHTWLMRVLELYKVDATLRTFLMTCMRTWRTVLRYPGCRNIQRNSEPIRIERGIFQGDSLSPLWFCLALNPLSTLLEDSGLGYRLRRGGQVISHLLYMDDLKLFAHTDSQLKELLKITETFSSSIRMEFGVDKCAVMHVKRGEIMESVGTQLTSSINLRALSASETYKYLGMSEALGINVTDMKQSLKERFFGRLKKVLNSLLSGGNKVRAFNGWVMPVLMYSFGILKWTQTELDALDQRVRTLLTANRLHHPRSSVMRLYIPRKCGGRGFLNAKTLHNREVCSLREYFLETDVGMHRDVVAADKGLTPLSLAKENWRKPVVLDTNDRLEVWKSKELHGRFFRALHGPDIDFQASVAWLRFGDLFGETEGFVFAIMDEVMMTNNYRRFIVKDGTVDICRACHRPGESIRHIISRCSRLANGEYLHRHNLVARIIHQQLALKYNLVESEVPYYRYMPDPVLEHGHITLYWDRSIITDRTIVANKPDIVLVDRSERRAMIVDITIPHDENLVKAEKDKQIKYLDLAHEVVDMWEVDSAIIVPIVVTANGLIAKSLDQHLRRLSLGSWIKGLIQKAVLLDTARIVRKFLSLEP

SEQ ID NO: 12002 - protein, 1171 aa, Sesamia nonagrioides
MLTRSAARCARPPPPDSSLSSASPPPVSSPNVNAVMTPAAVVASSSSDEYFSPPTTPPPARRRGGRRPPDRLGPRGPSASDRVPAPGGSVQRMRWTQSINENVMRSYYGATEGGNNLTAYRVRMLSLFQVLEPAVNVSAQRLSDQVRVIQRNHMLDDVVLDRLRLESRNSHVTPASSLVAVQLNSVSPRPNHVDEEDDDRAISVSPQCNEKLRSALEDAFREYRSIPPEFRPRLPRLPMHKKNKALVCALDSQLSNYLKDSNDLNDTHSILYCGAVAICRVAHVKFPDSDRATRPKSAVPAWQCRIERRIGETRALIGKLISFREGNTRPRVMRFVRRAFSGTDTSTRDYLFRVTERIDFFKQKIYAWANRIRRYRRRVERYSQNRNFQSDERRVYRAWERSDQGVTDTCLPDDDATCSFWRNIWSVPVSHTEGSWTRVVERACDPVPEMGAITICPQDVARAVRPLPNWKSPGPDGLHNFWIKWFSGSHARLASQFQTALESGLLPQFLTTGVTHLLHKSGSTAEPKNYRPITCLPTVYKVLTSILKSKINTHIDSNSIMSASQNGCRSGSRGTKELLLIDMAISQQVRRSRKDLSTCWIDYKKAYDSVPHTWLMRVLELYKVDATLRTFLMTCMRTWRTVLRYPGCRNIQRNSEPIRIERGIFQGDSLSPLWFCLALNPLSTLLEDSGLGYRLRRGGQVISHLLYMDDLKLFAHTDSQLKELLKITETFSSSIRMEFGVDKCAVMHVKRGEIMESVGTQLTSSINLRALSASETYKYLGMSEALGINVTDMKQSLKERFFGRLKKVLNSLLSGGNKVRAFNGWVMPVLMYSFGILKWTQTELDALDRRVRTLLTANRLHHPRSSVMRLYIPRKCGGRGFLNAKTLHNREICSLRQYFLTTDVGMHRDVVAVDKGLTPLSLAKENWRKPVVLDTNDRMEVWKSKELRGRFFKALHGPDVDLQASVAWLRFGDLFGETEGFVCAIMDEVMMTNNYRRFIVKDGTVDICRACHRPGESIRHIISGCSRLANGEYLHRHNLVARIIHQQLALKYNLVESEVPYYRYTPDPVLENDHITLYWDRSIITDRTIVANKPDIVLVDRSERRAMIVDITIPHDENLVKAEKDKQIKYLDLAHEVVDMWEVDSAIIVPIVVTANGLIAKSLDQHLRGSR

SEQ ID NO: 12003 - protein, 1031 aa, Sesamia nonagrioides
MQSSRVITHQSQSAEIPPQPTNYADEGSNDRATNVSTQCNEELRNALEAAILEYRSISAELRPRLPRLPMHNRNRALMAALDAQLSNYFDTCEDLTDTHSILYCAAVAACRVAHVKFPSDSRATRPKPVVPAWQRRIERRIGGARALIGKLICFREGNTRPRVMRFVRRAFSGTNTSPQNYMARVTERIDFLKQKVYAWANRIRRYKRRVERYTQNCTFQSNERRVYRDWERSEQGVTDTCLPDDDAMCSFWRSIWSVPVSHTEGDWARDVERACDPIPEMGAITICPQDVACAVRPLPNWKSPGPDGLHNFWIKWFPRSHARLASQFQTALVSGSLPQFLTTGITHLLHKSGSTAEPKNYRPITCLPTVYKVLTSILKTKINKHIDSNSILSASQNGCRSGSRGTKELLLIDMAISQQVRRSRKDLSTCWIDYKKAYDSVPHTWLMRVLELYKVDATLRTFLMTCMRTWRTVLRYPGCRNIQRYSEPIRIERGIFQGDSLSPLWFCLALNPLSTLLEDSGLGYRLRRGGQVISHLLYMDDLKLFAPNNSQLNELLKITAIFSSSIRMEFGVDKCAVMHVKRGEIMEPVGTQLTSSINLRALSASETYKYLGMSEALGINVTDMKQSLKERFFGRLKKVLNSLLSGGNKVRAFNGWVMPVLMYSFGILKWTQTELDALDQRVRTLLTANRLHHPRSSVMRLYIPRKCGGRGFLNAKTLHNREICSLRDYFLETDVGMQRDVVAADKGLTPLSLANENWRKPVVLDTNDRMEVWKSKELHGRFFRALHGPDVDFQASVAWLRFGDLFGETEGFVFAIMDEVMMTNNYRRFIVKDGTVDICRACHRPGESIRHIISGCSRLANGEYLHRHNLVARIIHQQLALKYKLVESEVPYYRYMPDPVLENGHITLYWDRSIITDRTIIANKPDIVLVDRSERRAMIVDITIPHDENLVKAEKDKQTKYLDLAHEVVDMWEVDSAIIVPIVVTANGLIAKSLDQHLRRLSLGSWIKGLIQKAVLLDTARIVRKFLSLEP

SEQ ID NO: 12004 - protein, 1198 aa, Apamea monoglypha
MLTRSAARRARPPPPDSSLSSASPPPVPSLTVSAVTTPAAVVASSSSDEYFSPPTTPPPVRRRGGRRSPDGLGPRGPPASDRVPAPGGSVQRMRWTQSINENVMRSYYGATEGGNNLTAYRVRMLSLFQVLEPAVNVTAQRLSDQVRVIQRNHMLDETVLDRLRSEMQSSHVIAHQSQTAAVLPQSNTSHADEGSNDMATNVSIQCNEELRNALEGAIREYRFMSPELRPRLPRLPMHNKNRALVAVLDAQLSSHFDVCEDLTDTHSILYCAAVAACRVAHVKFASDSEATRPKPAIPAWQCRIERRIGGARALIGKLICFREGNTRPRVMRFVRRAFLGTDISSQDYLSRVTERIDFLKQKVYAWANRIRRYKRRVERYTQNRTFQSDERWVYRGWERPDQSVADTCLPDDDAMCSFWRSIWSAPVSHTEGDWTGKIERACELIPEMGAITICPQDVARAVRPLPNWKSPGPDGLHNFWIKWFQRSHAPLAAQFQSALESGLLPQFITTGITHLLHKSGSTADPKNYRPITCLPTIYKVLTSILRAKINKHIDSNSIMSVSQNGCRNGSRGTKELLLIDMAISQQVRRSRKDLSTCWIDYKKAYDSVPHTWLMRVLELYKVDTTLRTFLMTCMGQWRTVLRYPGCRNIQRNSEPIRIERGIFQGDSLSPLWFCLALNPLSTLLDDSGLGYRLRRGGQVISHLLYMDDLKLFAPNNLQLMKLLKITETFSSAIRMEFGVDKCAVMHVKRGEIVESVGTQLSDFTNLRTLSAAETYKYLGMSEALGINVTDMKQSLKERFFGRLKKVFNSLLSGGNKVRAFNSWVMPVLMYSFGILKWTQTELEALDRRVRTLLTANRMHHPRSSVMRLYIPRKCGGRGFLNAKTLHNREICSLREYFLETDVGMHRDVVAVDKGLTPLSLAKENWRKPVVLDTNDRMEVWQSKELHGRFYRALHGPDVDLLASVAWLRFGDLFGETEGFVCAIMDEVMMTNNYRRYIVKDGTVDICRACHRPGESIRHIISGCSRLANGEYLHRHNLVARIIHQQLALKYSLVESEVPYYRYVPDPVLENGNITLYWDRSIITDRTIVANKPDIVVVDRSERRAMIVDITVPHDENLVKAEKDKQIKYLDLAREVVDMWHVDSAIIVPIVVTANGLIAKSLDQHLRRLSLGSWIKGLIQKAVLLDTARIVRRFLSLEP

SEQ ID NO: 12005 - protein, 1099 aa, Apamea monoglypha
MSHVFEFFVFRTCRFPHDVLHNINNLIIIIIFFLFVNVTAQRLSDQVRVIQRNHMLDDTVLDRLRNEIQSSHVIAPQSQTAAVLPQSNTSHADEGSNDRATNVSIQCNEELRNALEGAIREYRFMSPELRPRLPRLPMHNKNRALVAVLDAQLSSYFDVCEDLTDTHSILYCAAVAACRVAHVKFVSDSRATRPKPAIPPWQCRIERRIGGARALIGKLICFREGNTRPRVMRFVRRAFSGTDISSQDYLSRVTERIDFLKQKVYAWANRIRRYKRRVDRYTQNRTFQSDERWVYRGWERPDQGVADTCLPDDDAMYSFWRSIWSVPVSHTEGDWAREVERACDPIPEMEAITICAQDVARAVRPLPNWKSPGPDGLHNFWVKWLTRSHARLASQFQIALESGSLPQFLTTGVTHLLHKSASTAEPKNYRPITCLPTVYKVLTSILRAKINKHIDTNSIMSASQNGCKNGSRGTKELLLIDMAISQQVRRSRKDLSTCWIDYKKAYDSVPHTWLMRVLELYKVDTTLRTFLMTCMGQWRTVLRYPGCRNIQRNSEPIRIERGIFQGDSLSPLWFCLALNPLSTLLEDSGLGYRLRRGGQVISHLLYMDDLKLFAPNNLQLMELLKITETFSSAIRMEFGVDKCAVMHVKRGEIVESVGTQLSDSTNLRALSASETYKYLGMSEALGINVTDMKQSLKERFFGRLKKVLNSLLSGGNKVRAFNSWVMPVLMYSFGILKWTQTELDALDRRVRTLLTANRLHHPRSSVMRLYIPRKSGGRGFLNAKTLHNREICSLREYFLETDVGMHRDVVAVDKGLTPLSLAKENWRKPVVLDTNDRMEVWQSKELHGRFYRALHGPDVDLLASVAWLRFGDLFGETEGFVCAIMDEVMMTNNYRRFIVKDGTVDICRACHRPGESIRHIISGCSRLANGEYLHRHNLVARIIHQQLALKYNLVESEVPYYRYVPDPVLENGNITLYWDRSIITDRTIVANKPDIVVVDRSERRAMIVDITVPHDENLVKAEKDKQIKYLDLAREVVDMWHVDSAIIVPIVVTANGLIAKSLDQHLRRLSLGSWIKGLIQKAVLLDTARIVRRFLSLEP

SEQ ID NO: 12006 - protein, 1106 aa, Apamea monoglypha
MRWTRSINENVMRSYYGATEGGNNLTAYRVRMLSLFQVLEPAVNVSAQRLSDQVRVIQRNHMLDDTVLDRLRSEMQSSHVIAPQSQTTAVLPQSNTSHADEGSNDRATNVSIQCNEELRNALEGAIREYRFMSPELRPRLPRLPMHNKNRALVAVLDAQLSSHFDACEDLTDTHSILYCAAVAACRVAHVKFDSDSRATRPKPAIPAWQCRIERRIGGARALIGKLICFREGNTRPRVMRFVRRAFLGTDISSQDYLSRVTERIDFLKQKVYAWANRIRRYKRRVERYTQNRTFQSDERWVYRGWERPDQSVADTCLPDDDAMCSFWRSIWSAPVSHTEGDWTGKIERACELIPEMGAITICPQDVARAVRPLPNWKSPGPDGLHNFWIKWFQRSHAPLAAQFQSALESGLLPQFITTGITHLLHKSGSTADPKNYRPITCLPTIYKVLTSILRAKINKHIDSNSIMSVSQNGCRNGSRGTKELLLIDMAISQQVRRSRKDLSTCWIDYKKAYDSVPHTWLMRVLELYKVDTTLRTFLMTCMGQWRTVLRYPGCRNIQRNSEPIRIERGIFQGDSLSPLWFCLALNPLSTLLDDSGLGYRLRRGGQVISHLLYMDDLKLFAPNNLQLMKLLKITETFSSAIRMEFGVDKCAVMHVKRGEIVESVGTQLSDFTNLRALSAAETYKYLGMSEALGINVTDMKQSLKERFFGRLKKVFNSLLSGGNKVRAFNSWVMPVLMYSFGILKWTQTELDALDRRVRTLLTANRMHHPRSSVMRLYIPRKCGGRGFLNAKTLHNREICSLREYFLETDVGMHRDVVAVDKGLTPLSLAKENWRKPVVLDTNDRMEVWQSKELHGRFYRALHGPDVDLLASVAWLRFGDLFGETEGFVCAIMDEVMMTNNYRRFIVKDGTVDICRACHRPGESIRHIISGCSCLANGEYLHRHNLVARIIHQQLALKYSLVESEVPYYRYVPDPVLENGNITLYWDRSIITDRTIVANKPDIVVVDRSERRAMIVDITVPHDENLVKAEKDKQIKYLDLAREVVDMWDVDSAVIVPIVVTANGLIAKSLDQHLRRLSLGSWIKGLIQKAVLLDTARIVRRFLSLEP

SEQ ID NO: 12007 - protein, 975 aa, Furcula furcula
MPCGLRPRLPRLPMHKRNRALVCALDSLLSSYFDSSEDLADAHSLLYCAAMTACRVARVKLQNTDAATRPRPAVPAWQCRIERRIGEARLLIGKLTCFREGNTRPRVMRFVRRAFSGTGIDPREYISRVTERIDFLKQKVCAWASRIRRYRARADRYFQNNMFQRDQRWVYRSWERPSQTEGDVRRPDDDVMATFWRNIWSVPVTHSEGDWIGDVEQACEPLPEMGAITIWLQDVADAVRLLPNWKAPGPDGLHNFWLKSIRSSHICLASLFQSALESGSLPEFMTTGITHLLHKTNSTTDPKNYRPITCLPTVYKTLTSILRTKIYRHVEDNSIMSASQNGCRSGARGTKELLLIDMAICQQACRNRKDLSTCWIDYKKAYDSVPHTWLMRVLELYKVNATLRTFLASCMRQWRTVLRYPGSRQTLGDGEPIRIERGIFQGDSLSPLWFCLALNPLSTLLKSSGLGYRLRRGCEVISHLLYMDDLKLFAPTELQLMGLLRVTETFSNSIRMEFGVDKCAVMHVKRGRIVESRSVQLSDSTDLKTLSATETYKYLGMSQALGINETDMKQSLRDRFLGRLRKVLKSLLSGGNGVRAYNGWVMPVLMYSFGILKWTQTELDTLDRTVRTLLTTYRMHHPRSSVMRLYIPRKCGGRGFLNAKTLHNREIYNLREYFLHCGGEMHTDVVAVDNGLTPLYLAKGNWRKPVVLTTGDRGAVWQSKELHGRFYRALHGPDVDFSASVAWLRFGDLFGETEGFVCAIMDEVVMTNNYRKYILRDGTIDICRACHRPGESLRHIISGCSRLANGEYLHRHNQVARIIHQQLALRYRLVTSEVPYYRYVPEPVLEDGHITLYWDRSIITDRTIVANRPDIVLIDRTERRAMIVDVTVPHDENLVKAEKDKECKYLDLAHEVVDMWDIDKAIIVPIVVSAHGLMAKSLDKHLKRLTLDGWIKGQIQKAVLLETARIVRRFLSLEP

SEQ ID NO: 12008 - protein, 1196 aa, Furcula furcula
MLTRSKARQRSPGSLPRSASQLPGRRSDGSPAAVASSESDEYFSPPTSPPPVCRRRGRPPRDLGRLGQPAPNRVLVPGGVVRRMRWTSTINESVMRAYYEATAGGTNLTAYRNRMLSLFQALEPAVNVSAQRLSDQVRAIQRGNMLDDAVLDRLRSEVQGSRVAPCIPSSQAVAPVIYTAPAPRLEANSGNDGDDITTNVSTYKITQLRSTLEDVVREYRTMPQNLRPRLPRLPMHKRNRALVCALDSLLLSYFDSSEDLADAHSLLYCAAMTACRVARVKVPNADAATRPRPAVPAWQCRIERRIGEARVLIGKLTCFREGNTRPRVMRFVRRAFSGTGIGPREYLSRVTERIDFLKQKVCAWANRIRRYKARVDRYFQNNMFQRDQRWVYRSWERPSQTEGDVRRPDDDAMTTFWRNIWSVPVTHSEGDWIRDVEQVCEPLPEMGAITIWPQDVADAVRQLPNWKAPGPDGLHNFWLKWIRSSHICLASLFQSALESGSLPEFMTTGITHLLHKNNSTTDPKNYRPITCLPTVYKTLTSILRAKIYRHVEDNSIMSASQNGCRSGARGTKELLLIDMAICQQARRSRKDLSTCWIDYKKAYDSVPHTWLMRVLELYKVNATLRTFLASCMRQWRTVLLYPGSRQTLGNGDPIRIERGIFQGDSLSPLWFCLALNPLSTLLKSSGLGYRLRRGSQVISHLLYMDDLKLFAPTELQLMGLLKVTETFSNSIRMEFGVDKCAVMHVKRGRLVESRSVQLSDSTDLRTLSATETYKYLGMSQALGINETDMKQSLRERFLGRLRKVLKSLLSGGNRVRAYNGWVMPVLMYSFGILRWTQTELDTLDRTVRTLLTTYRMHHPRSSVMRLYIPRKCGGRGFLNAKTLHNREICNLREYFLHCGGEMHTDVVAVDNGLTPLSLAKGNWRKPVVLTTGDREAVWQSKELHGRFYRALHGPDVDFSASVAWLRFGDLFGETEGFVCAIMDEVVMTNNYRKYILRDGTIDICRACHRPGESLRHIISGCSRLANGEYLHRHNQVARIIHQQLALKYRLVMSEVPYYRYVPEPVLEDGHITLYWDRSIITDRTIVANKPDIVLIDRTERHAMIVDVTVPHDENLVKAEKDKECKYLDLAHEVVDMWDIDRAIIVPIVVSAHGLMAKSLDKHLKRLALDGWIKGQMQKAVLLETARIVRKFLSLEP

SEQ ID NO: 12009 - protein, 914 aa, Mamestra configurata
MTNDRVTRPKPAVPAWQCRIERRIGGARALIGKLICFREGNTRPRVMRFVRRAFSGTDISPRDYMSRITERIDFLKQKVYAWANRIRRYRRRVERYTQNRTFRSNERWVYRVWEQPDQGMTDTRLPDDDAMCSFWRNIWSVPVSHTEGDWIREVERACDPLPEMGAITISPQDVARAVRPLPNWKSPGPDGLHNFWIKWLQRSHARLASQYQTALESGSLPEFLTTGVTHLLHKSGSTAEPKNYRPITCLPTVYKVLTSILRAKINNHINSNNIMSVSQNGCRNGSRGTKELLLIDMAISQQVRRSRKDLSTCWIDYKKAYDSVPHTWLMRVLELYKIDTMLRTFLMSCMGQWRTVLRYPGCRNIQRNSEPVRIERGIFQGDSLSPLWFCLALNPLSTLLENSGLGYRLKRGGQVLSHLLYMDDLKLFAPSNLQLMELLKVTETFSSAIRMEFGVDKCAVMHVKRGEIMESVGTQLSDSINLRSLSSTETYKYLGMSEALGINVTDMKQSLKERFFGRLKKVFNSLLSGGNKVRAFNGWVMPVLMHSFGVLKWTQTELDALDRRVRTLLTAYRMHHPRSSVMRLYIPRKCGGRGFLNAKTLHNREICSLREYFLAVDVGMHRDVVAVDKGLTPLSLANENWRKPAVLDTNDRRAVWQSKELHGRYFRALHGPDVDQLASVAWLRFGDLFGETEGFVCAIMDEVIMTNNYRRFIVKDGTVDICRACHRPGESIRHIVSGCSRLANGEYLHRHNLVARIIHQQLALKYSLVESEVPYYRYAPDPVLDNGNITLYWDRSIITDRTIVANKPDIVVVDRIERRAMIVDITVPHDENLVKAEKDKQIKYIDLAREVVDMWDVDSAIIVPIVVSANGLIATSLDQHLRRLSLGSWIKGLIQKAVLLDTARIVRRFLSLEP

SEQ ID NO: 12010 - protein, 1198 aa, Mamestra configurata
MLTRAAAQRARLPPPASSLSSASPPPEPSPTVSAVIPAVAVASSSSDEYFSPPTSPPPARRRRGRRPPDGLGPRGPPASDRVPAPGGSVQRMRWTQTINENVMRSYYGATEGGTNLTAYRGRMLSLFQVLEPAVNVSAQRLSDQVRVIQRNRMLDDAVLDRLRLESRNGRVSAASPPAAVQIQSSVSPRPNIVGEDDDDGAISVSTQCNERLRSALEDAFREYRSTPPELRPRLPRLPMHNKNRALVCALDSQLANCFDSSEDLADTHSILYCAAAAACRVAHVKFPNSDRATRPAVPAWQCRIERRIGEARALIGKLICFREGNTRRRVMRFVRRAFSGTDTSPRDYLTRVTERIDFLKQKIYAWANRIRRYKRRVERYTQNRTFQSNERWVYRAWERPDQGVTDTRLPDDDVMCSFWRNIWSVPVSHTEGDWTREVERACDPIPEMGAITISPQDVARAVRPLPNWKSPGPDGLHNFWIKWFKRSHARLASQFQSALESGSLPQFLTTGITHLLHKSGSTAEPKNYRPITCLPTVYKVLTSILRAKINQHIETNSIMSASQNGCRNRSRGTKELLLIDVAISQQVRRSRRDLSTCWIDYKKAYDSVPHTWLMRVLELYKVDAVLRTFLMSCMGQWRTVLRYPGCRQIQANSDPIRIERGIFQGDSLSPLWFCLALNPLSTLLEGSGQGYRLRRGGQVISHLLYMDDLKLFAPNNLQLMKLLKVTETFSSAISMEFGVDKCAVMHVKRGEIMESVGTQLSDSIHLRSLSSTETYKYLGMSEALGINANDVKQSLKERFFGRLNKVLNSLLSGGNKVRAFNGWVMPVLMYSFGILKWTQTELDALDRRVRSLLTANRMHHPRSSVMRLYIPRKCGGRGFLNAKTLHNREICSLREFFLEADVGMHRDVVAVDKGLTALSLANENWRKPVVLDTNDRREVWQSKELHGRFYRVLHGPDVDFLASVAWLRFGDLFGETEGFVCAIMDEVMMTNNYRKYIVKDGTVDICRACHRPGESIRHIISGCSSLANGDYLHRHNLVARIIHQQLALKYNLVESEVPYYRYVPDPVLENGNCTLYWDRSIITDRTIIANKPDIVVIDRLERRAMIVDIAVPHDVNLVKTEKDKQTKYLDLAREVVDMWDVNTAVIVPIVVTANGIIAKSLDQHLKRLSLGSWIKGLIQKAVLLDTARIVRRFLSQGP

SEQ ID NO: 12011 - protein, 1132 aa, Amphipyra berbera
MGPRGPPASDRVPAPGGSVQRMRWTLTMNENCMRAYFGATEGGTNLTAYRGRMLSLFQVLEPTVNVSAQRLSDQVRVIQRDHRLTDAALDRLRSEVQSNRIISLQSQTAAQPQTPTVVPPLPIHADEESDDRVTNVSTQCNEQLRSALELAIREYRFTPPNIRPRIPRLPMHRKNRALMCALDSLLSSYFDNSENLEDTHSILYCAAVAACRVAHAKFDNNDRATRPKPAVPAWQCRIERRINEARALIGKLICFREGNTRPRVMRFVRRAFSGTDINPRDYLSRVTERIDFLKQKVYAWANRIRRYKRRVERYTQNRMFHSDERWVYRTWERPDHDVSDTHLPDNDVMNTFWRNIWSMPVTHTEGDWMQEVQRACEPIEEMGDITIVPQDVTSAVRPMANWKSPGPDGLHNFWLKWLRSSHARLASQFQSSLESGSLPEFLTTGVTHLLHKSGSTAEPKNYRPITCLPTVYKLLTSILRAKINSHIINNSIMSVSQNGCKNGSRGTKELLLIDMAISQQVRRSRKDLSTCWIDYKKAYDSVPHTWLMRVLELYKVNTTLCAFLTSCMGQWRTVFHYPGCRQIQGRGEPIRIERGIFQGDSLSPLWFCLALNPLSTLLEGSGLGYRLRRGGQVISHLLYMDDLKLFAPNNLQLMKLLKVTETFSNSIRMEFGVDKCAVMHVKRGGIMESVGTQLSDSIHLRPLSSTETYKYLGMSEALGINETDMKQSLRERFYGRLKKVLKSLLSGGNKVRAFNGWVMPVLMYSFGILKWTQTELDALDRRVRTLLTAYRMHHPRSSVMRLYIPRKCGGRGFLNAKTLHNREVCSLREYFLQADVGMHRDVVAVDKGFTPLSLAKENWRKPVVLDTNGRREVWQSKELHGRFYRALYGPDVDFLASVAWLRFGDLFGETEGFVCAIMDEVMMTNNYRKYIVKDGTVDICRACHCPGESIRHIISGCSRLANGEYLHRHNLVARIIHQQLALKYNLVDAEVPYYKYVPDPVLENGHITLYWDRSIITDRTIVANKPDIVVIDRSERLTMIVDITVPHDENLVKAEKDKEIKYQDLAHEVVDMWEVDSAVIVPIVVTANGLIAKSLDQHLTRLALGSWVKGLIQKAVLLDTARIVRKFLSLRP

SEQ ID NO: 12012 - protein, 1212 aa, Amphipyra berbera
MLTRSRTKTQDTRTRPRPSASSLSSASQPPDSSIVSDVTPAAAVASSSSDEFYSPPTSPPPPPPPPPRRGRRGRGRPPACMGPRGPAASDRVPATGGSVQRMRWTLTMNENCMRAYFGATEGGTNLTAYRGRMLSLFQVLEPTVNVSAQRLSDQVRVIQRDHRLTDAALDRLRSEVQSNRIISLQSQTAAQPQTPTVVPPLPIHADEESDDRVTNVSTQCNEQLRSALELAIREYRFTPPNIRPRIPRLPMHRKNRALMCALDSLLSSYFDNSENLEDTHSILYCAAVAACRVAHAKFDNNDRATRPKPAVPAWQCRIERRINEARALIGKLICFREGNTRPRVMRFVRRAFSGTDINPRDYLSRVTERIDFLKQKVYAWANRIRRYKRRVERYTQNRMFHSDERWVYRTWERPDHDVSDTHLPDNDVMNTFWRNIWSMPVTHAEGDWMQEVQRACEPIEEMGDITIVPQDVTSAVRPMANWKSPGPDGLHNFWLKWLRSSHARLASQFQSSLESGSLPEFLTTGVTHLLHKSGSTAEPKNYRPITCLPTVYKLLTSILRAKINSHIINNSIMSVSQNGCKNGSRGTKELLLIDMAISQQVRRSRKDLSTCWIDYKKAYDSVPHTWLMRVLELYKVNTTLCAFLTSCMGQWRTVLHYPGCRQIQGRGEPIRIERGIFQGDSLSPLWFCLALNPLSTLLEGSGLGYRLRRGGQVISHLLYMDDLKLFAPNNLQLMKLLKVTETFSNSIRMEFGVDKCAVMHVKRGGIMESVGTQLSDSIHLRPLSSTETYKYLGMSEALGINETDMKQSLRERFYGRLKKVLKSLLSGGNKVRAFNGWVMPVLMYSFGILKWTQTELDALDRRVRTLLTAYRMHHPRSSVMRLYIPRKCGGRGFLNAKTLHNREVCSLREYLLQADVGMLRDVVAVDKGFTPLSLAKENWRKPVVLDTNGRREVWQSKELHGRFYRALYGTDVDFLASVAWLRFGDLFGETEGFVCAIMDEVMMTNNYRKYIVKDGTVDICRACHCPGESIRHIISGCSRLANGEYLHRHNLVARIIHQQLALKYNLVDAEVPYYKYVPDPVLENGHITLYWDRSIITDRTIVANKPDIVVIDRSERLTMIVDITVPHDENLVKAEKDKEIKYQDLAHEVVDMWEVDSAVIVPIVVTANGLIAKSLDQHLTRLALGSWVKGLIQKAVLLDTARIVRKFLSLRP

SEQ ID NO: 12013 - protein, 1208 aa, Amphipyra berbera
MLTRSRTKTQDTRTRPRPSASSLSSASQPPDSSIVSDVTPAAAVASSSSDEFYSPPTSPPPPPRRGRRGRGRPPACMGPRGPPASDRVPAPGGSVQRMRWTLTMNENCMRAYFGATEGGTNLTAYRGRMLSLFQVLEPTVNVSAQRLSDQVRVIQRDHRLTDAALDRLRSEVQSNRIISLQSQTAAQPQTPTVVPPLPIHADEESDDRVTNVSTQCNEQLRSALELAIREYRFTPPNIRPRIPRLPMHRKNRALMCALDSLLSSYFDNSENLEDTHSILYCAAVAACRVAHAKFDNNDRATRPKPAVPAWQCRIERRINEARALIGKLICFREGNTRPRVMRFVRRAFSGTDINPRDYLSRVTERIDFLKQKVYAWANRIRRYKRRVERYTQNRMFHSDERWVYRTWERPDHDVSDTHLPDNDVMNTFWRNIWSMPVTHAEGDWMQEVQRACEPIEEMGDITIVPQDVTSAVRPMANWKSPGPDGLHNFWLKWLRSSHARLASQFQSSLESGSLPEFLTTGVTHLLHKSGSTAEPKNYRPITCLPTVYKLLTSILRAKINFHIINNSIMSVSQNGCKNGSRGTKELLLIDMAISQQVRRSRKDLSTCWIDYKKAYDSVPHTWLMRVLELYKVNTTLCAFLTSCMGQWRTVLHYPGCRQIQGRGEPIRIERGIFQGDSLSPLWFCLALNPLSTLLEGSGLGYRLRRGGQVISHLLYMDDLKLFAPNNLQLMKLLKVTETFSNSIRMEFGVDKCAVMHVKRGGIMESVGTQLSDSIHLRPLSSTETYKYLGMSEALGINETDMKQSLRERFYGRLKKVLKSLLSGGNKVRAFNGWVMPVLMYSFGILKWTQTELDALDRRVRTLLTAYRMHHPRSSVMRLYIPRKCGGRGFLNAKTLHNREVCSLREYFLQADVGMHRDVVAVDKGFTPLSLAKENWRKPVVLDTNGRREVWQSKELHGRFYRALYGTDVDFLASVAWLRFGDLFGETEGFVCAIMDEVMMTNNYRKYIVKDGTVDICRACHCPGESIRHIISGCSRLANGEYLHRHNLVARIIHQQLALKYNLVDAEVPYYKYVPDPVLENGHITLYWDRSIITDRTIVANKPDIVVIDRSERLTMIVDITVPHDENLVKAEKDKKIKYQDLAHEVVDMWEVDSAVIVPIVVTANGLIAKSLDQHLTRLALGSWVKGLIQKAVLLDTARIVRKFLSLRP

SEQ ID NO: 12014 - protein, 1202 aa, Amphipyra berbera
MLTRSRTRTTEQRSARPPPPDSPLSSASQPPELGLPVTPAAAASSSSSDEYFSPPTSPRPVRRQGRGRPPNSLGPRGPPAPSRVLAAGGYVQRMKWTQSINENVMRAYYGSTEGGTNLTAYRVRMLTLFQELEPAINVSAQRLSDQVRVIQRNHRLDDAALDRLRLEVQNSRAIPVPLQTAVHQLINVAPPRSDRVDGDEDDGAVTVSSQYNDRLRSALEDAIRECRANPESRPRLPRLPMHNKNRALVCALDSLLASYFESSEDLGDTHSILYCAAVAACRVANVKFNNSERATRPKLAVPAWQCRIERRIDETRALIGKLICFREGNTRPRVMRFVRRAFSGTGISPREYTSRATERIDFLKQKVCAWASRIRRYKRRVERYTQNRMFQCDQRWVYRAWERPDQSVSGGRLPDDDAMSSFWRSIWSVPVIHTEGDWMRDIERTCESIEEMGEIIISPQDVAGAVRPLPNWKSPGPDGLHNFWIKWLRSSHARLASQFQSSLESGSLPQFLTTGVTHLLHKSGSTAEPKNYRPITCLPTVYKLLTSILRSKINTHIGNNSVLSSSQNGCRNGSRGTKELLLIDTAISQQVRRSQKSLSTCWIDYKKAYDSVPHTWLMRVLELYKINTTLRTFLRSCMGQWRTVLRYPGCQPIRGSGEPIRIERGIFQGDSLSPLWFCLALNPLSTLLEGSGLGYPLRRGGQVVSHLLYMDDLKLFAPTKLQLVDLLKVTETFSNSIRMEFGVDKCAVMHVRRGRIMESEGLQLSDSIHLSPLSANDTYKYLGMSEGLGISEADMKQSLRERFFGRLKKVLKSLLSGGNKVRAFNGWVMPVLMYSFGILKWTQTELDALDRRVRTLLTANRMHHPRSSVMRLYIPRKCGGRGLLNAKTLHNREVCSLREFFLHADAGMHRDVVAVDKGLTPLSLARENWRKPVVLSTNDRREIWQSKELHGRFYRALHGPDVDFLASVSWLRFGDLFGETEGFVCAIMDEVIMTNNYRKYIVKDGTVDICRACHCPGESLRHIISGCSRLANGEYLHRHNQVARIIHQQLALKYNLVESEVPYYRYVPDPVLENGRITLYWDRSIITDRTIVANKPDIVVIDRSERRTMIVDVTIPHDGNLVKAEKDKQIKYLDLAHEVVNMWDVESATIVPIVVTANGLMAKSLDKHLMRLSLGGWIKGLIQKAVLLDTARIVRRFLSLEP

SEQ ID NO: 12015 - protein, 1205 aa, Amphipyra berbera
MLTRSRAKALTETTRPRSSAPSLSSASQPPDSSIVSDVTPAAAVASSSSDEYFSPPTSPPPARRRGRGRPPDSLRPRGPLASDRVPAAGGSVQRMRWTPTMNENCMRAYFGATEGGTNLTAYRGRMLSLFQVLEPTVNVSAQRLSDQVRVIQRDHRLTDAALDRLRSEVQSNAIISLQSQTAAQPRTPTVVPPLPTHGNEESDDRVTNVSTQCNEQLRSALELAIQEYRFTPPNIRPRIPRLPMHRKNRALMCALDSLLSSYFDNSENLEDTHSILYCAAVAACRVAHAKFDNSDKATRPKRAVPAWQCRIERRINEARALIGKLICFREGNTRPRVMRFVRRAFSGTDINPRDYMSRVTERIDFLKQKVYAWANRIRRYKRRVERYTQNRMFHSDERWVYRTWERPDHDVNDTHPPDNDVMNTFWRNIWSMPVTHTEGDWMQEVQRACEPIEEMGDITIVPQDVTSAVRPMANWKSPGPDGLHNFWIKWLRSSHARLASQFQSSLESGSLPEFLTTGVTHLLHKSGSTAEPKNYRPITCLPTVYKLLTSILRAKINSHIINNSIMSVSQNGCKNGSRGTKELLLIDMAISQQVRRSRKDLSTCWIDYKKAYDSVPHTWLMRVLELYKVNTTLCAFLTSCMGQWRTVLHYPGCRQIQGRGEPIRIERGIFQGDSLSPLWFCLTLNPLSTLLEGSGLGYRLRRGGQVTSHLLYMDDLKLFAPNNLQLMKLLKVTETFSNSIRMEFGVDKCAVMHVKRGGIMESVGTQLSDSIHLRSLSSTETYKYLGMSETLGINETDMKQSLRERFYGRLKKVLKSLLSGGNKVRAFNGWVMPVLMYSFGILKWTQTELDALDRRVRTLLTAYRMHHPRSSVMRLYIPRKCGGRGFLNAKTLHNREVCSLREYFLQADVGMHRDVVAVDKGFTPLSLAKENWRKPVVLDTNGRREVWQSKELHGRFYRALHGPDVDFLASVAWLRFGDLFGETEGFVCAIMDEVILTNNYRKYIVKDGTVDICRACHCPGESIRHIISGCSRLANGEYLHRHNLVARIIHQQLALKYNLVDAEVPYYKYVPDPVLENGHITLYWDRSIITDRTIVANKPDIVVIDRSERLAMIVDITVPHDENLVKAEKDKEIKYQDLAHEVVDMWEVDSAVIVPIVVTANGLIAKSLDQHLTRLALGSWIKGLMQKAVLLDTARIVRKFLSLRP

SEQ ID NO: 12016 - protein, 1211 aa, Amphipyra berbera
MLTRSRTKTQDTRTRPRPSASSLSSASQPPDSSIVSDVTPAAAVASSSSDEFYSPPTSPPPPPPPPRRGRRGRGRPPACMGPRGPPASDRVPAPGGSVQRMRWTLTMNENCMRAYFGATEGGTNLTAYRGRMLSLFQVLEPTVNVSAQRLSDQVRVIQRDHRLTDAALDRLRSEVQSNRIISLQSQTAAQPQTPTVVPPLPIHADEESDDRVTNVSTQCNEQLRSALELAIREYRFTPPNIRPRIPRLPMHRKNRALMCALDSLLSSYFDNSENLEDTHSILYCAAVAACRVAHAKFDNNDRATRPKPAVPAWQCRIERRINEARALIGKLICFREGNTRPRVMRFVRRAFSGTDINPRDYLSRVTERIDFLKQKVYAWANRIRRYKRRVERYTQNRMFHSDERWVYRTWERPDHDVSDTHLPDNDVMNTFWRNIWSMPVTHAEGNWMQEVQRACEPIEEMGDITIVPQDVTSAVRPMANWKSPGPDGLHNFWLKWLRSSHARLASQFQSSLESGSLPEFLTTGVTHLLHKSGSTAEPKNYRPITCLPTVYKLLTSILRAKINSHIINNSIMSVSQNGCKNGSRGTKELLLIDMAISQQVRRSRKDLSTCWIDYKKAYDSVPHTWLMRVLELYKVNTTLCAFLTSCMGQWRTVLHYPGCRQIQGRGEPIRIERGIFQGDSLSPLWFCLALNPLSTLLEGSGLGYRLRRGGQVISHLLYMDDLKLFAPNNLQLMKLLKVTETFSNSIRMEFGVDKCAVMHVKRGGIMESVGTQLSDSIHLRPLSSTETYKYLGMSEALGINETDMKQSLRERFYGRLKKVLKSLLSGGNKVRAFNGWVMPVLMYSFGILKWTQTELDALDRRVRTLLTAYRMHHPRSSVMRLYIPRKCGGRGFLNAKTLHNREVCSLREYFLQADVGMHRDVVAVDKGFTPLSLAKENWRKPVVLDTNGRREVWQSKELHGRFYRALYGTDVDFLASVAWLRFGDLFGETEGFVCAIMDEVMMTNNYRKYIVKDGTVDICRACHCPGESIRHIISGCSRLANGEYLHRHNLVARIIHQQLALKYNLVDAEVPYYKYVPDPVLENGHITLYWDRSIITDRTIVANKPDIVVIDRSERLTMIVDITVPHDENLVKAEKDKEIKYQDLAHEVVDMWEVDSAVIVPIVVTANGLIAKSLDQHLTRLALGSWVKGLIQKAVLLDTARIVRKFLSLRP

SEQ ID NO: 12017 - protein, 1210 aa, Amphipyra berbera
MLTRSRTKTQDTRTRPRPSASSLSSTSQPPDSSIVSDVTPAAAVASSSSDEFYSPPTSPPPPPPPRRGRRGRGRPPACMGPRGPPASDRVPAPGGSVQRMRWTLTMNENCMRAYFGATEGGTNLTAYRGRMLSLFRVLEPTVSVSAQRLSDQVRVIQRDHRLTDAALDRLRSEVQSNRIISLQSQTAAQPQTPTVVPPLPIHADEESDDRVTNVSTQCNEQLRSALELAIREYRFTPPNIRPRIPRLPMHRKNRALMCALDSLLSSYFDNSENLEDTHPILHCAAVAACRVAHAKFDNNDRATRPKPAVPAWQCRIERRINEARALIGKLICFREGNTRPRVIRFVRRAFSGTDINPRDYLSRVTERIDFLKQKVYAWANRIRRYKRRVERYTQNRMFHSDERWVYRTWERPDHDVSDTHLPDNDVMNTFWRNIWSMPVTHTEGDWMQEVQRACEPIEEMGDITIVPQDVTSAVRPMANWKSPGPDGLHNFWLKWLRSSHARLASQFQSSLESGSLPEFLTTGVTHLLHKSGSTAEPKNYRPITCLPTVYKLLTSILRAKINSHIINNSIMSVSQNGCKNGSRGTKELLLIDMAISQQVRRSRKDLSTCWIDYKKAYDSVPHTWLMRVLELYKVNTTLCAFLTSCMGQWRTVLHYPGCRQIQGRGEPIRIERGIFQGDSLSPLWFCLALNPLSTLLEGSGLGYRLRRGGQVISHLLYMDDLKLFAPNNLQLMKLLKVTETFSNSIRMEFGVDKCAVMHVKRGGIMESVGTQLSDSIHLRPLSSTETYKYLGMSEALGINETDMKQSLRERFYGRLKKVLKSLLSGGNKVRAFNGWVMPVLMYSFGILKWTQTELDALDRRVRTLLTAYRMHHPRSSVMRLYIPRKCGGRGFLNAKTLHNREVCSLREYFLQADVGMHRDVVAVDKGFTPLSLAKENWRKPVVLDTNGRREVWQSKELHGRFYRALYGPDVDFLASVAWLRFGDLFGETEGFVCAIMDEVMMTNNYRKYIVKDGTVDICRACHCPGESIRHIISGCSRLANGEYLHRHNLVARIIHQQLALKYNLVDAEVPYYKYVPDPVLENGHITLYWDRSIITDRTIVANKPDIVVIDRSERLTMIVDITVPHDENLVKAEKDKEIKYQDLAHEVVDMWEVDSAVIVPIVVTANGLIAKSLDQHLTRLALGSWVKGLIQKAVLLDTARIVRKFLSLRP

SEQ ID NO: 12018 - protein, 1197 aa, Noctua janthe
MLTRSATRRARLSPPDPSLSSASPPPESSPIVSAVTPAVAVASSSSDEYFSPPTTPPPVRRRGGRRPPDGLGPRGPPASDRVPAPGGSVPRMRWTQSINANVMRAYYGATEGGNNLTAYRVRMLSLFQVLEPAVNVSAQRLSDQVRVIQRNGMLDDTVLDRLRTEMQSSHVIATPPQTVVPPQSTIIPTHDNNVSNDMVTNVSSQCNEEMRCALEGAIREYRFMQPDLRPRVPRLPMHNKNKVLVAVLDSQLSNYFDNCENLTDAHSVLYCAAVAACRVAHVKFSDDRATRPKPAVPSWQYRIERRIGEARALIGKLICFREGNTRPRVMRFVRRAFSGTDISARDYMSRVTERIDFLKQKVYAWANRIRRYKRRVDRYTQNRTFQRDERWVYRAWERPDQGVADTHLPDDDAMCSFWRSIWSVPVSHTEGEWTREVERACDLVPEMGAITISPQEVVRAVRPLPNWKSPGPDGLHNFWIKWFTRSHARLAILFQSALESGSLPEFLTTGITHLLHKSGSTAEPKNYRPIACLPTVYKVLTSILRAKINKHIDDNSVMSASQNGCRNGSRGTKELLLIDMAISQQVRRSRRDLSTCWIDYKKAYDSVPHTWLMRVLELYKVDSTLRISLMSCMGQWRTVLRYPGCRQIQRNSESIRIERGIFQGDSLSPLWFCLALNPLSTLLEDSGLGYRLRRGGQVISHLLYMDDLKLFAPNDLQLMELLKVTETFSSAIRMEFGVDKCAVMHVKRGEIVESVGTQLSDSINLRSLSATETYKYLGMSEALGINVADMKQSLKERFFGRLKKVFNSLLSGGNKVRAFNGWVMPVLMYSFGILKWTQTELDALDRRVRTLLTTYRMHHPRSSVMRLYIPRRCGGRGFLNAKTLHNREIYSLREYFLETDVGMHRDVVAEDKGLTPLSLAKENWRKPVVLDTNDRMEVWQSKELHGRFFRALHGPDVDLPASVAWLRSGDLFGETEGFVCAIMDEVMMTNNYRRFIVKDGTVDICRACHRPGESIRHIISGCSRLANGEYLHRHNLVARIIHQQLALKYNLVESEVPYYKYVPDPVLENGNITLYWDRSIVTDRTIVANKPDIVVVDRSERRAMIVDITVPHDGNLVKAEKDKQIKYLDLAHEVVDMWDVDSAIIVPIVVSAHGLIAKSLDQYLRRLSLGSWIKGLIQKAVLLDTARIVRRFLSLEP

SEQ ID NO: 12019 - protein, 1205 aa, Noctua janthe
MLTRRRAKLHETHPPSPGSSLSSASHSPGRATSVSAASPVAAVASSSSDEFFSPPSTPPPPRRRGRGRPPAGLGPRGQQATNRVPAAGGNVSRIRWTQSMNENVMRAYYGATEGGINLTAYRCRMLSLFQALEPAVNVSAQRLSDQVRVILNNHRLDDATLDRLRSEMQISPASNPLPSQNVTHVPAVLPLRANHHAEEEDDRTISADSLCNVELRSALEGAIREYRFMSPDLRPRLPRLPMNKKNRALVCALDALLPNFIESSTNLCDTHSILYCTAVAACRVANVKFPNTDSPTRPKSAVPAWQCRIERRINEARALIGKLICFREGNTRPRVMRFVRRAFSGTDISPREYMSRVTERIDFLKQKVYAWANRIRRYRRRVDRYTQNPMFQSDERWVYRTWERPVTIQGVTDAHLPDNDAMNAFWRSIWSVPVGHTEGDWMRVVERACDSIPEMEAISISPLDVACAVRPLPNWKSPGPDGLHNFWIKWLQRSHACLASQFQSSLETGSLPPFFTTGVTHLLYKSGSTVEPKNYRPITCLPTVYKVLTSILRAKIVRHIDSNSIMSVSQNGCKNGSRGTKELLLIDMAISQQVRRSRRDLSTCWIDYKKAYDSVPHTWLMRVLELYKIDATLRTFLMSCMGQWRTVLLYPGCRQVLGNDEPIRIERGIFQGDSLSPLWFCLALNPLSTLLEDSGLGYRLRRGGQVISHLLYMDDLKIFAPSNLQLMELLKVTETFSSAIRMEFGLDKCAVMHVKRGEIMESVGTQLSDSIFLRSLSSTETYKYLGMSEALGIIAADMKQSLKERFFGRLNKVLNSLLSGGNKVRAFNGWVMPVLMYSYGILKWTQTELDALDRKVRTLLTANRMHHPRSSVMRLYIPRKCGGRGFLNAKTLHNREVCSLREYFLETDVGMHRDVVSVDKSFTPLSLANQNWRKPVVLDTYNRREVWQSKELHGRFFRALHGPDVDFLASVSWLRFGDLFGETEGFVCAIMDEVIMTNNYRKYIIKDGTVDICRACHRPGESIRHIVSGCSRLANGEYLHRHNLVAKIIHQQLALQYNLVSSEVPYYKYVPDPVLENGHATLYWDRSIITDRTILANKPDIVVIDRRERRAMIVDITVPHDENLVKAENDKKIKYLDLAHEVVDMWDVDSAIIVPIVVTVNGLIAESLDQHLRRLSLRGWVKSLIQKAVLLDTARIVRRFLSLEP

SEQ ID NO: 12020 - protein, 1197 aa, Noctua janthe
MLTRSATRRARLSPPDPSLSSASPPPESSPIVSAVTPAVAVASSSSDEYFSPPTTPPPVRRRGGRRPPDGLGPRGPPASDRVPAPGGSVPRMRWTQSINANVMRAYYGATEGGNNLTAYRVRMLSLFQVLEPAVNVSAQRLSDQVRVIQRNGMLDDTVLDRLRTEMQSSHVIATPPQTVVPPQSTIIPTHHNNVSNDMVTNVSTQCNEEMRCALEGAIREYRFMQPDLRPRVPRLPMHNKNKVLVAVLDSQLSNYFDNCENLTDAHSVLYCAAVAACRVAHVKFSDDRATRPKPAVPSWQYRIERRIGEARALIGKLICFREGNTRPRVMRFVRRAFSGTDISARDYMSRVTERIDFLKQKVYAWANRIRRYKRRVDRYTQNRTFQRDERWVYRAWERPDQGVADTRLPDDDAMCSFWRSIWSVPVSHTEGEWTREVERACDLVPEMGAITISPQDVVRAVRPLPNWKSPGPDGLHNFWIKWFTRSHARLAILFQSALESGSLPEFLTTGITHLLHKSGSTAEPKNYRPIACLPTVYKVLTSILRAKINKHIDDNSVMSASQNGCRNGSRGTKELLLIDMAISQQVRRSRRDLSTCWIDYKKAYDSVPHTWLMRVLELYKVDSTLRIFLMSCMGQWRTVLRYPGCRQIQRNSEPIRIERGIFQGDSLSPLWFCLALNPLSTLLEDSGLGYRLRRGGQVISHLLYMDDLKLFAPNDLQLMELLKVTETFSSAIRMEFGVDKCAVMHVKRGEIVESVGTQLSDSINLRSLSATETYKYLGMSEALGINVADMKQSLKERFFGRLKKVFNSLLSGGNKVRAFNGWVMPVLMYSFGILKWTQTELDALDRRVRTLLTTYRMHHPRSSVMRLYIPRRCGGRGFLNAKTLHNREICSLREYFLETDVGMHRDVVAVDKGLTPLSLAKENWRKPVVLDTNDRMEVWQSKELHGRFFRALHGPDVDLPASVAWLRSGDLFGETEGFVCAIMDEVMMTNNYRRFIVKDGTVDICRACHRPGESIRHIISGCSRLANGEYLHRHNLVARIIHQQLALKYNLVESEVPYYKYVPDPVLENGNITLYWDRSIVTDRTIVANKPDIVVVDRSERRAMIVDITVPHDGNLVKAEKDKQIKYLDLAHEVVDMWDVDSAIIVPIVVSAHGLIAKSLDQYLRRLSLGSWIKGLIQKAVLLDTARIVRRFLSLEP

SEQ ID NO: 12021 - protein, 1197 aa, Noctua janthe
MLTRSATRRARLSPPDPSLSSASPPPESSPIVSAVTPAVAVASSSSDEYFSPPTTPPPVRRRGGRRPPDGLGPRGPPASDRVPAPGGSVPRMRWTQSINANVMRAYYGATEGGNNLTAYRVRMLSLFQVLEPAVNVSAQRLSDQVRVIQRNGMLDDTVLDRLRTEMQSSHVIATPPQTVVPPQSTIIPTHDNNVSNDMVTNVSTQCNEEMRCALEGAIREYRFMQPDLRPRVPRLPMHNKNKMLVAVLDSQLSNYFDNCENLTDAHSVLYCAAVAACRVAHVKFSDDRATRPKPAVPSWQYRIERRIGEARALIGKLICFREGNTRPRVMRFVRRAFSGTDISARDYMSRVTERIDFLKQKVYAWANRIRRYKRRVDRYTQNRTFQRDERWVYRAWERPDQGVADTHLPDDDAMCSFWRSIWSVPVSHTEGEWTREVERACDLVPEMGAITISPQDVVRAVRPLPNWKSPGPDGLHNFWIKWFTRSHARLAILFQSALESGSLPEFLTTGITHLLHKSGSTAEPKNYRPIACLPTVYKVLTSILRAKINKHIDDNSVMSASQNGCRNGSRGTKELLLIDMAISQQVRRSRRDLSTCWIDYKKAYDSVPHTWLMRVLELYKVDSTLRIFLMSCMGQWRTVLRYPGCRQIHRNSEPIRIERGIFQGDSLSPLWFCLALNPLSTLLEDSGLGYRLRRGGQVISHLLYMDDLKLFAPNDLQLMELLKVTETFSSAIRMEFGVDKCAVMHVKRGEIVESVGTQLSDSINLRSLSATETYKYLGMSEALGINVADMKQSLKERFFGRLKKVFNSLLSGGNKVRAFNGWVMPVLMYSFGILKWTQTELDALDRRVRTLLTTYRMHHPRSSVMRLYIPRRCGGRGFLNAKTLHNREICSLREYFLETDVGMHRDVVAVDKGLTPLSLAKENWRKPVVLDTNDRMEVWQSKELHGRFFRALHGPDVDLPASVAWLRSGDLFGETEGFVCAIMDEVMMTNNYRRFIVKDGTVDICRACHRPGESIRHIISGCSRLANGEYLHRHNLVARIIHQQLALKYNLVESEVPYYKYVPDPVLENGNITLYWDRSIVTDRTIVANKPDIVVVDRSERRAMIVDITVPHDGNLVKAEKDKQIKYLDLAHEVVDMWDVDSAIIVPIVVSAHGLIAKSLDQYLRRLSLGSWIKGLIQKAVLLDTARIVRRFLSLEP

SEQ ID NO: 12022 - protein, 1205 aa, Noctua janthe
MLTRRRAKLHETHPPSPGSSLSSASHLPGRATSVSAASPVAAVASSSSDEFFSPPSTPPPPRRRGRGRPPAGLGPRGQQATNRVPAAGGNVSRIRWTQSMNENVMRAYYGATEGGINLTAYRCRMLSLFQALEPAVNVSAQRLSDQVRVILNNHRLDDATLDRLRSEMQISPASNPLPSQNVTHVPAVLPLRANHHAEEEDDRTISADNLCNVELRSALEGAIREYRFMSPDLRPRLPRLPMNKKNRALVCALDALLPNFIESSTNLCDTHSILYCTAVAACRVANVKFPNTDSPTRPKSAVPAWQCRIERRINEARALIGKLICFREGNTRPRVMRFVRRAFSGTDISPREYMSRVTERIDFLKQKVYAWANRIRRYRRRVDRYTQNRMFQSDERWVYRTWERPVTIQGVTDAHLPDNDAMNAFWRSIWSVPVGHTEGDWMRVVERACDSIPEMEAISISPLDVACAVRPLPNWKSPGPDGLHNFWIKWLQRSQACLASQFQSSLETGSLSPFFTTGVTHLLYKSGSTVEPKNYRPITCLPTVYKVLTSILRAKIVRHIDSNSIMSVSQNGCKNGSRGTKELLLIDMAISQQVRRSRRDLSTCWIDYKKAYDSVPHTWLMRVLELYKIDATLRTFLMSCMGQWRTVLLYPGCRQVLGNDEPIRIERGIFQGDSLSPLWFCLALNPLSTLLEDSGLGYRLRRGGQVISHLLYMDDLKIFAPSNLQLMELLKVTETFSSAIRMEFGLDKCAVMHVKRGEIMESVGTQLSDSIFLRSLSSTETYKYLGMSEALGINAADMKQSLKERFFGRLNKVLNSLLSGGNKVRAFNGWVMPVLMYSYGILKWTQTELDALDRKVRTLLTANRMHHPRSSVMRLYIPRKCGGRGFLNAKTLHNREVCSLREYFLETDVGMHRDVVSVDKSFTPLSLANQNWRKPVVLDTNNRREVWQSKELHGRFFRALHGPDVDFLASVSWLRFGDLFGETEGFVCAIMDEVIMTNNYRKYIIKDGTVDICRACHRPGESIRHIVSGCSRLANGEYLHRHNLVAKIIHQQLALQYNLVSSEVPYYKYVPDPVLENGHAILYWDRSIITDRTILANKPDIVVIDRRERRAMIVDITVPHDENLVKAENDKKIKYLDLAHEVVDMWDVDSAIIVPIVVTVNGLIAESLDQHLRRLSLRGWVKSLIQKAVLLDTARIVRRFLSLEP

SEQ ID NO: 12023 - protein, 962 aa, Mythimna ferrago
MCNKNRALVAALDSQLSNCFDDCEDLTETHSIMYCAAVAACRVAHVKFPDSDKATRPKSAVPAWQCRIERRIGGARALIGKLICFREGNTRPRVMRFVRRAFSGTNISPRDYMSRVTERIDFLKQKVYAWANRIRRYKRRVERYTQNRTFRINERWVYRAWERPDQGVTDARLPDDDTMSSFWRSIWSVPVSHTEGDWTREVERACDPIPQMGAIDISPQDVARAVRPLPNWKSPGPDGLHNFWIKWFTRSHAHLAYQFQSALESGSLPQFLTTGITHLLHKSDSTAEPKNYRPITCLPTVYKVLTSKLRSKINSHIDENSIMSPSQNGCRNGSRGTKELLLIDMTISQQVRRSRKDLSTCWIDYKKAYDSVPHTWLMRVLELYKIDTTLRTFLMSCMRQWSTVLRYPGCRNIQRNSEPIRIERGIFQGDSLSPLWFCLALNPLSTLLENSGLGYRLKRGGQVISHLLYMDDLKLFAPNNLQLMELLKVTETFSSAIRMEFGVDKCAVMHVKRGEVVESVGVQLTDSINLRSLSPTETYKYLGMSEALGISTIDMKQSLKERFFGRLKKVFNSLLSGENKVRAFNGWVMPVLMYSFGVLKWTQTELDALDRRVRTLLTAYRMHHPRSSVMRLYIPRKSGGRGFLNAKTLHNREVCSLREYFLAADVGMHRDVVAVDNGLTPLFLANENWRKPIVLDTDDRREVWQSKELHGRFFRALHGPDVDQLASVAWVRFGDLFGETEGFVCAIMDEVIMTNNYRRFIVKDGTVDICRACHRPGESIRHIISGCSRLANGEYLHRHNLVARIIHQQLALKYSLVESEVPYYRYEPDPVLDKGHITLYWDRPIITDRTIVANKPDIVVVDRSERRAMIVEISVPHDENLVKAEKDKQMKYIDLAREVVDMWEVDSAIIVPIVVSANGLIAKSLDQHLRRLSLGDWIKGLIQKAVLLDTARIVRRFLSLEP

SEQ ID NO: 12024 - protein, 1107 aa, Mythimna ferrago
MRWTQSINENVMRSYFGATEGGTNLTAYRGRMLSLFQVLEPAVNVSAQRLSDQVRVIQRNRMLDDAVLDRLRLESRNGRVSPVSPPAAVQRQLSVSPRPDHVGEDDDDGAISVSTQCNARLRSALEDAFREYRSIPPELRPRLPRLPMHRKNRALVCALDSQLSNCFDSSEDLTDTHSILYCAAAAACRVAHVKIPNSDRATRPAKPAWQCRIERRIGEARALIGKLICFREGNTRPRVMRFVRRAFSGTDISPRDYLPRITERIDFLRQKVYAWANRIRRYKRRVERYTQNRAFQSNERWVYRAWERPDQSVIDTHLPDDDAMYSFWRSIWSVPVNHTEGDWTREVERECELIPEMGAITISPQDVARAVRPLPNWKSPGPEGLHNFWLKWFKSSHARLASQFQSALESGSLPQFLTTGITHLLYKSGSTAEPKNYRPITCLPTVYKVLTSILRAKINSHIETNSIMSASQNGCRNGSRGTKELLLIDVAISQQVRRSRRDLSICWIDYKKAYDSVPHTWLMRVLELYKIDVTLRTFLMSCMGQWRTVLHYPGCRRVSENSEPLRIERGIFQGDSLSPLWFCLALNPLSTLLEGSGLGYRLRREGQVISHLLYMDDLKLFASNNLQLMELLKVTETFSSAIRMEFGLDKCAVMHVKRGEIMESVGTQLSDSIHLRSLCSTETYKYLGMSEALGINAADVKQSLRERFFGRLNKVLKSLLSGGNKVRAFNDWVMPVLMYSFGILKWTQTELDALDRRVRTLLTANRMHHPRSSVMRLYIPRKCGGRGFLNAKTLHNREVCSLREYFLETDVGMHRDVVAVDKGLTPLSLANENWRKPIVMDTNERKEVWKGKELHGRFYRALHGPDVDLLASVSWLRFGDLFGETEGFVFAIMDEVMMTNNYRKYIVKDGTVDICRACHRPGESIRHIISGCSHLANGDYLHRHNLVARIIHQQLALKYNLVESEVPYYRYVPDPVLENGSVTLYWDRSIITDRTIVANKPDIVVIDRLERRTMIVDIAVPHDENLVKAEKDKQTKYLDLAREVVDMWEVDRAIIVPIVVTANGLIAKSLDQHLRRLSLGSWIKGLIQKAVLLDTARIVRRFLSQEP

SEQ ID NO: 12025 - protein, 1046 aa, Mythimna ferrago
MLDDAVLDRLRLESRNGRVSPVSPPAAVQLQPSVSPRPDHVGEDDDDGAISVSTQCNARLRSALEDAFREYRSIPPELRPRLPRLPMHRKNRALVCALDSQLSNCFDSSEDLTDTHSILYCAAAAACRVAHVKIPNSDRATRPVKPAWQCRIERRIGEARALIGKLICFREGNTRPRVMRFVRRAFSGTDVSPRDYLPRITERIDFLRQKVYAWANRIRRYKRRVERYTQNRAFQSNERWVYRAWERPDQSVIDTRLPDDDAMYSFWRSIWSVPVSHTEGDWTRGVERECELIPEMGAITISPQDVARAVRPLPNWKSPGPDGLHNFWLKWFKSSHARLASQFQSALESGSLPQFLTTGITHLLHKSGSTAEPKNYRPITCLPTVYKVLTSILSAKINSHIETNSIMSASQNGCRNGSRGTKELLLIDVAISQQVRRSRRDLSTCWIDYKKAYDSVPHTWLMRVLELYKIDVTLRTFLMSCMGQWRTVLHYPGCRRVSENSEPLRIERGIFQGDSLSPLWFCLALNPLSTLLEGSGLGYRLRREGQVISHLLYMDDLKLFASNNLQLMELLKVTETFSSAIRMEFGLDKCAVMHVKRGEIMESVGTQLSDSIHLRSLSSTETYKYLGMSEALGINAADVKQSLRERFFCRLNKVLKNLLSGGNKVRAFNGWVMPVLMYSFGILKWTQTELDALDRRVRTLLTANRMHHPRSSVMRLYIPRKCGGRGFLNTKTLHNREVCSLREYFLETDVGMHRDVVAVDKGLTPLSLASENWRKPIVMDTNERKEVWKGKELHGRFYRALHGPDVDLLTSVSWLRFGNLFGETEGFVFAIMDEVMMTNNYRKYIVKDGTVDICRACHRPGESIRHIISGCSHLANGDYLHRHNLVARIIHQQLALKYNLVESEVPYYRYVPDPVLENGSVTLYWDRSIITDRTIVANKPDIVVIDRLERRTMIVDIAVPHDENLVKAEKDKQTKYLDLAREVVDMWEVDRAIIVPIVVTANGLIAKSLDQHLRRLSLGSWIKGLIQKAVLLDTARIVRRFLSQEP

SEQ ID NO: 12026 - protein, 1200 aa, Mythimna ferrago
MLTRAAARRARPPPPASSLSSASPPPEPSPIVSAVTPAVAAASSSSDEYYSPPTTPPPTRRRGGRRPPDCLGPRGPPASDRVPAPGGSVQRMRWTQSINENVMRSYYGATEGGNNLTAYRVRMLSLFQVLEPAVNVSAQRLSDQVRVILRNHMLDDTVLDRLRTEMSDRVITPPSQPVVPAVVPPSSYISFHTDEVSSDTVTNVSNQCNSELRSALECAIREYRNIPPELRPRIPRLPMCNKNRALVAALDSQLSNYFDDCEDLTDTHSIMYCAAVAACRVAHVKFPNSDVATRPKPAVPAWQCRIERRIGGARALIGKLICFREGNTRPRVMRFVRRAFSGTDISPRDYMSRVTERIDFLKQKVYAWANRIRRYKRRVERYTQNRTFRSNERWVYRAWERPDQGVTDARLPDDDAMSSFWRSIWSVPVSHTEGDWTREVERACDPIPQMGAIDISPQDVARAVRPLPNWKSPGPDGLHNFWIKWFTRSHARLAYQFQSALESGSLPQFLTTGITHLLHKSGSTAEPKNYRPITCLPTVYKVLTSILRSKINSHIDENSIMSPSQNGCRNGSRGTKELLLIDMTISQQVRRSRKDLSTCWIDYRKAYDSVPHTWLMRVLELYKIDTTLRTFLMSCMRQWSTVLRYPGCRNIQRNSEPVRIERGIFQGDSLSPLWFCLALNPLSTLLENSGLGYRLKRGGQVISHLLYMDDLKLFAPNNLQLMELLKVTEIFSSAIRMEFGVDKCAVMHVKRGEVVESVSTQLTDSINLRSLSPTETYKYLGMSEALGISITGMKQSLRERFFGRLKKVFNSLLSGGNKVRAFNGWVMPVLMYSFGVLKWTQTELDALDRRVRTLLTAYRMHHPRSSVMRLYIPRKCGGRGFLNAKTLHNREVCSLREYFLAADVGMHRDVVAVDKGLTPLSLANENWRKPIVLDTNDRREVWQSKELHGRFFRALHGPDVDQLASVAWLRFGDLFGETEGFACAIMDEVIMTNNYRRFIVKDGTVDICRACHRPGESIRHIISGCSRLANGEYLHRHNLVARIIHQQLALKYSLVESEVPYYRYEPDPVLDNGHITLYWDRPIITDRTIVANKPDIVVVDRSERRAMIVDISVPHDENLVKAEKDKQIKYIDLAREVVDMWEVDSAVIVPIVVSANGLIAKSLDQHLRRLSLGDWIKGLIQKAVLLDTARIVRRFLSLEP

SEQ ID NO: 12027 - protein, 1200 aa, Mythimna ferrago
MLTRAAARRARPPPLASSLSSASLPPEPSLTVSAVTPAAAAASSSSDEYYSPPTTPPPARRRGGRRPPACLGPRGPPVSDRVPAAGGSVPRMRWTQSTNENVMRAYYGATEGGNNLTAYRVRMLSLFQVLEPAANVSAQRLSDQVRVIQRNNMLDDTVLDRLRTEMSNRVITPPSQPVVPVVVPQSSHISLHTDEVSTDTVTNVSTQCNNELRSALECAIREYRNMPLELRPRLPRLPMHNKNKALVAALDSQLSNYFDDCEDLTDTHSIMYCAAVAACRVAHVKFPNSDVATRPKPAVPAWQYRIERRIGGARALIGKLICFREGNTRPRVMRFVRRAFSGTDISPRDYMSRVTERIDFLKQKVYAWANRIRRYKRRVERYIQNSTFRSNERWVYRAWERPDQGVTDTRPPDDDAMCSFWRNIWSVPVSHTEGGWTREVERACESVTEMGAITISPQDVARAVRPLPNWKSPGPDGLHNFWIKWLQRSHARLASQYQAALESGSLPEFLTTGVTHLLHKSSSTAEPKNYRPITCLPTVYKVLTSILRAKINHHVDNNAIMSASQNGCRNGSRGTKELLLIDMAISQQVRRSRKDLSTCWIDYKKAYDSVPHTWLMRVLELYKVDATLRTFLMSCMRQWRTVLRYPGCRNIQRNSEPVRIERGIFQGDSLSPLWFCLALNPLSTLLENSGLGYRLKRGGQVISHLLYMDDLKLFAPNNLQLMELLKVTETFSSAIRMEFGVDKCAVMHIKRGEIVESVGIQLSDSIHLRSLSPTETYKYLGMSEALGINATDMKQSLRERFFGRLKKVLNSLLSGGNKVRAFNGWVMPVLMYAFGVLKWTQTELDALDRRVRTLLTAYRMHHPRSSVMRLYIPRKCGGRGFLNAKSLHNREVCSLREYFLAADGGMHRDVVAVDKGLTPLSLANENWRKPVVLDTNVRREVWQSKELHGRFFRALHGPDVDQLASVAWLRVGDLFGETEGFVCAIMDEVIMTNNYRRFIVKDGTVDICRACHRPGESIRHIISGCSRLANGEYLHRHNLVARIIHQQLALKYSLVESEVPYYRYVPDPVLDSGDITLYWDRSIITDRTIVANKPDIVVVDRSERRAMIVDISVPHDENLAKAEKDKQIKYIDLAREVVDMWEVDSAIIVPIVVSANGLIAKSLDQHLRRLSLGDWIKGLIQKAVLLDTARIVRRFLSLEP

SEQ ID NO: 12028 - protein, 1198 aa, Mythimna ferrago
MLTRAAARRARLPAPASPLSSASPPPEPSPTVSAVTPAVAAASSSSDGYYSPPTTPPPTRRRGGRRPPACLGSRGPPASERVPATGGCVSRMRWTQSINENVMRAYFGATEGGNNLTAYRVRMLSLFQVLEPAVNVSAQRLSDQVRVIQRNHMLDDTVLDRLRTEMGSHAVTSSSQTVVPPQVSNHLSINADEEITDMVTHVSTQCNNELRSALECAIREYRNIPPELRPRIPRLPMCNKNRALVAALDSQLSNYFDDCEDLTDTHSIMYCAAVAACRVAHVKFPNTDVATRPKPAVPAWQCRIERRIGGARALIGKLICFREGNTRPRVMRFVRRAFSGTDISPQDYMSRVTERIDFLKQKVYAWANRIRRYKRRVERYIQNSTFRSNERWVYRTWERPDQGVTDTHLPDDDAMCSFWRNIWSVPVSHTEGGWTREVERACESITEMGAITISPQDVARAVRPLPNWKSPGPDGLHNFWIKWLQRSHARLASQYQTALESGSLPEFLTTGVTHLLHKSGSTAEPKNYRPITCLPTVYKVLTSILRAKINNHVDNNAIMSASQNGCRNGSRGTKELLLIDMAISQQVRRSRKDLSTCWIDYKKAYDSVPHTWLMRVLELYKVDATLCTFLMSCMRQWRTVLRYPGCRNIQRNSEPLRIERGIFQGDSLSPLWFCLALNPLSTLLENSGLGYRLKRGGQVISHLLYMDDLKLFAPNNLQLMELLKVTETFSSAIRMEFGVDKCAVMHIKRGEIVESVGTQLSDSIHLRSLSPTETYKYLGMSEALGINATDMKQSLKERFFGRLKKVLNSLLSGGNKVRAFNGWVMPVLMYAFGVLKWTQTELDALDRKVRTLLTAYRMHHPRSSVMRLYIPRKCGGRGFLNAKTLHNREVCSLREYFLAADVGMHRDVVAVDKGLTPLSLANENWRKPVVLDTNVRKEVWQSKELHGRFFRALHGPDVDQLASVAWLRAGDLFGETEGFVCAIMDEVIMTNNYRRFIVKDGTVDICRACHRPGESIRHIISGCSRLANGEYLHRHNLVARIIHQQLALKYSLVESEVPYYRYVPDPVLDSGDITLYWDRSIITDRTIVANKPDIVVVDRSERRSMIVDISVPHDENLVKAEKDKQIKYIDLAREVVDMWEVDSAIIVPIVVSANGLIAKSLDQHLRRLSLGDWIKGLIQKAVLLDTARIVRRFLSLEP

SEQ ID NO: 12029 - protein, 1200 aa, Mythimna ferrago
MLTRSRAQQLNTHLTTSGSSLSSASQPPGPAPAVSPEIPVAAVASSSSDEYFSPPTTPPPTRRRGRGRPPACLGPRGPPASDRVPAAGGSVQRMRWTQSINENVMRSYFGATEGGTNLTAYRGRMLSLFQVLEPAVNVSAQRLSDQVRVIQRNRMLDDAVLDRLRLESRNGRVSPVSPPAAVQRQLSVSPRPDHVGEDDDDGAISVSTQCNARLRSALEDAFREYRSIPPELRPRLPRLPMHRKNRALVCALDSQLSNCFDSSEDLTDTHSILYCAAAAACRVAHVKIPNSDRATRPAKPAWQCRIERRIGEARALIGKLICFREGNTRPRVMRFVRRAFSGTDISPRDYLPRITERIDFLRQKVYAWANRIRRYKRRVERYTQNRAFQSNERWVYRAWERPDQSVIDTHLPDDDAMYSFWRSIWSVPVNHTEGDWTREVERECELIPEMGAITISPQDVARAVRPLPNWKSPGPEGLHNFWLKWFKSSHARLASQFQSALESGSLPQFLTTGITHLLYKSGSTAEPKNYRPITCLPTVYKVLTSILRAKINSHIETNSIMSASQNGCRNGSRGTKELLLIDVAISQQVRRSRRDLSTCWIDYKKAYDSVPHTWLMRVLELYKIDVTLRTFLMSCMGQWRTVLHYPGCRRVSENSEPLRIERGIFQGDSLSPLWFCLALNPLSTLLEGSGLGYRLRREGQVISHLLYMDDLKLFASNNLQLMELLKVTETFSSAIRMEFGLDKCAVMHVKRGEIMESVGTQLSDSIHLRSLCSTETYKYLGMSEALGINAADVKQSLRERFFGRLNKVLKSLLSGGNKVRAFNGWVMPVLMYSFGILKWTQTELDALDRRVRTLLTANRMHHPRSSVMRLYIPRKCGGRGFLNAKTLHNREVCSLREYFLETDVGMHRDVVAVDKGLTPLSLANENWRKPIVMDTNERKEVWKGKELHGRFYRALHGPDVDLLASVSWLRFGDLFGETEGFVFAIMDEVMMTNNYRKYIVKDGTVDICRACHRPGESIRHIISGCSHLANGDYLHRHNLVARIIHQQLALKYNLVESEVPYYRYVPDPVLENGSVTLYWDRSIITDRTIVANKPDIVVIDRLERRTMIVDIAVPHDENLVKAEKDKQTKYLDLAREVVDMWEMDRAIIVPIVVTANGLIAKSLDQHLRRLSLGSWIKGLIQKAVLLDTARIVRRFLSQEP

SEQ ID NO: 12030 - protein, 1046 aa, Mythimna ferrago
MLDDAVLDRLRLESRNGRVSPISPPAAVQRQPSVSPRPDHVGEDDDDGAISVSTQCNARLRSALEDAFREYRSIPPELRPRLPRLPMHRKNRALVCALDSQLSNCFDSSEDLTDTHSILYCAAAAACRVAHVKIPNNDRATRPAKPAWQCRIERRIGEARALIGKLICFREGNTRPRVMRFVRRAFSGTDISPRDYLPRITERIDFLKQKVYAWANRIRRYKRRVERYTQNHTFQSNERWVYRAWERPDQSVIDTRLPDDDAMYSFWRSIWSVPVNHTEGDWTREIERVCELVPEMGAINISPQDVARAIRPLPNWKSPGPDGLHNFWLKWFQSSHARLAFQFQSALESGSLPQFLTTGITHLLHKSGSTVEPKNYRPITCLPTVYKVLTSILRAKINNHIETNSIMSASQNGCRNGSRGTKELLLIDVAISQQVRRSRRDLSTFWIDYKKAYDSVPHTWLMRVLELYKVDATLRAFLMSCMGQWRTVLHYPGCRRVSENSEPLRIERGIFQGDSLSPLWFCLALNPLSTLLEGSGLGYRLRREGQVISHLLYMDDLKLFASNNLQLMELLKVTETFSSAIRMEFGLDKCAVMHVKRGEIMESVGTQLSDSIHLRSLCSTETYKYLGMSEALGINAADVKQSLRERFFGRLNKVLNSLLSGGNKVRAFNGWVMPVLMYSFGILKWTQTELNALDRRVRTLLTANRMHHPRSSVMRLYIPRKCGGRGFLNAKTLHNREVCSLREYFLETDVGMHRDVVAVDKGLTPLSLANENWRKPIVMDTNERKEVWKGKELHGRFYRALHGPDVDFLASVSWLRFGDLFGETEGFVFAIVDEVMMTNNYRKYIVKDGTVDICRACHRPGESIRHIISGCSHLANGDYLHRHNLVARIIHQQLALKYNLVESEVPYYRYVPDPVLENGSVTLYWDRSIITDRTIVANKPDIVVIDRLERRTMIVDIAVPHDENLVKAEKDKQTKYLDLAREVVDMWEVDRAIIVPIVVTANGLIAKSLDQHLRRLSLGSWIKGLIQKAVLLDTARIARRFLSQEP

SEQ ID NO: 12031 - protein, 1192 aa, Eilema sororculum
MLTRAQANRNRSAPTTSPDSSLSSAAQPPAVEPAASSSSSSDEFFSPPTSPTPVRRPGRGRPPTCLGPRRPPASNRAPATGGDVHRMRWTTSINENVMRAYFAATEGGTNLSAYRTRMLPLFQALEPSINVSAQRLSDQVRVIQRNRMLNETVLETLRLECLRNICVTPAPAPVPASTVEINDDTCVAPDDTPIPVSIQYNEEIKEALEYALREYRSMPVHVRPRLPRLPIHRRNIALVSALDSLLPIYLENSENLGDTHSILYCTAVAACRMAGAKFPNKDPAIRPKPAIPAWQCRIERRVAEARVLIGKLICFRSGNTRPRVMRYVTRAFAGTDISPQDYTSRVTERIDFLKQKVYAWANRIRRYKKRVDRYTVNRMFQRDQRWVYRSWERTEESVDDVRRPDAEATNAFWRSIWSVPVNHTEGDWMREVERACETIPEMEKINIDAIDVDCAVRSLSNWKSPGPDGLHNFWLKWLRSSHVVLASQFQSSVESGTLPAFMTTGVTHLLHKTGSTLEPNNYRPITCLPTVYKLLTSILRAKINNHINNNSIMCASQNGFRNGARGTKELLLIDMAISQQARRNRKDLTACWIDYKKAFDSVPHTWLLRVLELYKVNTTLCTFLRSCMGQWRTVLFYPGCRQALDSGEPITIERGIFQGDSLSPLWFCLALNPLSTLLVNSGLGYRLRREGQMVSHLFYMDDLKLFAHTNPQLIALLKVTETFSNSNKMAFGVDKCAVIHVKRGRVVESEGIQLSDSTNLRSLLVTETYKYLGMSQALCINEVDMKQMLQERFFGRLKKVLNSLLSGGNKVRACNSWVMPLLMYSFGILKWTQTELDTIDRKVRTQLTAFRMHHPRSSVMRLYIPRKCGGRGFLNAKTLHNREVCNLRDYFLKSNVDMHRDVVNVDTGLTPLGLAKENWRRPTIVGTDSRREVWQSKELHGRFYRALHRPEVDLLASVSWLRFSDLFGETEGFVCAIADEVIKTNNYRKYIMRDGTIDICRACHQPGESLRHITSGCSRLANGEYLHRHNQVARIIHQRLALKYNLVEIEVPYYRYVPEPVLENSHITLYWDRSIITDRTVVANKPDIVVIDRSERRALIVDVTIPHDENLVKAEKDKQVKYLDLAHEVVDMWNVDSAIIVPIVVSVNGLIAQSLDQHLKRLGLDGWVKGQMQKAVLLDTARIVRKFLSLEP

SEQ ID NO: 12032 - protein, 1072 aa, Eilema sororculum
MVYNKVYNNYNNKQRLSDQVRVIQRNHMLNETVLETLRQECLRNICVTPALAPAPASTTALNEDSHVTRDDTPIPVSIQYNEEIKEALEYALREYRSMPIHVRPRLPRLPIHRRNIALVSALDSLLPKYLENSENLGDTHSILYCTAVAACRMAGAKFPIKDPAIRPKPAIPAWQCRIERRVAEARVLIGKLICFRSGNTRPRVMRYVTRAFAGTNISPQDYTSRVTERIDFLKQKVCAWANRIRRYKKRVDRYTVNRMFQRDQRWVYRSWERTDESVDDLRRPDAEATNAFWRSIWSVPVSHTEGDWMREVERACETIPEMEEIYIDATDVDCAVRSLSNWKSPGPDGLHNFWLKWLRSSHVVLASQFQSAIESGTLPAFMTTGVTHLLHKTGSTLEPNNYRPITCLPTVYKLLTSILRAKINNHINNNSIMCTSQNGCRNGARGTKELLLIDMTISQQARRNRKDLVACWIDNKKAFDSVPHTWLLRVLELYKVNTTLCTFLRSCMGQWRTVLLYPGCRQALGSGEPITIERGIFQGDSLSPLWFCLALNPLSTLLVNSGLGYRLRREGQMVSHLFYMDDLKLFAHTNPQLIALLKVTETFSNSIKMAFGVDKCAVIHVKRGRVVESEGIQLSDSTNLRSLLVTETYKYLGMSQALCINEVGMKQMLQERFFGRLKKVLNSLLSGGNKVRACNSWVMPLLMYSFGILKWTQTELDTIDRKVRTQLTAFRMHHPRSSVMRLYIPRKCGGRGFLNAKTLHNREVCNLRDYFLKSNVDMHRDVVNVDTGLTPLGLAKENWRRPTIVGTDSRREVWQSKELHGRFYRALHRPEVDLLASVSWLRFGDLFGETEGFVCAIADEVIKTNNYRKYIMRDGTIDICRACHQPGESLRHITSGCSRLANGEYLHRHNQVARIIHQRLALKYNLVEVEVPYYRYVPEPVLENSHITLYWDRSIITDRTVVANKPDIVVIDRSERRALIVDVTIPHDENLVKAEKDKQVKYLDLAHEVVDMWNVDSAIIVPIVVSVNGLIAKSLDQHLKRLGLDGWVKGQMQKAVLLDTARIVRKFLSLEP

SEQ ID NO: 12033 - protein, 1056 aa, Eilema sororculum
MFYFFIYVFKNVINKFNNEIKRIIINNNICVTPAPAPAPASTAERNDDTRVAPDDTPIPVSIQYNEEIKEALECALREYRSMPVHVRPRLPRLPIHRRNIALVSALDSLLPRYLENSENLGDTHSILYCTAVAACRMAGAKFPIKDPAIRPKFTIPAWQCRIERRVAEARVLIGKLICFRSGNTRPRVMRYVTRAFAGTDISPQDYTSRVTERIDFLKQKVCAWANRIRRYKKRVDRYTVNRMFQRDQRWVYRSWERTDESVDDVRRPDAEATNAFWRSIWSVPVSHTEGDWMREVERACETIPEMEEIYIDATDVDCAVRSLSNWKSPGPDGLHNFWLKWLRSSHVVLASQFQSAIESGTLPAFMTTGVTHLLHKTGSTLEPNNYRPITCLPTVYKLLTSILRAKINNHINNNSIMCASQNGCRNGARGTKELLLIDMAISQQARRNRKDLTACWIDYKKAFDSVPHTWLLRVLELYKVNTTLCTFLRSCMRQWRTVLFYPGCRQALGGGVPITIERGIFQGDSLSPLWFCLALNPLSTLLVNSGLGYRLRREGQMVSHLFYMDDLKLFAHTNPQLIALLKVTETFSNSIKMAFGVDKCAVIHVKRGRVVESEGIQLSDSTNLRSLLVTETYKYLGMSQALCINEVDMKQLLQERFFGRLKKVLNSLLSGGNKVRACNSWVMPLLMYSFGILKWTQTELDTIDRKVRTQLTAFRMHHPRSSVMRLYIPRKCGGRGFLNAKTLHNREVCNLRDYFLKSNVDMHRDVVNVDTGLTPLGLAKENWRRPTIVSTDSRREVWQSKELHGRFYRALHRPEVDLLASVAWLRFSDLFGETEGFVCAIADEVIKTNNYRKYIMRDGTIDICRACHQPGESLRHITSGCSRLANGEYLHRHNQVARIIHQRLALKYNLVEVEVPYYRYVPEPVQENSHITLYWDRSIITDRTVVANKPDIVVIDRSERRALIVDVTIPHDENLVKAETDKQVKYLDLAHEVVDMWNVDSAIIVPIVVSVNGLIAKSLDQHLKRLGLDGWVKGQMQKAVLLDTARIVRKFLSLEP

SEQ ID NO: 12034 - protein, 1193 aa, Eilema sororculum
MLTRAKARQFAHPTPSDSSCSSASQPPETTSSRPTTAEASSSDEYFSPPTSPTPVRRPGRGRPPSSLGFRGPPASNRAPAAGGDVHRMRWTTSINENVMRAYFAATEGGTNLSAYRSRMLPLFQALEPSVNTSAQRLSDQVRVIQRNHLLNETVLETLRQECLRNMCVTPAPAPAPASTTALNEDSHVTRDDTPIPVSIQYNEEIKEALEYALREYRSMPIHVRPRLPRLPIHRRNIALVSALDSLLPKYLENSENLGDTHSILYCTAVAACRMAGAKFPIKDPAIRPKPAIPAWQCRIERRVAEARVLFGKLICFRSGNTRPRVMRYVTRAFAGTNISPQDYTSRVTERIDFLKQKVCAWANRIRRYKKRVDRYTVNRMFQRDQRWVYRNWERTDESVDDVRRPDAEATNAFWRSIWSVPVSHTEGDWMREVERACEPIPEMEEIYIDATDVDCAVRSLSNWKSPGPDGLHNFWLKWLRSSHVVLASQFQSAVESGTLPVFMTTGVTHLLHKTGSTLEPNNYRPITCLPTVYKLLTSILRAKINNHINNNSIMCGSQNGCRNGARGTKELLLIDMTISQQARRNRKDLAACWIDYKKAFDSVPHTWLLRVLELYKVNTTLCTFLRSCMGQWRTVLFYPGCRQALGSGEPITIERGIFQGDSLSPLWFCLALNPLSTLLVNSGLGYRLRREGQMVSHLFYMDDLKLFAHTNPQLIALLKVTETFSNSIKMAFGVDKCAVIHVKRGRVVESEGIQLSDSTNLRSLLVTETYKYLGMSQALCIKEVNMKQMLQERFFGRLKKVLNSLLSGGNKVRACNSWVMPLLMYSFGILKWTQTELDTIDRKVRTQLTAFRMHHPRSSVMRLYIPRKCGGRGFLNAKTLHNREVCNLRDYFLKSNVEMHRDVVNVDTGLTPLGLAKENWRRPTIVGTDSRREVWQSKELHGRFYRALHRPEVDLLASVSWLRFSDLFGETEGFVCAIADEVIKTNNYRKYIMRDGTIDICRACHQPGESLRHITSGCSRLANGEYLHRHNQVARIIHQRLALKYNLVEVEVPYYRYVPEPVLENSHITLYWDRSIITDRTVVANKPDIVVIDRSERRALIVDVTIPHDENLVKAEKDKQVKYLDLAHEVVDMWNVDSAIIVPIVVSVNGLIAKSLDQHLKRLGLDGWVKGQMQKAVLLDTARIVRKFLSLEP

SEQ ID NO: 12035 - protein, 1192 aa, Eilema sororculum
MLTRAQAKRNGSAPITSPDSSLSSAAQPPTVEPAASSSSSSDEFFSPPTSPTPVRRPGRGRPPTCLGPRRPPASNGAPATGGDVHRMRWTNSINENVMRAYFAATEGGTNLSAYRTRMLPLFQALEPSINVSAQRLSDQVRVIQRNRMLNETVLETLRLECLRNICVTPAPVPVPASTVELNDDTCVAPDDTPIPVSIQYNEEIKEALECALREYRSMPVHVRPRLPRLPIHRRNIALVSALDSLLPRYLENSENLGDTHSILYCTAVAACRMAGAKFPIKDPAIRPKSAIPAWQCRIERRVTEARVLIGKLICFRSGNTRPRVMRYVTRAFAGTDISPQDYTSRVTERIDFLKQKVYAWANRIRRYKKRVDRYTVNRMFQRDQRWVYRSWERTEESVDDVRRPDAEVTNAFWRSIWSEPVSHTEGDWMHEVKRACETIPEMEEINIDAIDVDCTVRSLSNWKSPGPDGLHNFWLKWLRSSHVVLASQFQSAVESGTLPAFMTTGVTHLLHKTGSTLEPNNYRPITCLPTVYKLLTSILRAKITNHINNNSIMCASQNGCRNGARGTKELLLIDMAISQQARRNRKDLTACWIDYKKAFDSVPHTWLLRVLELYKVNTTLCTFLRSCMGQWRTVLFYPGCRQALGGGVPITIERGIFQGDSLSPLWFCLALNPLSTLLVNSGLGYRLRREGQMVSHLFYMDDLKLFAHTNPQLITLLKITETFSNSIKMAFGVDKCAVIHVKRGRVVESEGIQLSDSTNLRSLLVTETYKYLGMSQALCINEVDMKQMLQERFFGRLKKVLNSLLSGGNKVRACNSWVMPLLMYSFGILKWTQTELDTIDRKVRTQLTAFRMHHPRSSVMRLYIPRKCGGRGFLNAKTLHNREVCNLRDYFLKSNVDMHRDVVNVDTGLTPLGLAKENWRRPTIVSTDSRREVWQSKELHGRFYRALHRPEVDLLASVSWLRFSDLFGETEGFVCAIADEVIKTNNYRKYIMRDGTIDVCRACHQPGESLRHITSGCSRLANGEYLHRHNQVARIIHQRLALKYNLVEVEVPYYRYVPEPVLENSHITLYWDRSIITDRTVIANKPDIVVIDRSERRALIVDVTIPHDENLVKAEKDKQVKYLDLAHEVVDMWNVDSAINLPIVVSVNGLIAKSLDQHLKRLGLDGWVKGQMQKAVLLDTARIVRKFLSLEP

SEQ ID NO: 12036 - protein, 1191 aa, Eilema sororculum
MLTRAQARNRNAQTTSPDSSLSSAAQPPAMEPAASSSSSSDEFFSPPTSPTPVRRPGRGRPPTCLGPRRPPASNRAPAAGGNVHRMRWTNSINENVMRAYFAATEGGTNLSAYRTRMLPLFQALEPSINTSAQRLSDQVRVIQRNRMLNETVLETLRQECLRNICVTPAPAPAPASTAEINNDTYVAPDDTPIPVSIQYNEEIKEALECALREYRSVPVHVRPRLPRMPIHRRNIALVSALDSLLPRYLENSENLGDTHSILYCTAVAACRMAGAKFPIKDPAIRPKSAIPAWQCRIERRVAEARVLIGKLICFRSGNTRPRVMRYVTRAFAGTDISPQDYTSRVTERIDFLKQKVYAWANRIRRYKRRVDRYTVNHMFQRDQRWVYRSWERTDESVDDVRRPDAEATNAFWRSIWSVPVSHTEGDWMREVERACETIPEMEEIYIDATDVDCAVRSLSNWKSPGPDGLHNFWLKWLRSSHVVLASQFQSAIESGTLPAFMTTGVTHLLHKTGSTLEPNNYRPITCLPTVYKLLTSILRAKINNHINNNSIMCASQNGCRNGARGTKELLLIDMAISQQARRNRKDLTACWIDYKKAFDSVPHTWLLRVLELYKVNTTLCTFLRSCMGQWRTVLFYPGCRQALGGGVPITIERGIFQGDSLSPLWFCLALNPLSTLLVNSGLGYRLRREGQMVSHLFYMDDLKLFAHTNPQLIALLKVTETFSNSIKMAFGVDKCAVIHVKRGRVVESEGIQLSDSTNLRSLLVTETYKYLGMSQALCINEVDMKQMLQERFFGHLKKVLNSLLSGGNKVRACNSWVMPLLMYSFGILRWTQTELDTIDRKVRTQLTAFRMHHPRSSVMRLYIPRKCGGRGFLNAKTLHNREVCNLRDYFLKSNVDMHRDVVNVDTGLTPLGLAKENWRRPTIVSTDSRREVWQSKELHGRFYRALHRPEVDLLASVSWLRFSDLFGETEGFVCAIADEVIKTNNYRRYIMRDGTIDICRACHQPGESLRHITSGCSRLANGEYLHRHNQVARIIHQRLALKYNLVEVEVPYYRYVPEPVLENSHITLYWDRSIITDRTVVANKPDIVVIDRSERRALIVDVTIPHDENLVKAEKDKQVKYLDLAHEVVDMWNVDSAIIVPIVVSVNGLIAKSLDQHLKRLGLDGWVKGQMQKAVLLDTARIVRKFLSLEP

SEQ ID NO: 12037 - protein, 975 aa, Ptilodon capucinus
MPNHLRPRIPRLPMHKGNRALVGALDSLLSIYFDSSDDLVDTHSILYCAAITVCRVARVKVFNTDTTTRPKPAVPAWQCRIERRISEARALIGKLSCFREGNTRPRVMRFVKRAFAGTDVSPREYISRVTERIDFLKQKIYAWANRIRRYKARVDRYSQNSMFQRDQRWVYRSWERPNEPVSELQRPDDNAMTTFWRDIWSVPVTHYEGNWIGDVERMCEPIKEMEAISIGPLDVANAVRSLPNWKAPGPDGLHNFWLKWLRSSHVRLASQFQSALQSGSLPEFITTGVTHLLHKTGSTTDPKNYRPITCLPTIYKTLTSILRAKIARHVEDNSIMSASQNGCRSGSRGTKELLLIDMAICQQARRNRKDLSTCWIDYKKAYDSVPHTWLVRVLELYKIDTTLRTFLESCMRQWKTVLLCPGSRQILGNGEPIRIERGIFQGDSLSPLWFCLALNPLSTLLEESGFGFRLRRGGQVISHLLYMDDLKLFAPTALQLSGLLKVTETFSNSIRMEFGVDKCAVMHAKQGRMVESEGIQLSDSIQLRSLAATETYKYLGMSQGLGISETDMKQLLRDRFLGRLKKVLKSLLSGGNKVRAYNGWVMPVLMYSFGILKWTQTELDALDRTVRTTLTAYRMHHPRSSVMRLYIPRKCGGRGFLNVKTLHNREICSLREYFLRADGEMHVDVVAVDNGLTPLSLAKENWRKPVVLTTDDRRVVWQGKELHGRYYRALHGPDVDLAASVAWLRFGDLFGETEGFVCAIMDEVVMTNNYRRYILRDGTIDICRACHRPGESLRHIISGCSRLANGQYLHRHNQVARIVHQQLALKYRLVTSEVPYYRYEPQPVLEEGHITLYWDRSIITDRTIVANKPDIVLIDRQERRAMIIDITVPHDENLVKAEKDKESKYLDLAHEVVDMWDIDAAIIVPIVVSAHGLLAKSLDKHLKRLALGSWIKGQIQKAVLLGTARIVRKFLSLEP

SEQ ID NO: 12038 - protein, 1198 aa, Agrochola circellaris
MLTRSATRRARLLPPDSSLSSASPPPVPSPTVSAGTTPAAAVASSSSDEYFSPPTTPPPARRRGGHRPPVGLGPRGPPASDRVPAPGGSVQRMRWTQSINENVMRSYYGATEGGNNLTAYRVRMLSLFQVLEPAVNVSAQRLSDQVRVILRNHMLDDTVLDRLRSEMRNSHATAPPSQTVMVAPQFTINQVDEGIDDMATNVSTQYNEELRSALERAIREYRSMSPELRPRLPRLPMHNKNRALVAALDSQLSNYFDDCEDLTDTHSILYCAAVAACRVAHVKFANDSRATRPKTAVPAWQCRIERRIGGARALIGKLICFREGNTRPRVMRFVRRAFSGTDISPEDYVSRATERIDFLKQKVYAWANRIRRYKRRVERYTQNRTFQSDERRVYRAWEQPDQGVADARLPDDDAMCSFWRSIWSAPVSHTEGDWTREVERACDPIPEMGAITICPQDVARAVRLLPNWKSPGPDGLHNFWIKWFKRSHARLAAQYQSALESGSLPEFLTTGVTHLLHKSGSTADPKNYRPITCLPTVYKVLTSILRAKINKHIDTNSIMSASQNGCRNGSRGTKELLLIDMTISQQVRRSRKDLSTCWIDYKKAYDSVPHTWLMRVLELYKVDATLRTFLLSCMGQWRTVLRYPGCRNIQRNSEPIRIERGIFQGDSLSPLWFCLALNPLSTLLEGSDLGYRLRRGGQVISHLLYMDDLKLFAPNNFQLMELLKVTETFSRAIRMEFGVDKCAVMHVKRGEIVESVGTQLTDSINFRALSASETYKYLGMSETLGINITDMKQSLKERFFGRLKKVFNSFLSGGNKVRAFNGWVMPVLMYSFGVLKWTQTELDALDRRVRTLLTGYRMHHPRSSVMRLYIPRKCGGRGFLNAKTLHNREICSLREYFLEADVGMHRDVVAVDKGLTPLSLAKENWRKPAVLDTNDRKEVWQNKELHGRYFRALHGPDVDLLASVAWLRFGDLFGETEGFVCAIMDEVMMTNNYRRFIVKDGTVDICRACHRPGESIRHIISGCSRLANEEYLHRHNLVARIIHQQLALKYSLVESEVPYYRYVPDPVLESGHITLYWDRSIITDRSIVANKPDIVVVDRAERRTMIIDITVPHDGNLVKAEKDKQIKYLDLAREVVDMWDVDSAIIVPIVVSANGLIAKSLDQHLRRLSLGGWIKGLIQKAVLLDTARIVRRFLSLEP

SEQ ID NO: 12039 - protein, 1204 aa, Agrochola circellaris
MLTRSRARRLIDTHPTPSDSSLSSASQLPDPAPDVSPVIPAAAAASSSSDEYFSPPTSPPPARRGRGRPPASLGLRGPPASDRVPAPGGSVRRMRWTQTVNENVMRAYFGATEGGSNLTAYRGRMLSLFQVLEPAVNVSAQRLSDQVRVIQRNHMLDDAVLDRLRLESRNNRVTPASPLVAVQQQNSLSATPRPDHVGEEVDDGVISVSSQCNAQLRNALEDAFREYRSTPPGLRPRLPRLPMHKKNKALVCTLDSLLSNYFDGSKDLADTHSILYCAAVAACRVAHVKFPSSDRAPRPKPAVPAWQCRIERRIGEARVLIGKLICFREGNTRPRVMRFVKRAFSGTDTSSRDYLTRVTERIDFLKQKICAWANRIRRYRRRVERYTQNRTFQSDERWVYRAWERLDQGVIDTRLPDDDAMCSFWRSLWSAPVNHTEGDWTGKIERACERIPEMGAINISPQDVACAVRPLPNWKSPGPDGLHNFWIKWLQRSHARLASQFQSALESGSLPQFLTTGITHLLHKSGSTAEPKNYRPITCLPTVYKVFTSILRTKINKHIDTNSIMSVSQNGCKNGSRGTKELLLIDMAINQQVRRSRRDLSTCWIDYKKAYDSVPHTWLMRVLELYKVDATLRTFLISCMGQWKTVLRYPGCRQIQRNSEPIRIERGIFQGDSLSPLWFCLALNPLSTLLEDSGLGYRLRRGGQVISHLLYMDDLKLFAPNNLQLVELLKVTETFSSAIRMEFGVDKCAVMHVKRGGIVESGGTQLPDSIHLRSLSSIETYKYLGMSEALGINTADMKQSLKERFFDRLNKVLNSLLSGGNKVRAFNGWVMPVLMYSFGILKRTQTELDALDRRVRTLLTVNRMHHPRSSVMRLYIPRKCGGRGFLNAKTLHNREVCSLREYFLETDVGMHRDVVSVDKGLTPLSLASENWRKPIVLDTNDRREVWQSKELHGRFYRALHGPDVDLLASVSWLRFGDLFGETEGFVFAIMDEVMMTNNYRKYIVKDGTVDICRACHRPGESIRHIISGCSRLANGDYLHRHNLVARIIHQQLALKYNLVESEVPYYKYVPDPVLENGNITLYWDRSIITDRTIVANKPDIVVIDRLERRTMIIDIAVPHDENLVKAEKDKQIKYLDLAREVVDMWDVDTAVIVPIVVTANGIIAKSLDQHLRRLSLGSWIKGLIQKAVLLDTARIVRRFLSQEP

SEQ ID NO: 12040 - protein, 1204 aa, Hydraecia micacea
MLTRSRARRLPNITHPTSSGSSLSSASQLPEPAPDVSPVSPAAAVASSSSDEYFSPPTTPPPVCRRGRGRPPASLGLRGPPASETVPAPGGSVQRMRWTQTVNENVMRAYFGATEGGSNLTAYRGRMLSLFQVLEPAVNVSAQRLSDQVRVIQRNHMLDNVVLDRLRLESRNSHVTPASSLVAVQLQPSVPLRPDCVDVEDDDEAISVSFQCNARLRSALEDAFREYRSIPPGLRPRLPRLPMHKKNKALVCALDSQLSNCFNDSKDLADTHSILYCAAVTACRVAHVKFPNSDRAPRPKPAVPAWQCRIECRIGEARALIGKLICFREGNTRPRVMRFVRRAFSGTDISSRDYLSRVTERIDFLKQKICAWANRIRRYRRRVERYTQNRRFQSDERWVYRAWERPDQGVTDTRLPDDDAMCSFWRNIWSVPVSHTEGDWTGKIERACDLIPEMEALIISPQDVARAVRPLPNWKSPGPDGLHNFWIKWFKRSHVRLASQFQSALESGSLPQFLTTGITHLLYKSGSTADPKNYRPITCLPTVYKVLTSILRAKINKHIDTNSIMSVSQNGCKNGSRGTKELLLIDMTINQQVRRSRKDLSTCWIDYKKAYDSVPHTWLMRVLELYKVDTTLCTFLMSCMGQWRTVLRYPVCQNIQRNSEPIRIERGIFQGDSLSPLWFCLALNPLSTLLEDSGLGYRLRRGGQVISHLLYMDDLKLFAPNNLQLMELLKITETFSSAIRMEFGVDKCAVMHVKRGEIVESVGNQLSDSTNLRALSASDTYKYLGMSEALGINVTDMKQSLKERFFGRLKKVFNSLLSGGNKVRAFNDWVIPVLMYSFGILKWTQTELDALDRKVRTLLTANRMHHPRSSVMRLYIPRKCGGRGFLNAKTLHNREICSLREYFLETDVGMHRDVVVVDNGLTPLSLGKENWRKPVVLDTNDRMEVWQSKELHGRFFRALHGPDVDLLASVAWLRFGDLFGETEGFVCAIMDEVMMTNNYRRFIVKDGTVDICRACHRPGESIRHIISGCSRPANGEYLHRHNLVARIIHQQLALKYSLVESEVPYYRYVPDPVLENGNITLYWDRSIITDRTIVANKPDIVVMDRLERRAMIVDITIPHDENLVKAEKDKQIKYLDLAREVVDMWDVDSAIIVPIVVTANGLIAKSLDQHLRRLSLASWIKGLIQKAVLLDTARIVRRFFSLEP

SEQ ID NO: 12041 - protein, 1203 aa, Hydraecia micacea
MLTRSRARRLPTTHPTSSGSSLSSASQLPEPAPDVSPVSPAAAVASSSSDEYFSPPTTPPPVCRRGRGRPPASLGLRGPPASERVPAPGGSVQRMRWTQTVNENVMRAYFGATEGGSNLTAYRGRMLSLFQVLEPAVNVSAQRLSDQVRVIQRNHMLDNVVLDRLRLESRNSHVTPASSLVAVQLQPSVPLRPDCVDIEDDDEAISVSSQCNARLRSALEDAFREYRSIPPGLRPRLPRLPMHKKNKALVCALDSQLSNCFNDSKDLADTHSILYCAAVAACRVAHVKFPNSDRAPRPKPAVPAWQCRIECRIGEARALIGKLICFREGNTRPRVMRFVRRAFSGTDISSRDYLSRVTERIDFLKQKICAWANRIRRYRRRVERYTQNRRFQSDERWVYRAWERPDQGVTDTRLPDDDAMCSFWRNIWSVPVSHTEGDWTGKIERACDLIPEMEALIISPQDVARAVRPLPNWKSPGPDGLHNFWIKWFKRSHDRLASQFQSALESGSLPQFLTTGITHLLYKSGSTADPKNYRPITCLPTVYKVLTSILRTKINKHIDTNSIMSFSQNGCKNGSRGTKELLLIDMTINQQVHRSRKDLSTCWIDYKKAYDSVPHTWLMRVLELYKVDTTLCTFLMSCMGQWRTVLRYPGCRNIQRNSEPIRIERGIFQGDSLSPLWFCLALNPLSTLLEDSGLGYRLRRGGQVISHLLYMDDLKLFAPNNLQLMELLKITETFSSAIRMEFGVDKCAVMHVKRGEIVESVGNQLSDSTNLRALSASDTYKYLGMSEALGINVTDMKQSLKERFFGRLKKVFNSLLSGGNKVRAFNDWVMPVLMYSFGILKWTQTELDALDRKVRTLLTANRMHHPRSSVMRLYIPRKCGGRGFLNAKTLHNREICSLREYFLETDVGMHRDVVVVDNGLTPLSLGKENWRKPVVLDTNDRMEVWQSKELHGRFFRALHGPDVDLLASVAWLRFGDLFGETEGFVCAIMDEVMMTNNYRRFIVKDGTVDICRACHRPGESIRHIISGCSRLANGEYLHRHNLVARIIHQQLALKYSLVESEVPYYRYVPDPVLENGNITLYWDRSIITDRTIVANKPDIVVMDRLERRAMIVDITIPHDENLVKAEKDKQIKYLDLAREVVDMWDVDSAIIVPIVVTANGLIAKSLDQHLRRLSLASWIKGLIQKAVLLDTARIVRRFLSLEP

SEQ ID NO: 12042 - protein, 1201 aa, Hydraecia micacea
MLTRSAAARRARLPPPDSSLSSASPPAPLVSSPTVSDVTAPAAAVASSSSDEYFSPPTTPPPARRRGGRRPPDSLGPRGPPASDRVPAPGGSVQRMRWTRSINENVMRSYYGATEGGSNLTAYRVRMLSLFQVLEPAVNVSAQRLSDQVRVIQRNHMLDDTVLDRLRNEIQSSHAIAPQSQTAVILPQSNTSHADEGSNDRATNVSTQCNEELSSALEDAIQEYRFMSPELRPRLPRLPMHNKNRALVAVLNSQLSKYFDDCEDLTDTHSILYCAAVAACRVAHVKFTNDSRATRPKPAVPAWQCRIERRIGGARALIGKLICFREGNTRPRVMRFVRRAFLGTDISPQDYTSCVTERIDFLKQKVYAWANRIRRYKRRVERYTQNRTFQSDERWVYRDWERPDQSVADTCLPDDDAMCSFWRSIWSVPVSHTEGDWARDVERACDPIPEMEAITICPQDVARAVRPLPNWKSPGPDGLHNFWIKWFSRSHARLASQFQTALESGSLPQFLTTGITHLLHKSGSTAEPKNYRPITCLPTVYKVLTSILRAKINKHIDTNFIMSASQNGCRNGSRGTKELLLIDMTISQQVRRFRKDLSTCWIDYKKAYDSVPHTWLMRVLELYKVDTTLRTFLMSCMGQWRTVLRYPGCRNIQRNSEPIRIERGIFQGDSLSPLWFCLALNPLSTLLEDSGLGYRLRRGGQVISHLLYMDDLKLFAPNNLQLMELLKVTQTFSNAIRMEFGVDKCAVMHVKRGEIVESVGNQLSDSTNLRALSASETYKYLGMSEALGINVTDMKQSLKERFFGRLKKVLNSLLSGGNKVRAFNGWVMPVLMYSFGILKWTQTELDALDRRVRTLLTANRMHHPRSSVMRLYIPRKCGGRGFLNSKTLHNREICSLREYFLETDVGMHRDVVMVDKGLTPLSLAKENWRKPVVLDTNDRMEVWQSKELHGRFFRALHGPDVDLLASVAWLRFGDLFGETEGFVCAIMDEVMMTNNYRRFIVKDGTVDICRACHRPGESIRHIISGCSRLANGEYLHRHNLVARIIHQQLALKYSLVESEVPYYRYVPDPVLENGNITLYWDRSIITDRTIVANKPDIVVVDRSERRAMIVDITVPHDENLVKAEKDKQIKYLDLAREVVDMWDVDSAIIVPIVVTANGLIAKSLDQHLRRLSLASWIKGLIQKAVLLDTARIVRRFLSLEP

SEQ ID NO: 12043 - protein, 1106 aa, Hydraecia micacea
MRWTRSINENVMRSYYGATEGGSNLTAYRVRMLSLFQVLEPAVNVSAQRLSDQVRVIQRNHMLDDTVLDRLRNEIQSSHAIAPQSQTAVILPQSNTSHADEGSNDRATNVSTQCNEELRSALEDAIQEYRFMSPELRPRLPRLPMHNKNRALVAVLNSQLSKYFDDCEDLTDTHSILYCAAVAACRVAHVKFTNDSRATRPKPAVPAWQCRIERRIGGARALIGKLICFREGNTRPRVMRFVRRAFLGTDISPQDYTSCVTERIDFLKQKVYAWANRIRRYKRRVERYTQNRTFQSDERWVYRDWERPDQSVADTCLPDDDAMCSFWRSIWSVPVSHTEGDWARDVERACDPIPEMEAITICPQDVARAVRPLPNWKSPGPDGLHNFWIKWFSRSHARLASQFQTALESGSLPQFLTTGITHLLHKSGSTAEPKNYRPITCLPTVYKVLTSILRAKINKHIDTNFIMSASQNGCRNGSRGTKELLLIDMTISQQVRRFRKDLSTCWIDYKKAYDSVPHTWLMRVLELYKVDTTLRTFLMSCMGQWRTVLRYPGCRNIQRNSEPIRIERGIFQGDSLSPLWFCLALNPLSTLLEDSGLGYRLRRGGQVISHLLYMDDLKLFAPNNLQLMELLKVTQTFSNAIRMEFGVDKCAVMHVKRGEIVESVGNQLSDSTNLRALSASETYKYLGMSEALGINVTDMKQSLKERFFGRLKKVLNSLLSGGNKVRAFNGWVMPVLMYSFGILKWTQTELDALDRRVRTLLTANRMHHPRSSVMRLYIPRKCGGRGFLNSKTLHNREICSLREYFLETDVGMHRDVVMVDKGLTPLSLAKENWRKPVVLDTNDRMEVWQSKELHGRFFRALHGPDVDLLASVAWLRFGDLFGETEGFVCAIMDEVMMTNNYRRFIVKDGTVDICRACHRPGESIRHIISGCSRLANGEYLHRHNLVARIIHQQLALKYSLVESEVPYYRYVPDPVLENGNITLYWDRSIITDRTIVANKPDIVVVDRSERRAMIVDITVPHDENLVKAEKDKQIKYLDLAREVVDMWDVDSAIIVPIVVTANGLIAKSLDQHLRRLSLASWIKGLIQKAVLLDTARIVRRFLSLEP

SEQ ID NO: 12044 - protein, 1206 aa, Amphipyra tragopoginis
MLTRSRAKAQNTRPPSSASSLSSASQPPEPASIVSDVTPAAAVASSSSDEYFSPATSPSPPPARRRGRGRPPTCLGPRGPPASDRVPAPGGSVQRMRWTQSMNENCMRAYFRATEGGTNLTAYRGRMLSLFQALEPAVNVSAQRLSDQMRVIQRDHRLDDAALDRLRSEMQNSHAAPLPSQIRTQTLVPPAVPLESNYADEEGEDRAISAGTQYSEIMRSALEDALWEFRSTPPELRPRLPRLPMHNKNRALVCALDSLLPNVFESSEDLGDTQSILYCAAVAACRVAHVKFPNDNRATRPKSAVPAWQCRIERRIDEARVLIGKLTCFREGNRRPRVMRFVRRAFSGTDIGPGEYAARVTERIDFLKQKVYAWANRIRRYRRRVDRYTQNRIFQSDQRWVYRTWERPDQGVSDTHLPDNDVMNAFWRNIWSVPVTHTEGDWMQEVQRACEPIQEMGAVTIGPQDVTSAVRPMPNWKSPGPDGLHNFWIKWLRSSHARLASQFQSSLESGSLPAFLTTGITHLLFKSGSTAEPKNYRPITCLPTVYKLLTSILRAKLNHHIDSNAIMCATQNGCKNGSRGTKELLLIDMAISQQVRRSRKDLSTCWIDYKKAYDSVPHTWLMRVMELYKVNATLRTFLMSCMGQWRTVLHYPGCRQIQGKGELIRIERGIFQGDSLSPLWFCLALNPLSTLLEGSGLGYRLRRGGQVISHLLYMDDLKLFAPNNLQLVELLKVTETFSNSIRMEFGVDKCAVMHVKRGRIMESVGTQLSDSIHLRSLSSTETYKYLGMSEALGINEADMKQSLRERFFGRLIKVLKSLLSGGNKVRAFNGWVMPVLMYSFGILRWTQTELDALDRRVRTLLTAYRMHHPRSSVMRLYIPRKCGGRGFLNAKTLHNREVCSLREYFSQADVGMHRDEVAVDKGLTPLSLAKENWRKPVVLDAKGRMEVWRSKELHGRFYRALHGPDVDFLASVAWLRFGDLFGETEGFVCAIMDEVMMTNNYRKYIVKDGTVDICRACHCPGESIRHIVSGCSRLANGEYLHRHNLVARIIHQQLALKYNLVDTEVPYYKYVPDPVLENGHVTLYWDRSIITDRTIVANKPDIVVIDRLERRTMIVDITVPHDENLVKAENDKKIKYLDLAREVVDMWDVDSAVIVPIVVTANGLIAKSLDQHLMRLSLGSWIKGLIQKAVLLDTARIVRKFLSLEP

SEQ ID NO: 12045 - protein, 1203 aa, Amphipyra tragopoginis
MLTRSRAKALITQPPPSASSLSSASQPPEPASIVSDVTPAAAVASSSSDEYFSPPTSPPPRRRGRGRPPASLGPRGPPASDRVPAAGGSVQRMRWTQSMNENCMRAYFGATEGGTNLTAYRGRMLSLFQALEPAVNVSAQRLSDQVRVIQRDHRLDDAALDRLRSEMQSSHVVPLQSQTAVQSQVTSVVAPRSIPADEESDDRATNVSTQSNEQLRSALELAIREYRSTLPDLRPRLPRLPMNNKNKALMCALDSLLSSYFDGSEDLADTHSILYCAAVAACRVAHVKVDNNDRATRPKPAVPAWQCRIERRIGEARALIGKLICFREGNTRPRVMRFVRRAFSGTDTCPRDYMSRVAERIDFLKQKVYAWANRIRRYRRRVERYTQNRMFQRDQRWVYRAWERPDQGVGDEHLPDDDAMNSFWRSIWSVPVSHTEGDWMRDVERVCEPILDMGAISISPQDVASAVRPLPNWKSPGPDGLHNFWLKWLRSSHARLAFQFQSSLETGTLPQFLTTGVTHLLHKSGSTAEPKNYRPITCLPTVYKLLTSILRCKISNHIENNSIMSASQNGCRNGSRGTKELLLIDMAISQQVRRSRKDLSTCWIDYKKAYDSVPHTWLLRVLELYKVNTTLCAFLTSCMGQWRTVLHYPGCRQIQGIGEPIRIERGIFQGDSLSPLWFCLALNPLSTLLEGSGLGYRLRRGGQVISHLLYMDDLKLFAPNNLQLLDLLKVTETFSNSIRMEFGVDKCAVMHVKRGRIMESVGTQLSDSIQLRSLSSTETYKYLGMSEALGINEADMKQSLRERFCGRLKKVLKSLLSGGNKVRAFNGWVMPVLMYSFGILKWTQTELDALDRRVRTLLTAYRMHHPRSSVMRLYIPRKCGGRGFLNAKTLHNREVCSLREYFSQADVGMHRDVVAVDKGLTPLSLAKENWRKPAVLDTNGRKDVWRSKELHGRFYRALHGPDVDFLASVAWLRFGDLFGETEGFVCAIMDEVMMTNNYRKYVVKDGTVDICRACHCPGESIRHIVSGCSRLANGEYLHRHNLVARIIHQQLTLKYNLVDAEVPYYKYVPDPVLENGHITLYWDRSIITDRTIVANKPDIVVIDRSERRAMIVDITVPHDENLVKAENDKKMKYLDLAHEVVDMWEIDSAVIVPIVVTANGLIAKSLDQHLMRLSLGSWIKGLIQRAVLLDTARIVRKFLSLEP

SEQ ID NO: 12046 - protein, 1198 aa, Amphipyra tragopoginis
MLTRARSKAARPPPPDSPLSSASQPPELGPPVTPAAAAASSSSDEYFSPPTSPTPVRRQGRHRPPTSLGPRGPPAPSRVLATGGCVQRMKWTQSINENVMRAYYGSTEGGTNLTAYRVRMLTLFQELEPAINVSAQRLSDQVRVIQRNHRLDDAALDRLRLEVQNSRVTPFPSQTAVHEVNINIVPPRSDYVDGDMDDRAVTVSSQYNDQLRSALEDAIREYRANPELRPRLPRLPMHNKNRALVCALDSLLSSYFESSEDLGDTHSILYCAAVAACRVANVKFNNSERATRPKPAVPAWQCRIERRIDGARALIGKLICFREGNTRPRVMRFVRRAFSGTGISPREYMSQVTERIDFLKQKVCAWASRIRRYKRRVERYTQNRMFQCDQRWVYRAWERPDQGVSDGRLPDDDAMNSFWRSIWSVPVIHTEGDWMRDIERACEPIEEMGEILISPQDVASAARPLPNWKSPGPDGLHNFWIKWLRSSHARLATQFQSSLESGSLPQFFTTGVTHLLHKSGSTAEPKNYRPITCLPTVYKLLTSILRSKINTHIENNSVMSSAQNGCRNESRGTKELLLIDMAISQQVRRSRKNLSTCWIDYKKAYDSVPHTWLMRVLELYKINATLRTFLMSCMGQWRTVLRYPGCRPIRESGEPIRIERGIFQGDSLSPLWFCLALNPLSTLLEGSGLGYPLRRGGQVVSHLLYMDDLKLFAPTKLQLVELLKVTETFSNSIRMEFGVDKCAVMHVRRGGIMESEGLQLSDSIHVRPLSANDTYKYLGMSEGLGISEADMKQSLRERFFGRLKKVLKSLLSGGNRVRAFNGWVMPVLMYSFGILKWTQTELDALDRRVRSLLTANRMHHPRSSVMRLYIPRKCGGRGLLNAKTLHNREVCSLREYFLHADAGMHRDVVAVDKGLTPLNLAKENWRKPVVLSTNDRREIWQSKELHGRFYRALHGPDVDFQASVSWLRFGDLFGETEGFVCAIMDEVIMTNNYRKYIVKDGTVDICRACHCPGESLRHIISGCSRLANGEYLHRHNQVARIIHQQLALKYNLVESEVPYYKYVPDPVLENGHITLYWDRSIITDRTIVANKPDIVVIDRSERRTMIVDVTIPHDENLVKAEKDKQIKYLDLAHEVVNMWDVDSATIVPIVVTANGLMAKSLDQHLKRLSLGGWIKGLIQKAVLLDTARIVRRFLSLEP

SEQ ID NO: 12047 - protein, 1205 aa, Amphipyra tragopoginis
MITRSQVRLQRTRPPSSASSLSSASQPPESSPTVSAVTPAAAVASSSSDEYFSPPTSPPPARRRGGRRPPDRLGLRGPLASDRVPAPGGSVTRMRWTKTINENAMRAYFGATEGGTNLTAYRSRMLSLFQVLEPTVNVSAQRLSDQVRAIQRGHMLDDTVLDRLRSEIQCSPVISSSPQAPGHISRNIPVTSPRLQQVVEEDDDRATVVSIQCNEQLRRALEDAMREYRSTRPEVRPRLPRLPMHRKNRALMCALDSLLSNYFDGSEDLGDTHSILYCAAVAACRVAHVKFINNERATRPKNAVPAWQCRIERRIAEARALIGKLVCFREGNTRPRVMRFVRRAFLGTDVSPREYMSRVTERIDFLKQKVYAWANRIRRYRRRVDRYNQNRMFRSDERWVYRTWERPDQGVDAAHLPDDDAMNSFWRSFWSVPVTHTEGDWMRDVERMCEPILDMGAITISPQDVAGAVRPLPNWKSPGPDGLHNFWLKWLRSSHARLASQFQSSLETGTLPQFLTTGVTHLLHKSGSTAEPKNYRPITCLPTVYKVLTSILRTKINSHIDNNSIISASQNGCRNGSRGTKELLLIDMAISQQVRRSRKDLSTCWIDYKKAFDSVPHTWLMRVLELYKVNTTLRTFLTSCMGQWRTVLHYPGCRQIQGRGEPIRIERGIFQGDSLSPLWFCLALNPLSTLLEGSGLGYRLRRGGQVISHLLYMDDLKLFAPNNLQLMELLKVTETFSNSIRMEFGVDKCAVMHVKRGGIMESVGTQLSDSIHLRSLSSTETYKYLGMSEALGINVTDMKQSLRERFYGRLKKVLKSLLSGGNKVRAFNGWVMPVLMYSFGILKWTQTELDALDRRVRSLLTAYRMHHPRSSVMRLYIPRKCGGRGFLNAKTLHNREVCSLREYFSQTSVGMHRDVVAVDKGFTPLSLAKENWRKPVVLDTNGRREVWRSKELHGRFYRALHGPDVDFLASVAWLRFGDLFGETEGFVCAIMDEVMMTSNYRKYIVKDGTVDICRACHCPGESIRHIVSGCSRLANGEYLHRHNLVARIIHQQLALKYNLVDAEVPYYKYVPDPVLENGHVTLYWDRSIITDRTIVANKPDIVVIDRSERLTMIVDIAVPHDENLVKAEKDKEIKYQDLAHEVVDMWNVDSAVVVPIVVTANGLIAKSLDQHLKRLSLGGWIKGLIQKAVLLDTARIVRKFLSLRP

SEQ ID NO: 12048 - protein, 1207 aa, Amphipyra tragopoginis
MLTRSRAKTLQRTHPTPSASSLSSASQPPEPASIVSDVTPAAAVASSSSDEYFSPATSPSPPPARRRGRGRPPTCLGPRGPPASDRVPAPGGSVQRMRWTQSMNENCMRAYFGATEGGTNLTAYRGRMLSLFRTLEPAVNVSAQRLSDQVRVIQRDHRLDDAALGRLRDEMQNSHATPPPSQIRTQPLVPPAVPLQPNHADEEEQDRAISAGTQYSEIMRSALEDALREFRSTPPELRPRLPRLPMHNKNRALVCALDSLLSNVLESSKDIVDTHSILYCAAVAACRVAHVKFPNDNRATRPKSTVPAWQCRIERRIDEARVLIGKLTCFREGNIRPRVMRFVRRAFSGTDVSPGEYVSRVTERIDFLKQKVYAWANRIRRYRRRVDRYTQNRIFQSDQRWVYRTWERPDQGVSDTHLPDNDVMNAFWRNIWSVPVTHTEGDWMQEVQRACEPIQEMGAVTIGPQDVTSAVRPMPNWKSPGPDGLHNFWIKWLRSSHARLASQFQSSLESGSLPSFLTTGVTHLLFKSGSTAEPKNYRPITCLPTVYKLLTSILRAKINNHIDNNAIMSDSQNGCRNGSRGTKELLLIDMAISQQVRRSRKDLSTCWIDYKKAYDSVPHAWLMRVLELYKINATLRTFLMPCMGQWRTVLHYPGCRQIQGNGELIRIERGIFQGDSLSPLWFCLALNPLSTLLEGSGLGYRLRRGGQVISHLLYMDDLKLFAPNNLQLVELLKVTETFSNSIRMEFGVDKCAVMHVKRGRIMESVGTQLSDAIRLRSLSSTETYKYLGMSEALGINEADMKQSLKERFFGRLIKVLKSLLSGGNRVRAFNGWVMPVLMYSFGILRWTQTELDALDRRVRTLLTAYRMHHPRSSVMRLYIPRKCGGRGFLNAKTLHNREVGSLREYFSQADVGMHRDVVAVDKGLTPLSLAKENWRKPVVLDTNGRREVWRSKELHGRFYRALHGPDVDFLASVAWLRYGDLFGETEGFVCAIMDEVMMTNNYRKYVVKDGTVDICRACHCPGESIRHIVSGCSRLANGEYLHRHNLVARIIHQQLALKYNLVDTEVPYYKYVPDPVLENGHVTLYWDRSIITDRTIVANKPDIVVIDRLERRTVIVDIAVPHDENLVKAENDKKIKYLDLAHEVVDMWDVDSAVIVPIVVTANGLIAKSLDQHLMRLSLGSWIKGLIQRAVLLDTARIVRKFLSLEP

SEQ ID NO: 12049 - protein, 1204 aa, Noctua pronuba
MITRSRAKQQKAHPPSPGSSLSSASQPPGRATSVSSVSPVAAVASSSSDEFFSPPSTPSPPRRRGRGRPPAGLGPRGQQAPNRVPAAGGNVSRMRWTQSINENVMRAYYGATEGGSNLTAYRGRMLSLFQVLEPGVSVSAQRLSDQVRVIQRNHMLDDTVLDRLRFDSRSNLVTPASPMIAVQLQNVSSAPPRSDHDGEEDDDEVISVSTQCNAQLRSALEGAFREYRSIPPELRPRLPRLPMHKKNKALVCALDSQLSTCFDSSKDLADTHSILYCGAVAACRVAHVKFPNNDRATRPKLAVPAWQRRIERRIGEARALIGKLICFREGNTRPRVMRFVRRAFSGTGISFRDYLARVTERIDFLKQKICAWANRIRRYKRRVERYTQNRTFQSDERWVYRAWERPDQGVTDTRLPDADAMCLFWRSIWSVPVSHTEGDWTREVEQACDPIPEMGAIIISPQDVACAVRPLPNWKSPGPDGLHNFWIKWFQRSHARLASQFQSALESGSLPQFLTTGITHLLHKSGSTAEPKNYRPITCLPTVYKVLTSILRAKINHHIDSNSIMSASQNGCRNGSRGTKELLLIDMAISQQVRRSRRDLSTCWIDYKKAYDSVPHTWLMRVLELYKVDATLRTFLKSCMGHWRTVLRYPGCRQIQGNSEPIRIERGIFQGDSLSPLWFCLALNPLSTLLEGSGLGYRLRRGGQVISHLLYMDDLKLFAPNNLQLMKLLKVTETFSSAIRMEFGVDKCAVMHVKRGEIMESVGTQLSDSIHLRSLSSTETYKYLGMSEALGINTTDMKQSLRERFFGRLNKVLGSLLSGGNKVRAFNGWVMPVLMYSFGILKWTQTELDALDRRVRALLTANRMHHPRSSVMRLYIPRKCGGRGFLNAKTLHNREVCSLREYFLEADVGMHRDVVSVDKGLTPLSLANENWRKPRVLDTNDRKEVWQGKELHGRFYRALHGPDVDFLASVSWLRFGDLFGETEGFVCAIMDEVMMTNNYRKYIVKDGTVDICRACHRPGESIRHIISGCSRLANGEYLHRHNLVARIIHQQLALKYNLVESEVPYYKYAPDPVLDDGNITLYWDRSIITDRTIVANKPDIVVIDRLERRAMIVDITVPHDENLVKAEKDKQFKYLDLAREVVDMWDVSTAVIVPIVVSANGLIAKSLDQHLRRLSLGSWIKRLIQKAVLLDTARIVRRFLSQEP

SEQ ID NO: 12050 - protein, 1111 aa, Noctua pronuba
MRWTQSINEQVMRAYYGATEGGSNLTAYRGRMLSLFQVLEPAVSVSAQRLSDQVRVIQRNHMLDDTVLDRLRSESRSNPVTPASPMIAVQLQSATSASPRSDHGGEEDDSEVISVSTQCNAQLRSALEGAFREYRSTPPELRPRLPRLPMHKKNKALMCALDSQLSNYFDSSKDLADTHSMLYCGAVAACRVAHVKFPNNDRATRPKLAVPAWQCRIERRIGEARALIGKLICFREGNTRPRVMRFVRRAFSGTDISFRDYLARVTERIDFLKQKICAWASRIRRYKRRVERYTQNRTFQSDERWVYRAWERPDQGVTDTHLPDDDAICSFWRSIWSVPVSHIEGDWTREVERACDPIPQMGAINISPQDVACAVRPLPNWKSPGPDGLHNFWIKWFQRSHVRLASQFQSALESGSLPQFLTTGITHLLHKSGSTAEPKNYRPITCLPTVYKVLTSILRAKINHHIDSNSIMSASQNGCRNGSRGTKELLLIDMAISQQVRRSRKNLSTCWIDYKKAYDSVPHTWLMRVLELYKVDATLRTFLMSCMGHWRTVLRYPGCRQIQGNSEPIRIERGIFQGDSLSPLWFCLALNPLSTLLEGSGLGYRLRRGGQVISHLLYMDDLKLFAPNNLQLMKLLKVTETFSSAISMEFGVDKCAVMHVKRGEIMESVGTQLSDSIQLRSLSSTDTYKYLGMSEALGINTADMKQSLRERFFGRLNKVLSSLLSGGNKVRAFNGWVMPVLMYSFGILKWTQSELDALDRRVRALLTANRMHHPRSSVMRLYIPRKCGGRGFLNAKTLHNREVCSLREYFLEADVGMHRDVVSVDKGLTPLSLANENWRKPRVLDTNDRKEVWQGKELHGRFYRALHGPDVDFLASVSWLRFGDLFGETEGFVCAIMDEVMMTNNYRKYIVKDGTVDICRACHRPGESIRHIISGCSRLANGEYLHRHNLVARIIHQQLALKYNLVESEVPYYKYAPDPVLDNGNITLYWDRSIITDRTIVANKPDIVVIDRLERRAMIVDITVPHDENLVKAEKDKQFKYLDLAREVVDMWDVNTAVIVPIVVSANGLIAKSLDQHLRRLALGSWIKGLIQKAVLLDTARIVRRFLSQEP

SEQ ID NO: 12051 - protein, 962 aa, Noctua pronuba
MHKKNKALMCALDSQLSNYFDSSKDLADTHSMLYCGAVAACRVAHVKFPNNDRATRPKLAVPAWQCRIERRIGEARALIGKLICFREGNTRPRVMRFVRRAFSGTDISFRDYLARVTERIDFLKQKICAWASRIRRYKRRVERYTQNRTFQSDERWVYRAWERPDQGVTDTHLPDDDAICSFWRSIWSVPVSHIEGDWTREVERACDPIPQMGAINISPQDVACAVRPLPNWKSPGPDGLHNFWIKWFQRSHVRLASQFQSALESGSLPQFLTTGITHLLHKSGSTAEPKNYRPITCLPTVYKVLTSILRAKINHHIDSNSIMSASQNGCRNGSRGTKELLLIDMAISQQVRRSRKNLSTCWIDYKKAYDSVPHTWLMRVLELYKVDATLRTFLMSCMGHWRTVLRYPGCRQIQGNGEPIRIERGIFQGDSLSPLWFCLALNPLSTLLEGSGLGYRLRRGGQVISHLLYMDDLKLFAPNNLQLMKLLKVTETFSSAISMEFGVDKCAVMHVKRGEIMESVGTQLSDSIQLRSLSSTDTYKYLGMSEALGINTADMKQSLRERFFGRLNKVLSSLLSGGNKVRAFNGWVMPVLMYSFGILKWTQSELDALDRRVRALLTANRMHHPRSSVMRLYIPRKCGGRGFLNAKTLHNREVCSLREYFLEADVGMHRDVVSVDKGLTPLSLANENWRKPRVLDTNDRKEVWQGKELHGRFYRALHGPDVDFLASVSWLRFGDLFGETEGFVCAIMDEVMMTNNYRKYIVKDGTVDICRACHRPGESIRHIISGCSRLANGEYLHRHNLVARIIHQQLALKYNLVESEVPYYKYAPDPVLDNGNITLYWDRSIITDRTIVANKPDIVVIDRLERRAMIVDITVPHDENLVKAEKDKQFKYLDLAREVVDMWDVNTAVIVPIVVSANGLIAKSLDQHLRRLALGSWIKGLIQKAVLLDTARIVRRFLSQEP

SEQ ID NO: 12052 - protein, 1204 aa, Noctua pronuba
MLTRLRAKQLAHPPSPGSSLSSASQPPGRATSVSTLSPVAAVASSSSDEFFSPPSTPPPPQRRRGRGRPPAGLGPRGQQAPNRVPAAGGNVSRMRWTQSINEQVMRAYYGATEGGGNLTAYRGRMLSLFQVLEPTVSVSAQRLSDQVRVIQRNHMLDDTVLDRLRSESRSNPVTPASPMIAGLLQSATSTSPRSDHGGEEDDSEVISVSTQCNAQLRSALEGAFREYRSTPPELRPRLPRLPMHKKNKALMSALDSQLSNYFDSSKDLADTHSMLYCGAVAACRVAHVKFPNNDRATRPKLAVPAWQCRIERRIGEARALIGKLICFREGNTRPRVMRFVRRAFSGIDITFRDYLARVTERIDFLKQKICAWASRIRRYKRRVERYTRNRTFQSDERWVYRAWERPDQGVTDTRLPDDDAMCLFWRSIWSVPVSHTEGDWTREVEQACDPIQEMGAIIISPQDVACAVRPLPNWKSPGPDGLHNFWIKWFQRSHACLASQFQLALESGSLPQFLTTGITHLLHKSGSTAEPKNYRPITCLPTVYKVLTSILRAKINQHIESNSIMSASQNGCRNGSRGTKELLLIDMAISQQVRRSRKDLSTCWIDYKKAYDSVPHTWLMRVLELYKVDATLRTFLMSCMRHWRTVLRYPGCRQIQRNSEPIRIERGIFQGDSLSPLWFCLALNPLSILLEGSGLGYRLRRGGQVISHLLYMDDLKLFAPNNLQLMKLLKVTETFSSAIRMEFGVDKCAVMHVKRGEIMESVGTQLSDSIHLRSLNSTETYKYLGMSEALGINTADMKQSLRERFFGRLNKVLGSLLSGGNKVRAFNGWVMPVLMYSFGILKWTQTELDALDRRVRALLTANRMHHPRSSVMRLYIPRKCGGRGFLNAKTLHNREVCSLREYFLEADVGMHRDVVSVDKGLTPLSLANENWRKPKVLVTNDRKEVWQGKELHGRFYRALHGPDVDFLASVSWLRFGDLFGETEGFVCAIMDEVMMTNNYRKYIVKDGTVDICRACHRPGESIRHIISGCSRLANGEYLHRHNLVARIIHQQLALKYNLVQSEVPYYKYAPDPVLDDGNITLYWDRPIVTDRTIVANKPDIVVIDRLERRAMIVDITVPHDENLVKAEKDKQFKYLDLAREVVDMWDVNTAVIVPIVVSANGLIAKSLDQHLRRLALGSWIKGLIQKAVLLDTARIVRRFLSQEP

SEQ ID NO: 12053 - protein, 870 aa, Noctua pronuba
MRFVRRAFSGTDISPREYMSRVTERIDFLKQKVYAWANRIRRYRRRVDRYTQNRMFQSDERWVYRTWERPVTIQGVTDAHLPENDAMSAFWRSIWSVPVSHTEGDWMRVVEQACDSIPEMEAISISPLDVARAVRPLPNWKSPGPDGLHNFWIKWLQRSHACLASQFQSSLETGSLPSFFTTGVTHLLHKSGSTAEPKNYRPITCLPTVYKVLTSILRAKIVRHIDSNSIMSVSQNGCRNGSRGTKELLLIDMAISQQVRRSRRDLSTCWIDYKKAYDSVPHTWLRRVLELYKIDATLRTFLVSCMGQWSTVLLYPGCRQVLGNDEPIRIERGIFQGDSLSPLWFCLALNPLSTLLEDSGLGYRLRRGGQVISHLLYMDDLKIFAPGNLQLMELLKVTETFSSAIRMEFGLDKCAVMHVKRGEIMESVGTQLSDSICLRSLSSTETYKYLGMSEALGINAADMKQSLKERFFGRLSKVLKSLLSGGNKVRAFNGWVMPVLMYSYGILKWTQTELDALDRKVRTLLTANRMHHPRSSVMRLYIPRKCGGRGFLNAKTLHNREICSLREYFLETDVGMHRDVVSVDKGLTPLSLVNENWRKPVVLDTNDRKEVWQSKELHGRFFRALHGPDVDLLASVSWLRFGDLFGETEGFVCAIMDEVIMTNNYRKYIVKDGTVDICRACHRPGESIRHIVSGCSRLANGEYLHRHNLVARIIHQQLALQYNLVGTEVPYYKYVPDPVLENGHATLYWDRSIITDRTILANKPDIVVIDRRERRAMIVDITVPHDENLVKAENDKKIKYLDLAHEVVDMWDVDSAIIVPIVVTVNGLIAKSLDQHLWRLSLRGWIKGLIQKAVLLDTARIVRRFLSLEP

SEQ ID NO: 12054 - protein, 868 aa, Spilosoma lubricipeda
MRFVKQAFLGTTVSPQQYMSCVTERIDFLKQKVYAWANRIRRYRKRTDRYNQNRTFQRNEKWVYQKWEKLSPCMSDEHLPDKNATNYFWRNIWSTPVTHTEGHWCRDVERSCESITPMEPVRIDKEDVSCAVRSLANWKAPGPDGLHNFWLKWFRSSHAYLASQFQTALDSGSLPQFLTTGITHLLHKSGSTMDPKNFRPITCLPTLYKLLTSILRLKITAHINNNSIISVSQNGCRSGTRGTKELLIIDMTISQQVRRNRKSLATCWIDYKKAYDSVPHTWLLRVLELYKIDTTLCTFLKSCMGQWRTVLRYPGCRQSTMNDVLIKIERGIFQGDSLSPLWFCLALNPLSTLLEGSGIGYRLQKDDRVISHLLYMDDLKLLAPTKLQLTALLKVTENFSNSIKMEFGVDKCAVMYVKKGVIVESEGVELSDSTKLRSLSATETYKYLGFSQSLGIPEPDMKQSLRERFFGRLKKVLKSLLSGGNKVRAYNGWVMPVLMYSFGILRWTQTELDAIDRRVRTLLTAFRMHHPRSSVMRLYIPRKLGGRGLLNAKTLHNREIYNLREYFLHTDVGVHRSVVTVDTGLTPLALAKENWRKPVVLGTNDRREVWKGKELHGRFYRALNGPDIDFKASTSWLRYGDLFGETEGFVCAIMDEVIMTNNYRKYILKDGTVDICRACHRPGESIRHIISGCSRLANGEYLHRHNQVARIVHQQLALKYHLVSSEVPYYRYVPDPVLENGRATLYWDRSIITDRTIVANKPDIVMIDRLERRAMIVDIAVPHDENLVKVEKEKQIKYLDLSHEIVDMWNVDSAIIVPIVVSAHGLIAKSLDQHLKRLTLEGWIKGLMQKAVLLDTARIVRRFLSLEP

SEQ ID NO: 12055 - protein, 1199 aa, Spilosoma lubricipeda
MLTRARSRAQLLTPDSSLRSALPSSDARTEVPTVAEASSSSSSDEFFSPPTSPTPVRRQERYRPPDSLGPRGPLTSNRAPAAGGNVRRMKWTHSINENVMRAYFRATELGTNLTAYRVRLVSLFQELEPAVNVSAQRLSDQVRAIQRCHLLDDAVLERIRSDIRNSLAVPSSSHVVDTIVNTTSQLPRSEYIDERVDSEIISVSTQCNDTIRSTLEDAIREYRYVDSNNRPRLSRLPIHKRNLALVSALDSLLPDYFNNSEDLSDTHSILYCAAIAVCRVAGVNFVECKTATRPKNTVPAWQCRIERRIAGTRTLIGKLISFRSGNTRPKVMRFVKQAFLGTTVSPQQYMSCVTERIDFLKQKVYAWANRIRRYRKRTDRYNQNRTYQRNEKWVYQKWEKLSPCMSDEHLPDKNATNYFWRNIWSTPVTHTEGHWCRDVERSCDSITPMEPVRIDKEDVSCAVRSLANWKAPGPDGLHNFWLKWFRSSHAYLASQFQTALDSGSLPQFLTTGITHLLHKSGSTTDPKNFRPITCLPTLYKLLTSILRLKITAHINNNSIISVSQNGCRSGTRGTKELLIIDMTISQQVRRNRKSLATCWIDYKKAYDSVPHTWLLRVLELYKIDTTLCTFLKSCMGQWRTVLRYPGCRQSTMNDVLIKIERGIFQGDSLSPLWFCLALNPLSALLEDSGLGYRLQKDDQVISHLFYMDDLKLLAPTKLQLTALLKVTENFSNSIKMEFGVDKCAVMYVKKGVIVESEGTELSDSTRLRSLSATETYKYLGFSQSLGIPEPDMKQSLRERFFGRLKKVLKSLLSGGNKVRAFNGWVMPVLMYSFGILRWTQTELDAIDRRVRTLLTAFRMHHPRSSVMRLYIPRKLGGRGLLNAKTLHNREIYNLREYFLHTDVGMHRSVVTVDIGLTPLALAKENWRKPVVLSTNDRREVWKGKELHGRFYRALNGPDIDFKASTSWLRYGDLFGETEGFVCAIMDEVIMTNNYRKYILKDGTVDICRACHRPGESIRHIISGCSRLANGEYLHRHNQVARIVHQQLALKYHLVSSEVPYYRYVPDPVLENGRATLYWDRSIITDRTIVANKPDIVVIDRLERRAMIVDIAVPHDENLVKVEKEKQIKYLDLSHEIVDMWNVDSAIIVPIVVSAHGLIAKSLDQHLKRLTLEGWIKGLMQKAVLLDTARIVRRFLSLEP

SEQ ID NO: 12056 - protein, 1191 aa, Spilosoma lubricipeda
MLTRARSRALLPSSSLRSALPSSDARTEVPTVAEASSSSSSDEFFSPPTSPIPVRRQGRDRPPTSLGSRGPLTSNRAPATGGDVRRMKWTQSINENVMRAYFRATELGTNLTAYRVRLVSLFQELEPAVNVSAQRLSDQVRAIQRCHLLDDTVLERIRSDIRNSLTVPSSLHVVDVVTNSTPQNEDVSELVDSEIISVSTLYNDKIRSTLEDVIREYRCVNFNNRPRLPIHKRNLALVSALDSLLPDYFGNSEDLSDTHSILYCAAIAVCRVAGIKFAENITTTRPENTVPAWQCRIERRIAGARTLIGKLISFRSGNTRPKVMRFVKQAFLGTTISPQQYMSCVTERIDFLKQKVYAWANRIRRYRKRIDRYNQNCMFQRNEKWVYRKWENLSPCMSDGQVPDENATNSFWRSIWSVPVAHTEGDWCRDVERSCESLLPMELINIDKEDVSCAVRSLPNWKAPGPDGLHNFWLKWFRSSHACLASQFQTALDSGSLPQFLTTGITHLLYKSGSAMDPKNFRPITCLPTLYKLLTSILRLKITTHINQNSILSVSQNGCRSGTRGTKELLIIDMTISQQVRRNRKSLATCWIDYKKAFDSVPHTWLLKVLELYKIDTTLCTFLKSCMRQWRTVLRYPGCRQTAVNDVPIKIERGIFQGDSLSPLWFCLALNPLSTLLEGSGLGYRLQKEAPVISHLFYMDDLKLFAPTKLQLTALLRVTENFSNSIKMEFGIDKCAVMHVKKGVIVESEGIELSDSTRLRSLSATETYKYLGFSQSLGIPESDMKQSLRERFFGRLKKVLKSLLSGGNRVRAYNGWVMPVLMYSFGILRWTQTELDALDRRVRTLPTAFRMHHPRSSVMRLYIPRKFGGRGLLNVKTLHNREIYNLREYFLHTDVGVHRSVVAMDTGLTPLALAKENWRKPVVLGTNERREVWKGKELHGRFYRALNGPDIDFKASTSWLRYGDLFGETEGFVCAIMDEVIMTNNYRKYILKDGTVDICRACHRPGESIRHIISGCSRLANGEYLHRHNQVARIVHQQLALKYKLVNSEVPYYRYVPDSVLENGRATLYWDRSIITDRTIVANKPDIVVIDRSERRAMIVDIAVPHDENLVKVEKEKQIKYLDLSHEIVDMWDVDSVIIVPIVVSVHGLIAKSLDQHLKRLALDGWIKGLMQKAVLLDTARIVRRFLSLEP

SEQ ID NO: 12057 - protein, 1196 aa, Spilosoma lubricipeda
MLTRARSRALLPSSDSSLRSALPSSDARTEVPTVAEASSSSSSDEFFSPPTSPTPVRRQGRDRPPTSLGSRGPLTSNRAPATGGDVRRMKWTQSINENVMRAYFRATELGTNLTAYRVRLVSLFQELEPAVNVSAQRLSDQVRAIQRCHLLDDTVLERICSDIRNSLTVPSSPHVVDVVTNSTPQNEDVTELVDSEIISVSTLYNDKIRSTLEDVIREYRRVNFNNRPRLPRLPIHKRNLALVSALDSLLPDYFGNSEDLSDTHSILYCAAIAVCRVAGIKFAENITTTRPENTVPAWQFRIERRIAGARTLIGKLISFRSGNTRPKVMRFVKQAFLGTTISPQQYMSCVTERIDFLKQKVYAWANRIRRYRKRIDRYNQNRMFQRNEKWVYRKWENLSPCMSDGQVPDENATNSFWRSIWSVPVAHTEGDWYRDVERSCESLLPMELINIDKEDVSCAVRSLPNWKAPGPDGLHNFWLKWFRSSHACLASQFQTALDSGSLPQFLTTGITHLLYKSGSAMDPKNFRPITCLPTLYKLLTSILRLKITTHINQNSILSVSQNGCRSGTRGTKELLIIDMTISQQVRRNRKSLATCWIDYKKAFDSVPHTWLLKVLELYKIDTTLCTFLKSCMRQWRTVLRYPGCRQTAVNDVPIKIERGIFQGDSLSPLWFCLALNPLSTLLEGSGLGYRLQKEAPVISHLFYMDDLKLFAPTKLQLTALLRVTENFSNSIKMEFGIDKCAVMHVKKGVIVESEGIKLSDSTRLRSLSATETYKYLGFSQSLGIPESDMKQSLRERFFGRLKKVLKSLLSGGNKVRAYNGWVMPVLMYSFGILRWTQTELDALDRRVRTLLTAFRMHHPRSSVMRLYIPRKFGGRGLLNVKTLHNREIYNLREYFLHTDVGVHRSVVAMDTGLTPLALAKENWRKPVVLGTNERREVWKGKELHGRFYRALNGPDIDFKASTSWLRYGDLFGETEGFVCAIMDEVIMTNNYRKYILKDGTVDICRACHRPGESIRHIISGCSRLANGEYLHRHNQVARIVHQQLALKYKLVNSEVPYYRYVPDPVLENGRATLYWDRSIITDRTIVANKPDIVVIDRSERRAMIVDIAVPHDENLVKVEKEKQIKYLDLSHEIVDMWNVYSAIIVPIVVSAHGLIARSLDQHLKRLTLDGWIKGLMQKAVLLDTARIVRRFLSLEP

SEQ ID NO: 12058 - protein, 1073 aa, Autographa pulchrina
MSTYRHNDCRIRCVSQTIKCSVIQPMIALDDATLDRLRSEVQRSPAASTPSPAVVPVIGSPPTNPADGEEEDGAITVSTQYSEHIRSTLEDTIREFRSTPPGLRPRLPRLPMHNRNKAIMGVLDSLLLVYFGSSEDLSDTHSILYCAALAACRVANVKINNINLDTRPKPAVPAWQCRIERRVAEARALIGKLIAFKDGNSRPRVMRFVRRAFTGTNISPSEYTARVTERIDFFKQKVCAWASRIRRYKCRVDRFHQNRMFQRDQRWVFRTWERPVLGMDDRRLPDEDATNSFWRNIWSVPVSHSEGVWMRDVEESCEPIQEMRAITIGPQDVANAIRPMSNWKAPGPDGLQNFWLKWFRSSHGCLASQFQYAIESDALPQFFTTGSTHLLHKTGSTTDPKNYRPITCLPTIYKLLTSILRVKINEHIDSHSIMSASQNGCRNGSRGTKELLLIDMAICQQVRRSKKNLSTCWIDYKKAYDSVPHSWLMRVLELYKINTTLRAFLSSCMRRWTTVLRYPGCRDIQQSGEPIRIERGIFQGDSLSPLWFCLALNPLSTLLENSRLGYSLRRGSQVISHLLYMDDLKLFASNELQLMGLLKITESFSNSIRMEFGVDKCAVMHVKQGGIVESQGIQLSDSINLRSLSAADTYKYLGMSEALGIDVADMKKSLLTRFFGRLNKVLKSLLSGGNRVRAFNGWVMPVLMYSFGILKWTQTELDALDRRVRTLLTANRMHHPRSSVMRLYIPRKCGGRGFLNAKTLHNREVCNLREYFLQVDVGMHRDVVVVDKGFTPLSLGKENWHKPVVLSVKDRRDVWQSKELHGRFYRSLHGPDVDFLASVAWLRFGDLFGETEGFVCAIMDEVIMTNNYRKYIIKDGTVDICRACHCPGESIRHIISGCSRLANGEYLHRHNQVARIIHQQLALRYKLVEAEVPYYRYVPDPVLDNGHVTLYWDRSIITDRTIVANKPDIVVIDRSERRAMIVDVTIPHDENLVKAEKEKQMKYFDLAHEVVDMWEVDSAIIVPIVITANGTIAKSLDQHLKRLSLGIWVKGLIQKAVLLDTARIVRRFLSLEP

SEQ ID NO: 12059 - protein, 1000 aa, Ochropleura plecta
MATNVSTQCNEEMRIALEGAIREYRYISPELRPRLPRLPMHNKNRALVAVLDSQLSNYFDNCENLTDAHSILYCAAVAACRVAHVKFPDDGATRPKPAVPFWQCRIERRIGVARALIGKLICFREGNTRPRVMRFVRRAFAGTDISPPDYMSHITERIDFLKQKVYAWANRIRRYKRRVERYTLNRTFQSDERWVYRAWERPDQGVSDTHLPDDDAMCLFWRNIWSVPVSHTEGEWTREVERACDPTPEMGALTISPQDVACAVRPLPNWKSPGPDGLHNFWLKWIQRSHARLATLFQTALESGSLPKFLTTGITHLLHKSGSTTEPKNYRPITCLPTIYKVLTSILRAKITKHIDDNSIMSASQNGCRNGSRGTKELLLIDMAISQQVRRSRRHLSTCWIDYKKAYDSVPHTWLMRVLELYKVDATLRTFLSSCMRQWNTVLRYPGCRQIQRNSEPIRIERGIFQGDSLSPLWFCLALNPLSTLLEDSGLGYRLRRGGRVISHLLYMDDLKLFAPNDSQLMELLKVTETFSSAISMEFGVDKCVVMHVKRGEIVESVGTQLSDSIHLRSLSANETYKYLGMSEALGINVADMKQSLKERFFGRLRKVFNSLLSGGNKVRAFNGWVMPVLMYSFGILKWTQTELDALDRKVRTLLTAYRMHHPRSSVMRLYIPRSCGGRGFLNAKTLHNREICSLREYFLEADVGMHRDVVTVDKGFTPLFLAKENWRKPVVLDTNDRREVWQSKELHGRFFRALHGPDVDQPASVAWLRSGDLFGETEGFVCAIMDEVMMTNNYRRFIVKDGTVDICRACHRPGESIRHIISGCSRLANGEYLHRHNLVARIIHQQLALKYSLVESEVPYYRYEPDPVLEHGNITLYWDRSIITDRTIVANKPDIVVVDRSERRAMIVDITVPHDENLVKAEKDKQIKYIDLAREVVDMWDVDSAIIVPIVVSANGLITKSLEQHLRRLSLGSWIKGLIQKAVLLDTARIVRRFLSLEP

SEQ ID NO: 12060 - protein, 1198 aa, Ochropleura plecta
MLTRSAHARSARHPPPGSSLSSASPPPEPSLVVSAVTPAVAVASSSSDEYFSPPTTPPPVRRRGRHRPPDGLGPRGPPASDRVPALGGSVQRMRWTQSINENVMRSYYGATEGGNNLTAYRVRMLSLFQVLEPAVNVSAQRLSDQVRVIQRNRMLDDTVLDRLRTEMQSSQVITSSSQVVVPPQSHQVVNRANEVSNGMATNVSTQCSEEMRSTLEGAIREYRYMSPELRPRLPRLPMHNKNRALVAALDSQLSSYFDNCENLTDAHSILYCAAVAACRVAHVKFPDDRATRPKPAIPFWQCRIERRIGAARALIGKLICFREGNTRPRVMRFVRRAFAGTDISPPDYISRIAERIDFLKQKVYAWANRIRRYKRRVERYTQNRTFQSDERWVYRAWERPDQGVSDTHLPDDDAMCLFWRSIWSVPVSHTEGEWTREVERACDPIPEMGVLTISPQDVACAVRPLPNWKSPGPDGLHNFWIKWIQRSHVRLAALFQSALESGSLPKFLTTGITHLLHKSGSTAEPKNYRPITCLPTLYKVLTSILRAKITKHIDDNSIMSASQNGCRNGSRGTKELLLIDMAISQQVRRSRRHLSTCWIDYKKAYDSVPHTWLMRVLEMYKVDATLRTFLSSCMRQWSTVLRYPGCRQFQMNSEPIRIERGIFQGDSLSPLWFCLALNPLSTLLENSGLGYRLRRGGQVISHLLYMDDLKLFAPNDLQLMELLKVTETFSSAIRMEFGVDKCAVMHVKRGEIVESVGTQLSDSINLRSLSATETYKYLGMSEALGINGADMKQSLKERFFGRLRKVLNSLLSGGNKVRAFNGWVMPVLMYSFGILKWTQTELDTLDRKVRTLLTAFRMHHPRSSVMRLYIPRSCGGRGFLNAKTLHNREICSLREYFLETDVGMHRDVVAVDKGLTPLSLAKENWRKPVVLDTNDRREVWQSKELHGRFFRALHGPDVDQSASVAWLRSGDLFGETEGFVCAIMDEVMMTNNYRRFIVKDGTVDICRACHRPGESIRHIISGCSRLANGEYLHRHNLVARIIHQQLALKYNLVELEVPYYRYEPDPVLEHGNITLYWDRSIITDRTIVANKPDIVVVDRSERRAMIVDITVPHDENLVKAEKDKQIKYIDLAREVVDMWDVDSAIIVPIVVTANGLIAKSLDQHLRRLSLGSWIKGLIQKAVLLDTARIVRRFLSLEP

SEQ ID NO: 12061 - protein, 868 aa, Ochropleura plecta
MRFVRRAFAGTDISPPDYISRIAERIDFLKQKVYAWANRIRRYKRRVERYTQNRTFQSDERWVYRAWERPDQGVSDTHLPDDDAMCLFWRSIWSMPVSHTEGEWTREIERACDPIPEMGALTISPQDVACAVRPLPNWKSPGPDGLHNFWIKWIQRSHVRLAALFQSALESGSLPKFLTTGITHLLHKSGSTAEPKNYRPITCLPTLYKVLTSILRAKITKHIDDNSIMSASQNGCRNGSRGTKELLLIDMAISQQVRRSRRHLSTCWIDYKKAYDSVPHTWLMRVLDLYKIDATLRTFLISCMRQWSTVLRYPGCRQIQRNSEPIRIERGIFQGDSLSPLWFCLALNPLSTLLENSGLGYRLRRGGQVISHLLYMDDLKLFAPNDLQLMELLKVTETFSSAIRMEFGVDKCAVMHVKRGEIVESVGTQLSDSINLRSLSATETYKYLGMSEALGINVADMKQSLKERFFGRLRKVFNSLLSGGNKVRAFNGWVMPVLMYSFGILKWTQTELDALDRKVRTLLTAFRMHHPRFSVMRLYIPRSCGGRGFLNAKTLHNREICSLREYFLETDVGMHRDVVAVDKGLTPLSLAKENWRKPVVLDTNDRKEVGQSKELHGRFFRALHGPDVDQSASVAWLRSGDIFGETEGFVCAIMDEVMMTNNYRRFIVKDGTVDICRACHRPGESIRQIISGCSRLANGEYLHRHNLVARIIHQQLALKYSLVESEVPYYRYEPDPVLEHGNITLYWDRSIITDRTIVANKPDIVVVDRSERRAMIVDITVPHDENLVKAEKDKQMKYIALAREVVDMWDVDSAIIVPIVVSANGLIAKSLDQYLRRLSLGSWIKGLIQKAVLLDTARIVRRFLSLEP

SEQ ID NO: 12062 - protein, 1198 aa, Ochropleura plecta
MLTRAAQARNARHPPPGSSLSSASPPPEPSLVVSAVTPAVAVASSSSDEYFSPPTTPPPVRRRGRHRPPDGLGPRGPPASDRVPAPGGSVQRMRWTQSINENVMRSYYGATEGGNNLTAYRVRMLSLFQVLEPAVNVSAQRLSDQVRVIQRNRMLDDTVLDRLRTEMQSSQVITSSSQAVVPPQPHQLINRVNEVSNDVATNVSTQCSEEMRSTLEGAIREYRYMSPELRPRLPRLPMHNKNRALVAALDSQLSSYFDNCENLTDAHSILYCAAVTVCRVAHVKFPDDRATRPKPAIPFWQCRIERRIGAARALIGKLTWFREGNTRPRVMRFVRRAFAGTDISPPDYISRIAERIDFLKQKVYAWANRIRRYKRRVERYTQNRTFQSDERWVYRAWERPDQGVSDTHLPDDNAMCLFWRSIWSVLVSHTEGEWTREVERACDPIPEMGALTISPQDVACAVRPLPNWKSPGPDGLHNFWIKWIQRSHVRLAALFQTALESGSLPKFLTTGITHLLHKSGSTAEPKNYRPITCLPTLYKVLTSILRAKITKHIDDNSIMSASQNGCRNGSRGTKELLLIDMAISQQVRRSRRHLSTCWIDYKKAYDSVPHTWLMRVLELYKIDATLRTFLISCMRQWSTVLRYPGCRQIQRNSEPIRIERGIFQGDSLSPLWFCLALNPLSTLLENSGLGYRLRRGGQVISHLLYMDDLKLFAPNDLQLMELLKVTETFSSSIRMEFGVDKCAVMHVKRGEIVESVGTQLSDSINLRSLSATETYKYLGMSEALGINVADMKQSLKERFFGRLRKVFNSLLSGGNKVRAFNGWVMPVLMYSFGILKWTQTELDALDRKVRTLLTTFRMHHPRSSVMRLYIPRSCGGRGFLNAKTLHNREICSLREYFLETDVGMHRDVVAVDKGFTPLSLAKENWRKPVVLDTNDRREVWQSKELHGRFFRALHGPDVDQPASVAWLRSGDLFGETEGFVCAIMDEVMMTNNYRRFIVKDGTVDICRACHRPGESIRHIISGCSRLANGEYLHRHNLVARIIHQQLALKYSLVESEVPYYRYEPDPVLEHGNITLYWDRSIITDRTIVANKPDIVVVDRSERRAMIVDITVPHDENLVKAEKDKQIKYIDLAREVVDMWDVDSAIIVPIVVSANGLIAKSLDQHLRRLSLGSWIKGLIQKAVLLDTARIVRRFLSLEP

SEQ ID NO: 12063 - protein, 1200 aa, Hecatera dysodea
MLTRSRAQAQTAQATSSGSSLSSASQPPVPAPPVSPEIPVAAVASSSSDEYFSPPTTPPPARRRGRGRPPTSLGPRGPPASDRVPAIGGSVQRMRWTQSINVNVMRSYFGATEGGTNLTAYRGRMLSLFQVLEPAVNVSAQRLSDQVRVIQRNNMLDDAVLDRLRLESRSSCVSTASPPVTAQQRTSVLPRPDHDGEEDEDRAISVSSQCNEQLRSALEDAFREYRSTPPELRPRLPRLPMHNKNRALVCALDSQLSIYFDSSENLTDTHSILYCGAAAACRVAHVKLPNSDRVARLAIPAWQCRIERRIGEARALIGKLICFREGNTRPRVMRFVRRAFSGTDISPRDYLTRVTERIDFLKQKVYAWANRIRRYRRRVERYTQNRTFQRNERWVYRAWERPDQGVTDTRLPDDEAMLSFWRNIWSVPVSHTEGDWTREVERACDPIPEMGAINISPQDVARAVRPLPNWKSPGPDGLHNFWIKWFKRSHARLAAQFQTALESGSLPKFLTTGITHLLHKSGSTSEPKNYRPITCLPTVYKVLTSILRAKINNHIDSNSIMSASQNGCRNGSRGTKELLLIDVAISQQVRRSRRDLSTCWIDYKKAYDSVPHTWLMRVLELYKVDAALRTFLMSCMGQWRTVLHYPGCRQTQANSEPIRIERGIFQGDSLSPLWFCLALNPLSTLLEGSGQGYRLRRGGQVISHLLYMDDLKLFAPNNLQLMKLLKVTETFSSDISMEFGVDKCAVMHVKRGGIMESVGTQLSDSIHLRSLCSTETYKYLGMSEALGINATGVKQSLKERFFGRLNKVLNSLLSGGNKVRAFNGWVMPVLMYSFGILKWTQTELDALDRRVRSLLTANRMHHPRSSVMRLYIPRKCGGRGFLNAKTLHNREVCSLREYFLEADVGMHRDVVAVDKGLTPLSLANENWHKPVVLDTNDRREVWKSKELHGRFYRVLHGPDVDFLASVAWLRFGDLFGETEGFICAITDEVMMTNNYRKYIVKDGTVDICRACHRPGESIRHIISGCSSLANGDYLHRHNLVARIIHQQLALKYNLVESEVPYYRYAPDPVLENGNCTLYWDRSIITDRTIVANKPDIVVIDRLERRAMIVDIAVPHDENLVKAEKDKQSKYLDLAHEVVDMWNVNTAVIVPIVVTANGIIAKSLDQHLKRLSLGSWIKGLIQKAVLLDTARIVRRFLSREP

SEQ ID NO: 12064 - protein, 1075 aa, Hecatera dysodea
MLSLFQVLEPAVNVSAQRLSDQVRVILRNRMLDDSVLDRLRMEICSSQVITPSPQTVAQPQLIQIPSHGDEESDDRVTNVSTQCNEELRSALESAIREFRYVSPELRPRIPRLPMHNKNRALVAALNSQLSNYFDNCEDLTDAHSIMYCAAVAACRVAHVKMPNDRVTRPKPAIPAWQCRIERRIGGARALIGKLICFREGNTRPRVMRFVRRAFSGTEISPLDYLSRVTERIDFLKQKVYAWANRIRRYKRRVERYTQNRTFRSNERWVYKAWERPDQDVTDTRPPDDDAMCSFWRNIWSAPVSHTEGDWIREVERACDPLPDMGAIIISPQDVARAVRPLPNWKSPGPDGLHTFWIKWLHSSHACLASLYQASLASGSLPEFLMTGITHLLHKSGSTAEPKNYRPITCLPTVYKVLTSILRDKINQHINSNNIMSASQNGCRNGSRGTKELLLIDIAISQQVRRSRKDLSTCWIDYKKAYDSVPHTWLLRVLELYKIDATLRTFLMSCMGQWRTVLRYPGCRHVQRNSVPIMIERGIFQGDSLSPLWFCLALNPLSTLLGNSGLGYRLKRGGQVISHLLYMDDLKLFAPTNLQLMELLKVTETFSNAIRMEFGVDKCAIMHVKRGEIMESVGSQLSDSINLRCLSSTETYKYLGMSEALGINVTDMKQSLKERFFGRLKKVFNSLLSGGNKVRAFNGWVMPVLMYSFGVLKWTQTELDALDRRVRTLLTTYRMHHPRSSVMRLYIPRKCGGRGFLNAKTLHNREICSLREYFLAVEVGMHRDVVAVDKGLTPLSLANENWRKPAVLDTNDRRAVWQSKELHGRFFRALHGPDVDQLASVAWLRFGDLFGETEGFVCAIMDEVIMTNNYRRFIVKDGAVDICRACHRPGESIRHIVSGCSRLANGEYLYRHNLVARIIHQQLALKYSLVNSEVPYYRYVPDPVLDNGNITLYWDRSIITDRTIVANKPDIVVVDRIERRTMIVDITVPHDENLVKAEKDKQIKYLDLAREVVDMWDVDSAIIVPIVVSANGLIAKSLDQHLRRLSLGSWIKGLIQKAVLLDTARIVRRFLSLEP

SEQ ID NO: 12065 - protein, 1197 aa, Hecatera dysodea
MLTRAAARRARLPPPASSLSSASPPPEPSPTVSAATPAVAVASSSSDEYFSPPTSPPPARRRRGRRPPDGLGPRGPSASDRVPAPGGSVQRMLWTQTINENVMRSYYGATEGGNNLTAYRGRMLSLFQVLEPAVDVSAQRLSDQVRVILRNRMLDDSVLDRLRMEICSSHVITPSPQTVAQPQLIQIPSHADEESDDRVTNVSTQCNEELRSALESAIREFRYVSPELRPRIPRLPMHNKNRALVAALDSQLSNYFDNCEDLTDAHSIMYCAAVAACRVAHVKMPNDRVTRPKPAIPAWQCRIERRIGGARVLIGKLICFREGNTRPRVMRFVRRAFSGTQISPLDYLSRVTERIDFLKQKVYAWANRIRRYKRRIERYTQNRTFRSNERWVYRAWERPDQDVTDTRPPDDDAMCSFWRNIWSAPVSHTEGDWIREVERACDPLPDMGAIIISPQDVARAVRPLPNWKSPGPDGLHNFWIKWLHSSHACLASRYQESLESGSLPEFLMTGITHLLHKSGSTAEPKNYRPITCLPTVYKVLTSILRDKINQHINSNNIMSASQNGCRNGSRGTKELLLIDIAISQQVRRSRKDLSTCWIDYKKAYDSVPHTWLLRVLELYKIDATLRTFLMSCMGQWRTVLRYPGCRHVQRNSEPIRIERGIFQGDSLSPLWFCLALNPLSTLLGNSGLGYRLKRGGQVISHLLYMDDLKLFAPTNLQLMELLKVTETFSNAIRMEFGVDKCAIMHVKRGEIMESVGSQLSDSINLRCLSSTETYKYLGMSEALGINVTDMKQSLKERFFGRLKKVFNSLLSGGNKVRAFNGWVMPVLMYSFGVLKWTQTELDALDRRIRTLLTTYRMHHPRSSVMRLYIPRKCGGRGFLNAKTLHNREICSLREYFLAVEVGMHRDVVVVDKGLTPLSLANENWRKPAVLDTNDRRAVWQSKELHGRFFRALHGPDVDQLASVAWLRFGDLFGETEGFVCAIMDEVIMTNNYRRFIVKDGTVDICRACHRPGESIRHIVSGCSRLANGEYLHRHNLVARIIHQQLALKYSLVSSEVPYYRYVPDPVLDSGNITLYWDRSIITDRTIVTNKPDIVVVDRIERRTMIVDITVPHDENLVKAEKDKQIKYLDLAREVVDMWDVDSAIIVPIVVSANGLIAKSLDQHLRRLSLGSWIKGLIQKAVLLDTARIVRRFLSLEP

SEQ ID NO: 12066 - protein, 1200 aa, Hecatera dysodea
MLTRSRTRCQNTRLTPSDSSLSSASQPPGPTPPASPEIPVAAVASSSSDEYFSPPTTPPPARRRGRGRPPNSLGPRGPPASDRVPAIGGSVQRMRWTHSINENVMRSYFGATEGGTNLTAYRGRMLSLFQVLEPAVNVSAQRLSDQVRVIQRNRMLDDAVLDRLRLESRSSRVSPASPPAAVQIQPSISPRPDHVSEDVDDGTISVSTQCNERLRSALEDAFREYRSTPPELRPRLPRLPMHNKNRALVCALDSQLSIYFDSSENLTDTHSILYCGAAAACRVAHVKLPNSDRVARPAVPAWQCRIERRIAEARALIGKLICFREGNTRRRVMRFVRRAFSGTGISPRDYLTRVTERIDFLKQKVYAWANRIRRYKRRVERYTQNRIFQNNERWVYRAWERPDQGVTDTRLPDDEAMLSFWRNIWSVPVSHTEGDWTREVERACDSIPEMGAINISPQDVARAVRPLPNWKSPGPDGLHNFWIKWLTRSHARLASQFQSALESRSLPQFFTTGITHLLHKSGSTADPKNYRPITCLPTVYKVLTSILRAKINDHIESNSIMSISQNGCRSGARGTKELLLIDVAISQQVRRSRKDLSTCWIDYKKAYDSVPHTWLMRVLELYKVDAVLRAFLMSCMGQWRTVLHYPGCRQTQANSEPIRIERGIFQGDSLSPLWFCLALNPLSTLLEGSGQGYRLRRGGQVISHLLYMDDLKLFAPNNLQLMKLLKVTETFSSDISMEFGVDKCAVMHVKRGEIMESVGTQLSDSIHLRSLCSTETYKYLGMSEALGINATSVKQSLKERFFGRLNKVLNSLLSGGNKVRAFNGWVMPVLMYSFGILKWTQTELDALDRRVRSLLTANRMHHPRSSVMRLYIPRKCGGRGFLNAKTLHNREVCSLREYFLEADVGMHRDVVAVDKGFTPLSLANENWRKPVVLDTNDRREVWQSKELHGRFYRVLHGPDVDFLASVAWLRFGDLFGETEGFICAITDEVMMTNNYRKYIVKDGTADICRACHRPGESIRHIISGCSSLANGDYLHRHNLVARIIHQQLALKYNLVESEVPYYRYAPDPVLENGNCTLYWDRSIITDRTIVANKPDIVVIDRLERRAMIVDIAVPHDENLVKAEKDKQSKYLDLAREVVDMWDVNTAVIVPIVVTANGIIAKSLDQHLKRLSLGSWIKGLIQKAVLLDTARIVRRFLSREP

SEQ ID NO: 12067 - protein, 1046 aa, Hecatera dysodea
MLDDAVLDRLRLESRSSRVSPASPPAAVQIQPSISPRPDHVSEDVDDGTISVSTQCNERLRSALEDAFREYRSTPPELRPRLPRLPMHNKNRALVCALDSQLSIYFDSSENLTDTHSILYCGAAAACRVAHVKLPNSDRVARPAVPAWQCRIERRIAEARALIGKLICFREGNTRRRVMRFVRRAFSGTDISPRDYLTRVTERIDFLKQKVYAWANRIRRYKRRVERYTQNRIFQNNERWVYRAWERPDQGVTDTRLPDDEAMLSFWRNIWSVPVSHTEGDWTREVERACDSIPEMGAINISPQDVARAVRPLPNWKSPGPDGLHNFWIKWLTRSHARLASQFQSALESRSLPQFFTTGITHLLHKSGSTAEPKNYRPITCLPTVYKVLTSILRAKINDHIESNSIMSTSQNGCRSGARGTKELLLIDVAISQQVRHSRKDLSTCWIDYKKAYDSVPHTWLMRVLELYKVDAVLRAFLMSCMGQWRTVLHDPGCRQTQANSEPIRIERGIFQGDSLSPLWFCLALNPLSTLLEGSGQGYRLRRGGQVISHLLYMDDLKLFAPTKLQLMKLLKVTETFSSDISMEFGVDKCAVMHVKRGEIMESVGTQLSDSIHLRSLCSTETYKYLGMSEALGINATSVKQSLKERFFGRLNKVLNSLLSGGNKVRAFNGWVMPVLMYSFGILKWTQTELDALDRRVRSLLTANRMHHPRSSVMRLYIPRKCGGRGFLNAKTLHNREVCSLREYFLEADVGMHRDVVAVDKGFTPLSLANENWRKPVVLDTNDRREVWQSKELHGRFYRVLHGPDVDFLASVAWLRFGDLFGETEGFICAITDEVMMTNNYRKYIVKDGTVDICRACHRPGESIRHIISGCSSLANGDYLHRHNLVARIIHQQLALKYNLVESEVPYYRYAPDPVLENGNCTLYWDRSIITDRTVVANKPDIVVIDRLERRAMIVDIAVPHDENLVKAEKDKQSKYLDLAREVVDMWDVNTAVIVPIVVTANGIIAKSLDQHLKRLSLGSWIKGLIQKAVLLDTARIVRRFLSREP

SEQ ID NO: 12068 - protein, 904 aa, Mythimna impura
MAVPAWQCRIERRIGGARALIGKLICFREGNTRPRVMRFVRRAFSGTDISPRDYMSRVTERIDFLKQKVYAWANRIRRYKRRVERYTQNRTFRSNERWVYRAWERPDQGVTDTRLPDDDAMSSFWRSIWSVPVSHTEGDWTREVERACDPIPQMGAIDISPQDVARAVRPLPNWKSPGPDGLHNFWIKWFTRSHARLAYQFQSALESGSLPQFLTTGITHLLHKSGSTAEPKNYRPITCLPTVYKVLTSILRSKINSHIDKNLIMSPSQNGCRNGSRGTKELLLIDMTISQQVRRFRKDLSTCWIDYKKAYDSVPHTWLMRVLELYKIDTTLRTFLMSCMRQWSTVLRYPGCRHIQRNSEPVRIERGIYQGDSLSPLWFCLALNPLSTLLENSGLGYRLKRGGQVISHLLYMDDLKLFAPNNLQLMELLKVTETFSSAIRMEFGVDKCAVMHVKRGEVVESVGTQLTDSINLRSLSPTETYKYLGMSEALGIKITDMKQSLKERFFGRLKKVFNSLLSGGNKVRAFNGWVMPVLMYSFGVLKWTQTELDALDRRVRTLLTAYRMHHPRSSVMRLYIPRKCGGRGFLNAKTLHNREVCSLREYFLATDVGMHRDVVTVDKGLTPLSLANENWRKPVVLDTNDRREVWQSKELHGRFFRAFHGPDVDQLASVAWLRFGDLFGETEGFVCAIMDEVIMTNNYRRFIVKDGTVDICRACHRPGESIRHIISGCSRLANGEYLHRHNLVARIIHQQLALKYSLVESEVPYYRYEPDPVLDNGHITLYWDRSIITDRTIVANKPDIVVVDRSERRAMIVDISVPHDENLVKAEKDKQIKYIDLAREVVDMWDVDSAIIVPIVVSANGLIAKSLDQHLRRLALGGWIKALIQKAVLLDTARIVRRFLSLEP

SEQ ID NO: 12069 - protein, 1190 aa, Mythimna impura
MLTRAAARRARPPPPASSLSSASPPPESSPTVSAVTPAVAVASSSSDEYFSPPTAPPPARRRRGRRPPSDRVPAPGGSVQRMRWTQSINENVMRAYYGATEGGNNLTAYRVRMLSLFQVLEPAVNVSAQRLSDQVRVIQRNHMLDDTVLDRLRTEMSNHAIAPSSQSVVPVMVPPSYHLSDHADEAITDMVTHVNTQCNNELRSALECAIREYRNMPLELRPRLPRLPMHNKNKALVAALDLQLSNYFDDCKDLTDTHSIMYCAAVAACRVAHVKFPNCDVATRPKPAVPSWQCRIERRIGGARALIGKLICFREGNTRPRVMRFVRRAFSGTDISPRDYMSRVTERIDFLKQKVYAWANRILRYKRRVERYTQNRTFRSNERWVYRAWERPDQGVTDACLPDDDAMSSLWRSIWSVPVSHTEGDWTREVERACDPIPQMGAIDISPQDVARAVRPLPNWKSTGPDGLHNFWIKWFTRSHARLAYQFQSALESGSLPQFLTTGITHLLHKSGSTAEPKNYRPITCLPTVYKVLTSILRSKINSHIDKNLIMSPFQNGCRNGSRGTKELLLIDMTISQQVRRSRKDLSTCWIDYKKAYDSVPHTWLMRVLELYKIDTTLRTFLMSCMRQWSTVLRYPGCRHTQRNSEPVRIERGIFQGDSLSPLWFCLALNPLSTLLENSGLGYRLKRGGQVISHLLYMDDLKLFAPNNLQLMELLKVTETFSSAIRMEFGVDKCAVMHVKRGEVVESVGTQLTDSINLRSLSPTETYKYLGMSEALGINITDMKQSLKERFFGRLKKVLNSLLSGGNKVRAFNGWVMPVLMYSFGVLKWTQTELDALDRRVRTLLTAYQMHHPRSSVMRLYIPRKCGGRGFLNAKTLHNREVCSLREYFLAADVGMQRDVVAVDKGLTPLSLANENWREPVVLDTNDRREVWQSKELHGRFFRALHGPDVDQLASVAWLRFGDLFGETEGFVCAIMDEVIMTNNYRRFIVKEGKVDICRACHRPGESIRHIISGCSRLANGEYLHRHNLVARIIHQQLALKYSLVESEVPYYRYEPDPVLDNGHITLYWDRSIITDRTIVANKPDIVMVDRSERRAMIVDISVPHDENLVKAEKDKQIKYIDLAREVVDMWDVDSAIIVPIVVSANGLIAKSLDQHLRRLALGGWIKGLIQKVVLLDTARIVRRFLSLEP

SEQ ID NO: 12070 - protein, 1200 aa, Mythimna impura
MLTRAAARRARPPPPASSLSSASPPPESSPTVSAVTPAVAVASSSSDEYFSPPTSPPPARRRRGRRPPSGLGLRGPPVSDRVPAPGGSVQRMRWTQSINENVMRAYYGATEGGNSLTAYRVRMLSLFQVLEPSVNVSAQRLSDQVRVIQRNHMLDDTVLDRLRTEMSNHAIAPSSQSVVPVMVPPSYHLSDHADEAITDMVTHVSTQCNNELRSALECAIREYRNMPLELRPRLPRLPMHNKNKALVAALDLQLSNYFDDCKDLTDTHSIMYCAAVAACRVAHVKFPNCDVATRPKPAVPAWQCRIERRIGGARALIGKLICFREGNTRPRVMRFVRRAFSGTDISPRDYMSRVTERIDFLKQKVYAWANRIRRYKRRVERYTQNRTFRSNERWVYRAWERPDQGVTDACLPDDDAMSSFWRSIWSVPVSHTEGDWTREVERACDPIPQMGAIDISPQDVARAVRPLPNWKSPGPDGLHNFWIKWFTRSHARLAYQFQSALESGSLPQFLTTGITHLLHKSGSTAEPKNYRPITCLPTVYKVLTSILRSKINSHIDKNLIMSPSQNGCRNGSRGTKELLLIDMAISQQVRRSRKDLSTCWIDYKKAYDSVPHTWLMRVLELYKIDTTLRTFLMSCMRQWSTVLRYPGCRHTQRNSEPVRIERGIFQGDSLSPLWFCLALNPLSTLLENSGLGYRLKRGGQVISHLLYMDDLKLFAPNNLQLMELLKVTETFSSAIRMEFGVDKCAVMHVKRGEVVESVGTQLTDSINLRSLSPTETYKYLGMSEALGINITDMKQSLKERFFGRLKKVLNSLLSGGNKVRAFNGWVMPVLMYSFGVLKWTQTELDALDRRVRTLLTAYRMHHPRSSVMRLYIPRKCGGRGFLNAKTLHNREVCSLREYFLAADVGMHRDVVAVDKGLTPLSLANENWCKPVVLDTNDRREVWQSKELHGRFFRALHGPDVDQLASVAWLRFGDLFGETEGFVCAIMDEVIMTNNYRRFIVKDGTVDICRACHRPGESIRHIISGCSRLANGEYLHRHNLVARIIHQQLALKYSLVESEVPYYRYEPDPVLDNGHITLYWDRSIITDRTIVANKPDIVMVDRSERRAMIVDISVPHDENLVKAEKDKQIKYIDLAREVVDMWDVDSAIIVPIVVSANGLIAKSLDQHLRRLALGGWIKGLIQKVVLLDTARIVRRFLSLEP

SEQ ID NO: 12071 - protein, 1048 aa, Mythimna impura
MLDDTVLDRLRTEMGSHAIASSSQTVAPSQVSPSNHLPNHADEESTDMVTHVSTQCSNELRSALECAIREYRNMPLELRPRLPRLPMCNKNKALVAALDLQLSNYFDDCEDLTDTHSIMYCAAVAACRVAHVKFPNSDVATRPKPAVPAWQCRIERRIGGARALIGKLICFREGNTRPRVMRFVRRAFSGTDISPRDYMSCVTERIDFLKQKVYAWANRIRRYKRRVERYTQNRTFRSNERWVYRAWEQPDQGGADTRLPDDDAMSSFWRNIWSVPVSHTEGGWTREVERACEPIPEMGAITISPQDVARAVRPLPNWKSPGPDGLHNFWIKWLQRSHARLASQYQTALESGSLPEFLTTGVTHLLHKSGSTAEPKNYRPITCLPTVYKVLTSILRAKINLHVDNNAIMSASQNGCRNGSRGTKELLLIDMAISQQVRRSRKDLSTCWIDYKKAYDSVPHTWLMRVLELYKIDATLRTFLMSCMRQWRTVLRYPGCRHIQRNSEPVRIERGIFQGDSLSPLWFCLALNPLSTLLENSGLGYRLKRGGQVISHLLYMDDLKLFAPNNLQLMELLKVTETFSSAIRMEFGVDKCAVMHVKRGEIVESVGTQLSDSINLRSLSPTETYKYLGMSEALGINAIDMKQTLRERFFGRLKKVFNSLLSGGNKVRAFNGWVMPVLMYSFGVLKWTQTELDALDRRVRTLLTAYRMHHPRSSVMRLYIPRKCGGRGFLNAKILHNREVCSLREYFLTADVGMHRDVVAVDKGLTPLSLANESWRKPVVLDTNDRREVWQSKELHGRFFRALHGPDVDQLASVAWLRVGDLFGETEGFVCAIMDEVIMTNNYRRFIVKDGTVDICRACHRPGESIRHIISGCSRLANGEYLHRHNLVARIIHQQLALNYSLVESEVPYYRYVPDPVLDNGDITLYWDRSIITDRTIVANKPDIVVVDRRERRTMIVDISVPHDENLVKAEKDKQIKYIDLAREVVDMWDVDSAIIVPIVVSANGLIAKSLDQHLRRLALGGWIKGLIQKAVLLDTARIVRRFLSLEP

SEQ ID NO: 12072 - protein, 1200 aa, Mythimna impura
MLTRSRAREQETHPTSSGSSLSSASQPPGPAPAVSPVIPAAAVASSSSDEYFSPPTTPPPARRRGRGRPPASLRPRGPPASDRVPAADGSVQRMRWTQSINENVMRSYFGATEGGSNLTAYRGRMLSLFQVLEPTVNVSAQRLSDQVRVIQRNRMLDDAVLDRLRLESQRSRASSATPPAAVQLQPSALPRPDHVGDADDDAAISVSTQCNERLRSALEDAFREYRSTPPGLRPRLPRLPMHKRNRALVCALDSQLSNCFDSSKDLADTHSILYCAAAAACRVAHVKFPNCDRATRPAVPAWQRRIERRIGEARALIGKLICFREGNTRPRVMRFVRRAFLGTDISPQNYLPCVTERIDFLKQKVYAWASRIRRYKRRVERYTQNRTFQSNERWVYRTWERPDQDVTDTRLPDDDAMCSFWRRIWSVPVSYIEGDWIREVERTCDLLPEMGAITISRQDVARAVRPLPNWKSPGPDGLHNFWIKWFQGSHARLASQFQSALVSGSLPEFLTTGITHLLHKSGSTADPKNYRPITCLPTVYKVLTSILRAKINTHIETNSIMSASQNGCRNGSRGTKELLLIDMAISQQVRRSRKDLSTCWIDYKKAYDSVPHTWLMRVLELYKVDTTLRTFLMSCMRQWRTVLHYPGCRQIRENSEPIRIERGIFQGDSLSPLWFCLALNPLSTLLEGSGLGYRLKRGGQVISHLLYMDDLKLFAPNNLHLMELLKVTETFSNAIRMEFGVDKCAVMHVKRGEIMESVGTQLSDSIYLRSLCSTETYKYLGMSEALGINAADVKQSLKERFFGRLNRVLKSLLSGGNKVRAFNGWVMPVLMYSFGILKWTQTELDALDRRVRTLLTANRMHHPRSSVMRLYIPRKCGGRGFLNAKTIHNREVCSLREYFLETDVGMHRDVVAVDKGLTPLSLANGNWRKPIILDTNDRREVWQSKELHGRFYRALHGPDVDLLASVSWLRFGDLFGETEGFVCAIMDEVVMTNNYRKYIVKDGTADICRACHRPGESIRHIISGCSHLANGDYLHRHNLVAKIIHQQLALKYNLVESEVPYYKYVPDPVLDNGSITLYWDRSIITDRTIVANKPDIVVIDRLERRTVIVDIAVPHDDNLVKAEKDKQTKYLDLAREVVDMWEVDTAVIVPIVVTANGLISKGLDQHLRRLSLGSWIKGLIQKAVLLDTARIVRRFLSQEP

SEQ ID NO: 12073 - protein, 1200 aa, Mythimna impura
MLTRAAARRARLPPPASSLSSASPPPESSPTVSAVTPAVAVASSSSDEYFSPPTSPPPARRRRGRRPPSGLGPRGPPASDRVPAPGGSVQRMRWTQSINENVMRAYYGATEGGNNLTAYRVRMLSLFQVLEPAVNVSAQRLSDQVRVIQRNHMLDDTVLDRLRTEMSNHAIAPSSQPVVPVMVPPSYHLSDHADEEITDMVTHVSTQCNNELRSALECAIREYRNMPLELRPRLPRLPMHNKNKALVAALDLQLSNYFDDCEDLTDTHSIMYCAAVAACRVAHVKFPSCDVSTRPKPAVPAWQCRIERRIGGARALIGKLICFREGNTRPRVMRFVRRAFSGTDISPRDYMSRVTERIDFLKQKVYAWANRIRRYKRRVERYTQNRTFRSNERWVYRAWERPDQGVTDTRLPDDDAMSSFWRSIWSVPVSHTEGDWTREVERACDPIPQMGAIDISPQDVARAVRPLPNWKSPGPDGLHNFWIKWFTRSHARLAYQFQSALESGSLPQFLTTGITHLLHKSGSTAEPKNYRPITCLPTVYKVLTSILRSKINSHIDKNLIMSPSQNGCRNGSRGTKELLLIDMTISQQVRRFRKDLSTCWIDYKKAYDSVPHTWLMRVLELYKIDTTLRTFLMSCMRQWSTVLRYPGCRHIQRNSEPVRIERGIFQGDSLSPLWFCLALNPLSTLLENSGLGYRLKRGGQVISHLLYMDDLKLFAPNNLQLMELLKVTETFSSAIRMEFGVEKCAVMHVKRGEVVESVGTQLTDSINLRSLSPTETYKYLGMSEALGINITDMKQSLKERFFGRLKKVFNSLLSGGNKVRAFNGWVMPVLMYSFGVLKWTQTELDALDRRVRTLLTAYRMHHPRSSVMRLYIPRKCGGRGFLNAKTLHNREVCSLREYFLATDVGMHRDVVAVDKGLTPLSLANENWRKPVVLDTNDRREVWQSKELHGRFFRAFHGPDVDQLASVAWLRFGDLFGETEGFVCAIMDEVIMTNNYRRFIVKDGTVDICRACHRPGESIRHIISGCSRLANGEYLHRHNLVARIIHQQLALKYSLVESEVPYYRYEPDPVLDNGHITLYWDRSIITDRTIVANKPDIVVVDRSERRAMIVDISVPHDENLVKAEKDKQIKYIDLAREVVDMWDVDSAIIVPIVVSANGLIAKSLDQHLRRLALGGWIKALIQKAVLLDTARIVRRFLSLEP

SEQ ID NO: 12074 - protein, 1200 aa, Mythimna impura
MLTRAAARRARLPPPASSLSSASPPPEPSPTVSAVTPAVAVASSSSDEYFSPPTSPPPARRRRGRRPPSGLGPRGPPASDRVPAPGGSVQRMRWTQSINENVMRAYYGATEGGNNLTAYRVRMLSLFQVLEPAVNVSAQRLSDQVRVIQRNHMLDDTVLDRLRTEMSNHTIAPSSQSVVPVMVPPSYHLSGHVDEEITDMVTHVSTQCNNELRSALECAIRVYRNMPLELRPRLPRLPMHNKNKALVAALDLQLSNYFDDCKDLTDTHSIMYCAAVAACRLAHVKFPNCDVATRPKPAVPAWQCRIERRIGGARALIGKLICFREGNTRPRVMRFVRRAFSGTDISPRDYMSRVTERIDFLKQKVYAWANRIRRYKRRVDRYTQNRTFRSNERWVYRAWERPDQGVTDACLPDDDAMSSFWRSIWSVPVSHTEGDWTREVERACDPIPQMGAIDISPQDVARAVRPLPNWKSPGPDGLHNFWIKWFTRSHARLAYQFQSALESGSLPQFLTTGITHLLHKSGSTAEPKNYRPITCLPTVYKVLTSILRSKINSHIDKNLIMSPSQNGCRNGSRGTKELLLIDMTISQQVRRSRKDLSTCWIDYKKAYDSVPHTWLMRVLELYKIDTTLRTFLMSCMRQWSTVLRYPGCRHTQRNSEPVRIERGIFQGDSLSPLWFCLALNPLSTLLENSGLGYRLKRGGQVISHLLYMDDLKLFAPNNLQLMELLKVTETFSSAIRMEFGVDKCAVMHVKRGEVVESVGTQLTDFINLRSLSPTETYKYLGMSEALGINITDMKQTLKERFFGRLKKVFNSLLSGGNKVRAFNGWVMPVLMYSFGVLKWTQTELDALDRKVRTLLTAYRMHHPRSSVMRLYIPRKCGGRGFLNAKTLHNREVCSLREYFLAADVGMHRDVVTVDKGLTPLSLANENWRKPVVLDTNDRREVWQSKELHGRFFRALHGPDVDQLASVAWLRSGDLFGETEGFVCAIMDEVIMTNNYRRFIVKDGTVDICRACHRPGESIRHIISGCSRLANGEYLHRHNLVARIIHQQLALKYSLVESEVPYYRYEPDPVLDNGHITLYWDRSIITDRTIVANKPDIVVVDRSERRAMIVDISVPHDENLVKAEKDKQIKYIDLAREVVDMWDVDSAIIVPIVVSGNGLIAKSLDQHLRRLALGDWIKGLIQKAVLLDTARIVRRFLSLEP

SEQ ID NO: 12075 - protein, 1190 aa, Mythimna impura
MLTRAAARRARHPPPGSPLSSASPPPDLGSPVSPVAAVASSSSDEYFSPPTSPTPVRRPGRGRPPKRPGGQPAPSRVPAAGGCVQRMRWTQSMNENVMRAYYGSTEGGTNLTAYIDRMLSLFQDLEPTVNISAQRLSDQVRFIQRNHRLDDAALDRLRSEVLSNQIVSTSIQTQTTATPTIPNNVDADDRVVTVSSQCNDELRSALEDALREYRLTPTELRPRLPRLPMHKKNRALVCTLDSLLKNIFESSENLVDTHSILYCGAVAACRLANIKFPSTDGAIRPKPAVPAWQCRIERRIDGARVLIGKLHCFREGNTRPRVMRFVRRAFLGTGISPQEYMSRVTERIDFLKQKVCAWASRIRRYKRRVDRYSQNRMFQSDERWVYRAWERPEQNVIDGLRPDDFATITFWRNIWSVPVSHTEGGWIREVKRVCEAIPEMDKITITPADVAKAVRPLPNWKSPGPDGLQNFWLKWYSNSHVPLASQFQSTLESGSLPEYLTTGVTHLLHKTGNPAEPKNYRPITCLSTVYKLLTSILREKINRHIENNSIMSASQNGCRNGSRGTKELLLIDMAVSQQARRSRKDLSTCWIDYKKAYDSVPHTWLMRVLELYKIDTTLRTFLESCMRQWKTVLRYPGCRPIQGNDEPIRIKRGIFQGDSLSLLWFCLALNPLSTLLENSGLGYRLRRGGQAISHLLYMDDLKLFAPSNLQLMELLKVTETSSSAIRMEFGVDKCAAMHVKQGEIMEFEGIQLPDSIHLKSLSSTETYRYLGMSEALGINNADMKQSLKERFFGRLKKVLNSLLSGGNKVRAFNSWVMPVLMYSFGILKWTQTELDALDRRVRTLLTANRMHHPRSSVMRLYISRKCGDRGFLNAKTLHNREVCSLIEYFLKTDVGMHRDVVAVDKGLTPLSMAKEDWRKPVVLTTDDRKEVWKGKELHGRFYRALHEPDVDFLASVAWLRFSDLFGETEGFVCAIMDEVILTNNYRRYIMKDGTVDVCRACHRPGESIRHIISGCSRLANGEYLHRHNQVARIIHQQLALKYNLVDSEVPYYKYVPDPVLENDHVTLYWDRSIITNRTIVANKPDIVEIDRLARRAMIVDVTIPHDENLVKAEKEKQIKYLDLAHEVVDMWNVDSAVIVPIVVTANGLIAKSFDDHLSKLSLRGWIKGLIQKAVLLDTARIVRRFLSLEP

SEQ ID NO: 12076 - protein, 1202 aa, Phlogophora meticulosa
MLTRSRARVLNAPKTSSGSSLSSASQLPGPAPDVSPVTPAAAVASSSSDEYYSPPTSPPPVRRCGRGRPPASLGLRGPPASARVPASGGSVQRMRWTQSINENVMRSYYGATEGGTNLTAYRSRMLSLFQVLEPAVNVSAQRLSDQVRVIQRNHMLDDTVLDRLRLNSRSNRVMPASPLVAVQLPSLPIVSPRPDYVGEEDDDAAISVSSQCNVRLRSALEDAFREYRSTPPELRQRLPRLPMHKKNKALMCALDSLLSNSFDNSKDLADTHSILYCAAAAACRVANVKFPNSKKATRPAVPAWQCRIERRIGEARVLIGKLICFREGNTRPRVMRFVRRAFSGTDISSRDYLTRVTERIDFLKQKICAWANRIRRYKRRVERYTQNRTFRSDERWVYRTWERPDQGVTDTFLPDDEAMCLFWRSIWSVPVSHTEGDWTREVERTCEPLPEMGAINISPQDVACAVRPLPNWKSPGPDGLHNFWIKWLKSSHARLASQFQSALESGSLPQFLTTGITHLLHKSGSTAEPKNYRPITCLPTVYKVLTSILRSKINNHIDSTSIMSVSQNGCKNGSRGTKELLLIDMAISQQVRRSRKDLSTCWIDYKKAYDSVPHTWLMRVLELYKIDATLRTFLKSCMGQWRTVLHYPGCRQFQENSEPIRIERGIFQGDSLSPLWFCLALNPLSTLLEGSGLGYRLRRGGQVISHLLYMDDLKLFAHNNLQLMKLLKVTETFSSAIRMDFGVDKCAVMHVKRGGIVESAGTQLSDSIYLRSLSSTETYKYLGMSEALGINTADMKQSLKERFFGRLNKVLNSLLSGGNKVRAFNGWVMPVLMYSFGILKWTQTELDALDRRVRTLLTANRMHHPRSSVMRLYISRKCGGRGFLNAKTLHNREVCSLREYFLETDVGMHRDVVAMDKALTPLSLANENWRKPIVLDTTDRMEIWKSKELHGRFYRVLHGPDVDLSASVSWLRFGDLFGETEGFVCAIMDEVIMTNNYRKYIVKDGTVDICRACHRSGESIRHIISGCSRLANGDYLHRHNLVAKIIHQQLALKYNLVESEVPYYKYVPDPVLENGNITLYWDRSIITDRTIVANKPDIVVIDRLERRTMIVDITVPHDENLVKAEKEKQIKYLDLAREVVDMWDVNTAVIVPIVVTANGIIAKSLDQHLRRLSLGSWIKGLIQKAVLLDTARIVRRFLSQEP

SEQ ID NO: 12077 - protein, 1198 aa, Phlogophora meticulosa
MLTRSAARRARPPPPASSLSSASSPPKPSTIVSTVKPAVPVASSSSDEYFSPPTSPPPARRRRGRRPPDGLGPRGPPASDRVPAPGGSVQRMRWTQSINENVMRSYYGATEGGSNLTAYRVRMLSLFQVLEPAVNVSAQRLSDQVRVIQRNHMLDDVVLDRLRTEMQSSRVITSPSHTVVPPQYNIVLSSFADGEGSDKVTNVSTQYNEELRSALEGAIREYRFMLPALRPRLPRLPMHNKNRALVAALDSQLSNYFDNCDDLTDAHSILYCAAVAACRVAHVKFPYDIATRPKPAVPAWQCRIERRIAGARALIGKLVCYREGNTRPRVMRYVRRAFLGTDISPRDYMSRVTERIDFLKQKVYAWASRIRRYKRRVERYTQNRTFQSNERWVYRAWERPVQGVTDTHLPEDDVMCSFWRNIWSVPVSHTEGDWTREVERACDPIPQMGAITISPQDVARAVRPLPNWKSPGPDGLHNFWIKWLQKSHARLASQFQSALETGSLPQFLTTGITHLLHKSGSTAEPKNYRPITCLPTVYKVLTSILRVKINNHIDSNSIMSASQNGCRNGSRGTKELLLIDSAISQQVRRSRKDLSTCWIDYKKAYDSVPHTWLKRVLELYKVDATLRTFLTSCMGQWRTVLRYPGCRQIQRNSEPIRIERGIFQGDSLSPLWFCLALNPLSTLLEDSGLGYRLKRGGQVVSHLLYMDDLKLFAPSDLQLMELLTVTKTFSSAIRMEFGVDKCAVMHVKRGKIVESVGTQLPDFINFRALSPIETYKYLGMSEALGINAADMKQSLKERFFGRLKKVCNSLLSGGNKVRAFNGWVMPVLMYSFGILKWTQTELDALDRRVRTFLTASRMHHPRSSVMRLYIPRKCGDRGFLNAKTLHNREICSLRDYFLETDVGMHRDVVAVDQGLTPLSLAKENWRKPVVLDTNDRKEVWQSKELHGRFFQALHGPDVDQLASVSWLRFGDLFGETEGFVCAIMDEVIMTNNYRRFIVKDGTVDICRACHRPGESIRHIISGCSRLANEEYLHRHNLVARIIHQQLALKYSLVESEVPYYKYVPDPVLENGSVTLYWDRSIITDRTIVANKPDIVVMDRIERRATIIDVTVPHDGNLVKAEKDKQIKYLDLAREVVDMWDVDSAIVVPIVVSANGLIAKSLDQHLRRLALGSWIKGLIQKAVLLDTARIVRRFLSLEP

SEQ ID NO: 12078 - protein, 1048 aa, Phlogophora meticulosa
MLDDAVLDRLRLNSRIYHVTPALPPVAVQLQSLPSVSPRPDYVGEEDDDAAISVSSQCNVRLRSALEDAFREYRSTPPELRSRLPRLPMHKKNKALMSALDSLLTKSFDNSKDLTDTHSILYCAAAAACRVANVKFPNTERATRPTVPAWQCSIQRRIDEARALIGKLICFREGNTRPRVMRFVRRAFSGTDISSRDYLTRVTERIDFLKQKICAWANRIRRYKRRVERYTQNRTFRSDERWVYRAWERPDQGVTDTCLPDDEAMCSFWRSIWSVPVSHTEGNWTREIERACEPLPEMGAINISPQDVASAVRPLPNWKSPGPDGLHNYWIKWLQSSHARLACQFQSALESGSLPQFLTTGITHLLHKSGSTAEPRNYRPITCLPTVYKVLTSILRSKIHNHIDSNLIMSFSQNGCRNGSRGTKELLLIDTAISQQVRRSRKDLSTCWVDYKKAYDSVPHTWLMRVLELYKVDATLRTFLMSCMGQWRTVLRYPGCQQTRENSEPIRIERGIFQGDSLSPLWFCLALNPLSTLLEGSGLGYRLRTGGQVISHLLYMDDLKLFAPNNLQLMELLKVTETFRSAIRMDFGVDKCAVMHVKRGEIVESVGTQLSDSIYLRSLSSTETYKYLGMSEALGINATDMKQSLKERFFGRLNKVLNSLLSGGNKVRAFNGWVMPVLMYSFGILKWTQTELDALDRRVRTLLTANRMHHPRSSVMTLYIPRKYGGRGFLNAKTLHNREICSLREYFLKADVGMHRDVVAVDKTFTPLSLANKNWRKPIVLDTADRMEIWKSKELHGRFYRVLHGPDVDLVASISWLRFGDLFGETEGFVCAIMDEVIMTNNYRKYIVKDGTVDICRACHRPGESIRHIISGCSRLANGDYLHRHNLVARIIHQQLALKYNLVYLEVPYYKYVPDPVLENGSITLYWDRSIITDRTIVANKPDIVVIDRSERRTMIIDITVPHDENLVKAEKEKQMKYLDLAREVVDMWDVNTAVIVPIVVTANGIIAKSLDQHLKRLSLGSWIKGLIQKAVLLDTARIVRRFLSQEP

SEQ ID NO: 12079 - protein, 1110 aa, Laspeyria flexula
MRWSSSVNENVMRAYFAATEGGINLTAYRSRMLALFQDLEPTTKVTAQRLSDQVRAIQRCRMLDDTVLDRLRLECLQNNPTVPLQVNNLNNIISNAITIQADHNLEEVDGISSVDTQCNEEVRVALERALREYRFTSLQFRPRLPRLPMHKKNLALVITLDSLLSDYFDNSENLGDTHSILYCAAVAACRLAGVKFLGIEPPSHERPSTPAWQCRIERRIAGAKILIGKLISFRAGNTRPRVMRFVNQAFSGTDVSPNEYLSRITERIDFLKQKVYAWANRIRRFKKRVDRYIVNRLFQRDQRRVYRNWERPTQEVSDERLPNATATNEFWSSIWSEPVLHSEGEWIWDVERACERIPLMESVVISAEDIASAVRPMANWKSPGPDGLHNFWLRWLRSSHGRLASQFQSAIESGSLPEFLTTGCTHLLHKSGSVTEPGNYRPITCLPSVYKLLTSVLRAKITKHIDDTRTMSISQNGCRRGSRGTKELLLVDMTISQQVRRSRKDLATCWIDYKKAFDSVPHSWLLRVLELYKVDITLRTFLESCMRQWRTVLTYPGCRLICGNGEPVRIKRGIFQGDSLSPLWFCLALNPLSTLLESSGLGYRLRRGGHVISHLLYMDDLKLIAPTDLQLKGLLKATEDFSKSIKMDFGVDKCAIMHVKRGEIVESDGIQLSDSINFRSLLVTDTYKYLGMSQALGIKETDMKQSLQERFFGRLKKVLNSLLSGGNKVRACNGWVMPLLMYSFGILKWTQTELDTLDRRVRTMLTAYRMHHPRSSVMRLYIPRKCGGRGFLNAKTLHNREVYNLREYFMGKVEGMHRDVVAVDSGLTPLSLAKDNWRRPIVLSTDDRRQVWQSKELHGRFYKALHGPDVDRVASVAWLRFGDLFGETEGFACAIADEVIKTNNYRKYILRDGTVDICRACHRPGESLRHIVSGCSRLANGEYLHRHNQVARIIHQQLALRYKLVDVEVPYYRYAPEPVLENSHTTLYWDRSIITDRTVIANKPDIVVLDRSKRLAVIVDITVPHDENLVKAEKDKQTKYLDLAHEIVDMWDVDSAIIVPIVVTVNGLVAKSLDQHLKRLGLGSWLKGLIQKAVLLGTARIVRRFLSLEP

SEQ ID NO: 12080 - protein, 868 aa, Xestia xanthographa
MRFVRQAFSGTDISPRDYMSRVTERIDFLKQKVYAWANRIRRYKRRVDRYTQNRTFQKDERWVYRAWERPDQGVADTHLPDDDAMCSFWRSIWSVPVSHAEGEWTRVIERACDPISEMGAITISPQDVARAVRPLPNWKSPGPDGLHNFWIKWFTRSHARLATLFQSALESGSLPEFLTTGITHLLHKSGSTAEPKNYRPITCLPTVYKVLTSILRTKISKHIDDNSVMSASQNGCRNGSRGTKELLLIDMAISHQVRRSRKDLSTCWIDYKKAYDSVPHTWLMRVLQLYKVDATLRTFLMSCMGQWRTVLHYPGCRQIQRNSEPIRIERGIFQGDSLSPLWFCLALNPLSTLLEDSGLGYRLRKDGQVISHLLYMDDLKLFAPNDLRLMELLKVTETFSNAIRMEFGVDKCAVMHVKRGEIVESVGTQLSDSITLRSLSATETYKYLGMSEALGVNVADMKQSLKERFFGRLKKVLNSLLSGGNKVRAFNGWVMPVLMYSFGILKWTQTELDALDTKVRKLLTAYRMHHPRSSVMRLYIPRKCGGRGFLNAKTLHNREICSLREYFLGTDVGMHQDVVTMDKGLTPLSLAKENWRKPPVLDTNDRREVWQSKELHGRFFRALHGPDVDLSASVAWLRSGDLFGETEGFVCAIMDEVMMTNNYRRFIVKDGTVDICRACHRPGESIRHIISGCSRLANGEYLHRHNLVARIIHQQLALKYNLVESEVPYYRYVPDPVLDNGCITLYWDQSIITDRTIVANKPDIVVVDRSERRAMIVDITVPHDENLVKAEKDKQIKYLDLAREVVDMWEVDSAIIVPIVVSAHGLIAKSLDQYLRRLSLGSWIKGLIQKAVLLDTARIVRRFLSLEP

SEQ ID NO: 12081 - protein, 1105 aa, Xestia xanthographa
MNENVMRAYYGATEGGINLTAYRGQMLSLFQVLEPGVSASAQRLSDQVRVIQRNHMLDDTVLDRLRSESRSNLVTPASPLIAVQVQNVSSAPPRSDRDGEEDDSEVISVSTQCNAQLRSALESAFREYRSTPPELRPRLPRLPMHNKNKALVCALDSQLSNCFDSSKDLADTHSILYCGAMAACRVARVKFPNNDRATRPKLTAPAWQCRIERRIGEARALIGKLICFREGNTRPRVMRFVRRAFSGTDISFRDYLARVAERIDSLKQKICAWASRIRRYKRRVERYTQNRTFQSDERWVYRAWERPDQGVTDMRLPDDSTMCSFWRSIWSVPVSHTEGDWTREVEQACDPIPEMGAIVISPQDVARAVRPLPIWKSPGPDGLHNFWIKWFQRSHACLASQFQSALESGSLPQFLTTGITHLLHKSGSVAEPKNYRPITCLPTVYKVLTSILRAKINQHIESNSIMSASQNGCRNGSRGTKELLLIDMAISQQVRRSRKNLSTCWIDYKKAYDSVPHTWLMRVLELYKVDATLRTFLMSCMGQWRTVLRYPGCRQIQGNSEPIRIERGIFQGDSLSPLWFCLALNPLSTLLERSGLGYLLRRDGQVISHLLYMDDLKLFAPNNLQLMKLLKVTETFSSAIRMEFGVDKCAVMHVKRGEIMESVGTQLSDSIHLRPLSSTETYKYLGMSEALGINTADMKQSLRERFFGRLNKVLGSLLSGGNKVRAFNGWVMPVLMYSFGILKWTQTELDALDRRVRTLLTANRMHHPRSSVMRLYIPRKCGGRGFLNAKTLHNREVCSLREYFLEADGEMHRDVVSVDKGLTPLSLANENWRKPKVLDTNDRKVEWQGKELHGRFYRALHGPDVDFLASVSWLRFGDLFGETEGFVCAIMDEVMMTNNYRKYIVKDGTVDICQACHRPGESIRHIISGCSSLANGEYLHRHNLVARIIHQQLALKYNLVEPEVPYYKYAPDPVLDNGHITLYWDRPITTDRTVVANRPDIVVIDRLERRTMIVDITIPHDENLVKAEKDKQFKYLDLAREVVDMWDVDTAVIVPIVVSANGLIAKSLDQHLRRLSLGSWIKGLIQKAVLLDTARIVRRFLSQEP

SEQ ID NO: 12082 - protein, 1209 aa, Xestia xanthographa
MITRSRAKQHQEAHPPSPGSSLSSASQPSGRATPVSIVSPVAAVASSSSDEFFSPPSTPSPSPRRGRRRGRGRPPAGLGPRGQQAPSRVPAAGGNVSRIRWTQSMNENVMRAYYGATEGGINLTAYRGQMLSLFQVLEPGVSASAQRLSDQVRVIQRNHMLDDTVLDRLRSESRSNLVTPASPLIAVQVQNVSSAPPRSDRDGEEDDSEVISVSTQCNAQLRSALESAFREYRSTPPELRPRLPRLPMHNKNKALVCALDSQLSNCFDSSKDLADTHSILYCGAMAACRVARVKFPNNDRATRPKLTAPAWQCRIERRIGEARALIGKLICFREGNTRPRVMRFVRRAFSGTDISFRDYLARVAERIDSLKQKICAWASRIRRYKRRVERYTQNRTFQSDERWVYRAWERPDQGVTDMRLPDDSAMCSFWRSIWSVPVSHTEGDWTREVEQACDPIPEMGAIVISPQDVARAVRPLPNWKSPGPDGLHNFWIKWFQRSHACLASQFQSALESGSLPQFLTTGITHLLHKSGSVAEPKNYRPITCLPTVYKVLTSILRAKINQHIESNSIMSASQNGCRNGSRGTKELLLIDMAISQQVRRSRKNLSTCWIDYKKAYDSVPHTWLMRVLELYKVDATLRTFLMSCMGQWRTVLRYPGCRQIQGNSEPIRIERGIFQGDSLSPLWFCLALNPLSTLLERSGLGYLLRRDGQVISHLLYMDDLKLFAPNNLQLMKLLKVTETFSSAIRMEFGVDKCAVMHVKRGEIMESVGTQLSDSIHLRPLSSTETYKYLGVSEALGINTADMKQSLRERFFGRLNKVLGSLLSGGNKVRAFNGWVMPVLMYSFGILKWTQTELDALDRRVRTLLTANRMHHPRSSVMRLYIPRKCGGRGFLNAKTLHNREVCSLREYFLEADGEMHRDVVSVDKGLTPLSLANENWRKPKVLDTNDRKVEWQGKELHGRFYRALHGPDVDFLASVSWLRFGDLFGETEGFVCAIMDEVMMTNNYRKYIVKDGTVDICRACHRPGESIRHIISGCSSLANGEYLHRHNLVARIIHQQLALKYNLVESEVPYYKYAPDPVLDNGHITLYWDRPITTDRTVVANRPDIVVIDRLERRTMIVDITIPHDENLVKAEKDKQFKYLDLAREVVDMWDVDTAVIVPIVVSANGLLAKSLDQHLRRLSLGSWIKGLIQKAVLLDTARIVRRFLSQEP

SEQ ID NO: 12083 - protein, 1196 aa, Xestia xanthographa
MLTRSAAARRARLPPPDSSLSSASPPPESSPIVNAVTPAVAVASSSSDEYFSPPTTPPPARRRGGRRPPDGLGPRGPPASNRVPAPGGSVQRMRWTQSINENVMRAYYGATEGGNNLTAYRVRMLSLFQVLEPAVNVSAQRLSDQVRVIQRNRMLDDTVLDRLRTEIQSSHVIATPPPSQAVVPPIPNCDNDVSNDMVTNVSTQCNVEMRSALEGAIREYRFMQPDLRPRIPRLPMHNKNRALVAVLDSQLSNYFDNCEDLTDVHSILYCAAVAVCRVAHVKFPSDRATRLKPAVPAWQYRIERRIGGARALIGKLVCFREGNTRPRVMRFVRQAFSGTDISPRDYMSRVTERIDFLKQKVYAWANRIRRYKRRVDRYTQNRTFQKDERWVYRAWERPDQGVADTHLPDDDAMCSFWRSIWSVPVSHAEGEWTRVIERACDPVSDMGAITISPQDVARAVRPLPNWKSPGPDGLHNFWIKWFTRSHARLATLFQSALESGSLPEFLTTGITHLLHKSGSTAEPKNYRPITCLPTVYKVLTSILRTKISKHIDDNFVMSASQNGCRNGSRGTKELLLIDMAISHQVRRFQKDLSTCWIDYKKAYDSVPHTWLMRVLELYKVDATLRTFLMSCMGQWRTVLRYPGCRQIQRNSEPIRIERGIFQGDSLSPLWFCLALNPLSTLLEDSGLGYRLRKDGQVISHLLYMDDLKLFAPNDLRLMELLKVTETFSSAIRMEFGVDKCAVMHVKRGEIVESVGTQLSDSITLRSLSATETYKYLGMSEALGVNVADMKQSLKERFFGRLKKVLNSLLSGGNKVRAFNGWVMPVLMYSFGILKWTQTELDALDTKVRKLLTAYRMHHPRSSVMRLYIPRKCGGRGFLNAKTLHNREICSLREYFLGTDVGMHRDVVTMDKGLTPLSLAKENWRKPPVLDTNDRREVWQSKELHGRFFRALHGPDVDLSASVAWLRSGDLFGETEGFVCAIMDEVMMTNNYRRFIVKDGTVDICRACHRPGESIRHIISGCSRLANGEYLHRHNLVARIIHQQLALKYNLVESEVPYYRYVPDPVLDNGCITLYWDQSIITDRTIVANKPDIVVVDRSERRAMIVDITVPHDENLVKAEKDKQIKYLDLAREVVDMWEVDSAIIVPIVVSAHGLIAKSLDQYLRRLSLGSWIKGLIQKAVLLDTARIVRRFLSLEP

SEQ ID NO: 12084 - protein, 1205 aa, Cosmia trapezina
MLTRSRAQQLRNTQPTSSGSSLSSASQLPEPAPDVSQVIPAAAVASSSSDEYFSPPTTPPPVRRRGRGRPPASLGPRGPSASDRVPAPGGSVQRMRWTQTVNENVMRAYFGATEGGSNLTAYRGRMLSLFQVLEPAVNVSAQRLSDQVRVIQRNHMLDDVVLDRLRLESPNSRVTSVSPMVAVQLQNLPSASPRPDCVGEEDDSGAISVSSQCNVQLRSALEDAFREYRSAPPGLRPRLPRLPMHKKNKALVGALDSQLSNCFDGSKDLADTHSILYCAAVAACRVAHVKFPNSDRVPRPKPAVPAWQCRIERRIGEARALICKLICFREGNTRPRVMRFVRRAFSGTDISPRDYFTCVTERIDFLKQKICAWANRIRRYRRRVERYTQNRTFQSDERWVYRAWERPDQGVADTQLPDDDAMCSFWRSIWSVPVSHTEGDWTREVERACDHIPQMGALTISPQDVARAVRPLPNWKSPGPDGLHNFWIKWFQRSHARLASQFQSALQSGSLPQFLTTGITHLLHKSGSTAEPRNYRPITCLPTVYKVLTSILRAKINKHIDTNSIMSASQNGCGNGSRGTKELLLIDMTINQQVRRSRKDLSTCWIDYKKAYDSVPHTWLMRVLELYKIDATLRTFLMSCMGQWRTVLRYPGCRNIQRNNEPIRIERGIFQGDSLSPLWFCLALNPLSTLLEDSGLGYRLRRGGQVISHLLYMDDLKLFAPNNLQLMELLKVTETFSSAIRMEFGVDKCAVMHVKRGEIVESVRTQLSDSIHLRSLSSLETYKYLGMSEALGINAADMKQSLRERFFGRLNKVLNSLLSGGNKVRAFNGWVMPVLMYSFGILKWTQTELDALDRRVRTLLTANRMHHPRSSVMRLYIPRKCGGRGFLNAKTLHNREVCSLREYFLEADVGMHRDVVSVDKGLTPLSLANENWRKPVVLDTNDRREVWQSKELHGRFYRVLHGPDVDFLASVSWLRFGDLFGETEGFVFAIMDEVMMTNNYRKYIVKDGTVDICRACHRPGESIRHIISGCSRLANGDYLHRHNLVARIIHQQLALKYSLVESEVPYYRYVPDPVLENGNITLYWDRSIITDRTIVANKPDIVVIDRLERRTMIVDIAVPHDENLVKAEKDKQIKYLDLAREVVDMWDVDTAIIVPIVVTANGIIAKSLDQHLRRLSLGGWIKGLIQKAVLLDTARIVRRFLSQQP

SEQ ID NO: 12085 - protein, 1205 aa, Cosmia trapezina
MLTRSRAQHLRNTHPTSSGSSLSSASQLPEPAPDVSQVIPAAAVASSSSDEYFSPPTTPPPVRRRGRGRPPSSLGPRGPPASDRVPAPGGSVQRMRWTQTVNENVMRAYFGATEGGSNLTAYRGRMLSLFQVLEPAVNVSAQRLSDQVRVIQRNHMLDDVVLDRLRLESRNSRVTSDSPMVAVQLQNLPSASPRPDRVGEEDDSGAISVSSQCNVQLRSALEDAFREYRSTPPGLRPRLPRLPMHKKNKALVCALDSQLSNCFDGSKDLADTHSILYCAAVAACRVAHVKFHNNDRVTRPKPAVPTWQCRIERRIGEARALIGKLICFREGNTRPRVMRFVRRAFSGMDISPRDYLTCVTERIDFLKQKICAWANRIRRYRRRVERYTKNRTFQSDERWVYRAWERPDQGVADTQLPDDDAMCSFWRSIWSVPVSHTEGDWTREVERACDHIPQMGALTISPQDVARAVRPLPNWKSPGPDGLHNFWIKWFQRSHARLASQFQSALQSGSLPQFLTTGITHLLHKSGSTAEPRNYRPITCLPTVYKVLTSILRAKINKHIDTNSIMSASQIGCGNGSRGTKELLLIDMTINQQVRRSRKDLSTCWIDYKKAYDSVPHTWLMRVLELYKIDATLRTFLMSCMGQWRTVLRYPGCRNIQRNSEPIRIERGIFQGDSLSPLWFCLALNPLSTLLEDSGLGYRLRRGGQVISHLLYMDDIKLFAPNNLQLMELLKVTETFSGAIRMEFGVDKCAVMHVKRGEIVESVRTQLSDSIHLRSLSSLETYKYLGMSEALGINAADMKQSLRERFFGRLNKVLNSLLSGGNKVRAFNGWVMPVLMYSFGILKWTQTELDALDRRVRTLLTANRMHHPRSSVMRLYIPRKCGGRGFLNAKTLHNREVCSLREYFLEADVGMHREVVSVDKGLTPLSLANENWRKPIVLDTNDRREVWQSKELHGRFYRVLHGPDVDFLASVSWLRFGDLFGETEGFVFAIMDEVMMTNNYRKYIVKDGTVDICRACHRPGESIRHIISGCSRLANGDYLYRHNLVARIIHQQLALKYSLVESEVPYYRYVPDPVLENGNITLYWDRSIITDRTIVANKPDIVVIDRLERRTVIVDIAVPHDENLVKAEKDKQIKYLDLAREVVDMWDVDTAIIVPIVVTANGIIAKSLDQHLRRLSLGGWIKGLIQKAVLLDTARIVRRFLSQQP

SEQ ID NO: 12086 - protein, 1047 aa, Cosmia trapezina
MLDDTVLDRLRSEMQSSRVIAPLSQTIVAPPPPQCNTSQADEGSDGTAANVSTQCNEELRSALEGAIQEYRFVSPELRPRLPRLPMHNKNRALVAALDSQLSNYFDDCEDLTDTHSILYCAAVAACRVAHVKFANDSRATRPKPAVPAWQCRIERRIGGARTLIGKLICFREGNTRPRVMRFVRRAFSGTDVSPQDYMSRVTERIDFLRQKVYAWANRIRRYKRRVDRYTQNRTFQSDERWVYRGWERPDQGVTDTRLPDDDAMCSFWRSIWSVPVSHTEGDWAREVRRACDPIPEMGAITICPQDVARAVRPLPNWKSPGPDGLHNFWIKWFLGSHARLAAQYQSALQSGSLPQFLTTGITHLLHKSGSTTEPKNYRPITCLPTVYKVLTSILRAKINEHIDTNSIMSASQNGSRNGSRGTKELLLIDMAISQQVRRSRRDLSTCWIDYKKAYDSVPHTWLMRVLELYKVDATLRTFLMSCMGQWRTVLRYPGCRNIQRNSEPIRIERGIFQGDSLSPLWFCLALNPLSTLLEDSGLGYRLRRGGQVISHLLYMDDLKLFAPSNLQLMELLKVTETFSSAIRMEFGVDKCAVMHVKRGEIVESVGTQLSDSINLRTLSAAETYKYLGMSEALGINVADMKQSLKERFFGRLKIVFNSLLSGGNKVRAFNGWVMPVLMYSFGILKWTQTELDALDRKVRTLLTAYRMHHPRSSVMRLYIPRKCGGRGFLNAKTLHNREICSLREYFLETDVGMHRDVVAVDKGLTPLSLAKENWRKPVVLDANDRMEVWQSKELHGRFFRALHGPDVNLLASVAWLRSGDLFGETEGFVCAIMDEVIMTNNYQRFIVKDGTVDICRACHRPGESIRHIISGCSRLANEEYLHRHNLVARIIHQQLALKYSLVESEVPYYRYVPDPVLENGHITLYWDRSIITDRTIVANKPDIVVVDRTERRAMIVDITVPHDGNLVKAEKDKQIKYIDLAREVVDMWDVDSAVIVPIVVSANGLIAKSLDQHLRRLSLGSWIKGLIQKAVLLDTARIVRRFLSLEP

SEQ ID NO: 12087 - protein, 1205 aa, Cosmia trapezina
MLTRSRAQHLRNTHPTSSGSSLSSASQLPEPAPDVSQVIPAAAVASSSSDEYFSPPTTPPPVRRRGRGRPPASLGPRGPPASDRVPAPGGSVQRMRWTQTVNENVMRAYFGATEGGSNLTAYRGRMLSLFQVLEPAVNVSAQRLSDQVRVIQRNHMLDDVVLDRLRLESRNSRVTSDSPMVAVQLQNLPSASPRPDRVGEEDDSGAISVSSQCNVQLRSALEDAFREYRSTPPGLRPRLPRLPMHKKNKALVCALDSQLSNCFDGSKDLADTHSILYCAAVAACRVAHVKFHNNDRVTRPKPAVPTWQCRIERRIGEARALIGKLICFREGNTRPRVMRFVRRAFSGMDISPRDYLTCVTERIDFLKQKICAWANRIRRYRRRVERYTQNRTFQSDERWVYRAWERPDQGVADTQLPDDDAMCSFWRSIWSVPVSHTEGDWTREVERACDHIPQMGALTISPQDVARAVRPLPNWKSPGPDGLHNFWIKWFQRSHARLASQFQSALQSGSLPQFLTTGITHLLHKSGSTAEPRNYRPITCLPTVYKVLTSILRAKINKHIDTNSIMSASQNGCGNGSRGTKELLLIDMTISQQVRRSRKDLSTCWIDYKKAYDSVPHTWLMRVLELYKIDATLRTFLMSCIGQWRTVLRYPGCRNIQRNSEPIRIERGIFQGDSLSPLWFCLALNPLSTLLEDSGLGYRLRRGGQVISHLLYMDDLKLFAPNNLQLMELLKVTETFSSAIRMEFGVDKCAVMHVKRGEIVESVRTQLSDSIHLRSLSSLETYKYLGMSEALGINAADMKQSLRERFFGRLNKVLNSLLSGGNKVRAFNGWVMPVLMYSFGILKWTQTELDALDRRVRTLLTANRMHHPRSSVMRLYIPRKCGGRGFLNAKTLHNREVCSLREYFLEADVGMHREVVSVDKGLTPLSLANENWRKPIVLDTNDRREVWQSKELHGRFYRVLHGPDVDFLASVSWLRFGDLFGETEGFVFAIMDEVMMTNNYRKYIVKDGTVDICRACHRPGESIRHIISGCSRLANGDYLHRHNLVARIIHQQLALKYSLVESEVPYYRYVPDPVLENGNITLYWDRSIITDRTIVANKPDIVVIDRLERRTVIVDIAVPHDENLVKAEKDKQIKYLDLAREVVDMWDVDTAIIVPIVVTANGIIAKSLDQHLRRLSLGGWIKGLIQKAVLLDTARIVRRFLSQQP

SEQ ID NO: 12088 - protein, 1205 aa, Cosmia trapezina
MLTRSRAQHLRNTHPTSSGSSLSSASQLPEPAPDVSQVIPAAAVASSSSDEYFSPPTTPPPVRRRGRGRPPASLGPRGPPASDRVPAPGGSVQRMRWTQTVNENVMRAYFGATEGGSNLTAYRGRMLSLFQVLEPAVNVSAQRLSDQVRVIQRNHMLDDVVLDRLRLESRNSRVTSDSPMVAVQLQNLPSASPRPDRVGEEDDSGAISVSSQCNVQLRSALEDAFREYRSTPPGLRPRLPRLPMHKKNKALVCALDSQLSNCFDGSKDLADTHSILYCAAVAACRVAHVKFHNNDRVTRPKPAVPTWQCRIERRIGEARALIGKLICFREGNTRPRVMRFVRRAFSGMDISPRDYLTCVTERIDFLKQKICAWANRIRRYRRRVERYTQNRTFQSDERWVYRAWERPDQGVADTQLPDDDAMCSFWRSIWSVPVSHTEGDWTREVERACDHIPQMGALTISPQDVARAVRPLPNWKSPGPDGLHNFWIKWFQRSHARLASQFQSALQSGSLPQFLTTGITHLLHKSGSSAEPRNYRPITCLPTVYKVLTSILRAKINKHIDTNSIMSASQNGCGNGSRGTKELLLIDMTISQQVRRSRKDLSTCWIDYKKAYDSVPHTWLMRVLELYKIDATLCTFLMSCMGQWRTVLRYPGCRNIQRNSEPIRIERGIFQGDSLSPLWFCLALNPLSTLLEDSGLGYRLRRGGQVISHFLYMDDLKLFAPNNLQLMELLKVTETFSSAIRMEFGVDKCAVMHVKRGEIVESVRTQLSDSIHLRSLSSLETYKYLGMSEALGINAADMKQSLRERFFGRLNKVLNSLLSGGNKVRAFNGWVMPVLMYSFGILKWTQTELDALDRRVRTLLTANRMHHPRSSVMRLYIPRKCGGRGFLNAKTLHNREVCSLREYFLEADVGMHREVVSVDKGLTPLSLANENWRKPIVLDTNDRREVWQSKELHGRFYRVLHGPDVDFLASVSWLRFGDLFGETEGFVFAIMDEVMMTNNYRKYIVKDGTVDICRACHRPGESIRHIISGCSRLANGDYLHRHNLVARIIHQQLALKYSLVESEVPYYRYVPDPVLENGNITLYWDRSIITDRTIVANKPDIVVIDRLERRTVIVDIAVPHDENLVKAEKDKQIKYLDLAREVVDMWDVDTAIIVPIVVTANGIIAKSLDQHLRRLSLGGWIKGLIQKAVLLDTARIVRRFLSQQP

SEQ ID NO: 12089 - protein, 960 aa, Mamestra brassicae
MHNKNRALVCALDSQLTICFDSSEDLADTHSILYCAAAAACRVAHVKFLNSDRATRPAVPAWQCRIERRIGEARALIGKLICFREGNTRRRVMRFVRRAFSGTDTSPRDYLTRVTERIDFLKQKIYAWANRIRRYKRRVERYTQNRTFQSNERWVYGAWERPDQGVTDTRLPDDDVMCSFWRNIWSVPVSHTEGDWIREVERACDPILEMGATTISPQDVARAVRPLPNWKSPGPDGLHNFWIKWFTGSHARLASQFQSALESGSLPQFLTTGITHLLHKSGSTAEPKNYRPITCLPTVYKVLTSILRAKINHHIESNSIMSASQNGCRNGSRGTKELLLMDIAISQQVRRSRKDLSTCWIDYKKAYDSVPHTWLMRVLELYKVDAVLRTFLMSCMGQWRTVLRYPGCRQIQVNGDPIRIERGIFQGDSLSPLWFCLALNPLSTLLEGSGQGYRLRRGGQVISHLLYMDDLKLFAPNNLQLMELLKVTETFSSAISMEFGVDKCAVMHVKRGEIMESVGTQLSDSIHLRSLSSTETYKYLGMSEALGINANDMKQSLKERFFGRLNKVLNSLLSGGNKVRAFNGWVMPVLMYSFGILKWTQTELDALDRRVRSLLTANRMHHPRSSVMRLYIPRKCGGRGFLNAKTLHNREICSLREFFLEADVGMHRDVVAVDKGLTALSLANENWRKPVVLDTNDRRKVWQSKELHGRFYRVLHGPDVDFLASVAWLRFGDLFGETEGFVCAIMDEVMMTNNYRKYIVKDGTVDICRACHRPGESIRHIISGCSSLANGDYLHRHNLVARIIHQQLALKYNLVESEVPYYRYVPDPVLENGNCTLYWDRSIITDRTIVANKPDIVVIDRLERRAMIVDIAVPHDENLVKTEKDKQTKYLDLAREVVDMWDVNTAVIVPIVVTANGIIAKSLDQHLKRLSLGSWIKGLIQKAVLLDTARIVRRFLSLEP

SEQ ID NO: 12090 - protein, 961 aa, Mamestra brassicae
MHNKNRALVAALDSQLSNYFDDCEDLTDTHSIMYCAAVAACRVAHVKMTNDRVTRPKLAVPAWQCRIERRIGRARALIGKLICFREGNTRPRVMRFVRRAFSGTDISPRDYMSRVTERIDFLKQKVYAWANRIRRYRRRVERYTQNRTFRSNERWVYRVWEQPDQGVTDTRLPDDDAMCSFWRNIWSVPVSHTEGGWIREVERACDPLPEMGAITISPQDVARALRPLPNWKSPGPDGLHNFWIKWLQRSHARLASQYQTALESGSLPEFLTTGVTHLLHKSGSTAEPKNYRPITCLPTVYKVFTSILRAKINNHINSNNIMSVSQNGCRNGSRGTKELLLIDMAISQQVRRFRKDLSTCWIDYKKAYDSVPHTWLMRVLELYKIDTMLRTFLMSCMGQWRTVLRYPGCRNIQRNSEPVRIERGIFQGDSLSPLWFCLALNPLSTLLENSGLGYRLKRGGQVISHLLYMDDLKLFAPSNLQLMELLKVTETFSSAIRMEFGVDKCAVMHVKRGEIMESVGTQLSDSINLSSLSSTETYKYLGMSEALGINVTDMKQSLRERFFGRLKKVFNSLLSGGNKVRAFNGWVMPVLMHSFGVLKWTQTELDALDRRVRTLLTAYRMHHPRSSVMRLYIPRKCGGRGFLNAKTLHNREICSLREYFLAVDVGMHRDVVTVDKGLTPLSLANENWRKPAVLDTSDRRAVWQSKELHGRFFRALHGPDVDQLASVAWLRFGDLFGETEGFVCAIMDEVIMTNNYRRFIVKDGTVDICRACHRPGESIRHIVSGCSRLANGEYLHRHNLVARIIHQQLALKYSLVESEVPYYRYAPDPVLDNGNITLYWDRSIITDRTIVANKPDIVVVDRIERRAMIVDITVPHDENLVKAEKDKQIKYIDLAREVVDMWDVDSAIIVPIVVSANGLIATSLDQHLRRLSLGSWIKGLIQKAVLLDTARIVRRFLSLEP

SEQ ID NO: 12091 - protein, 1107 aa, Mamestra brassicae
MRWTQTINENVMRSYYGATEGGTNLTAYRGRMLSLFQVLEPAVNVSAQRLSDQVRVILRNRMLDDAVLDRLRLESRSGRVSPASPPAAVEIQSSISPRPNNVGEDDDDVAISVSTQCNERLRSALEDAFREYRSTPPELRPRLPRLPMHNKNRALVCALDSQLTNCFDSSEDLADTHSILYCAAAAACRVAHVKFLNSDRATRPAVPAWQCRIERRIGEARALIGKLICFREGNTRRRVMRFVRRAFSGTDTSPRDYLTRVTERIDFLKQKIYAWANRIRRYKRRVERYTQNRTFQSNERWVYRAWERPDQGVTDTRLPDDDVMCSFWRNIWSVPVSHTEGDWIREVERACDPILEMGAITISPQDVARAVRPLPNWKSPGPDGLHNFWIKWFTGSHVRLASQFQSALESGSLPQFLTTGITHLLHKSGSTAEPKNYRPITCLPTVYKVLTSILRAKINHHIESNSIMSASQNGCRNGSRGTKELLLMDIAISQQVRRSRKDLSTCWIDYKKAYDSVPHTWLMRVLELYKVDAVLRTFLMSCMGQWRTVLRYPGCRQIQVNSDPIRIERGIFQGDSLSPLWFCLALNPLSTLLEGSGQGYRLRRGGQVISHLLYMDDLKLFAPNNLQLMELLKVTETFSSAISMEFGVDKCAVMHVKRGEIMESVGTQLSDSIHLRSLSSTETYKYLGMSEALGINANDMKQSLKERFFGRLNKVLNSFLSGGNKVRAFNGWVMPVLMYSFGILKWTQTELDALDRRVRSLLTANRMHHPRSSVMRLYIPRKCGGRGFLNAKTLHNREICSLREFFLEADVGMHRDVVAVDKGLTALSLANENWRKPVILDTNDRREVWQSKELHGRFYRVLHGPDVDFLASVAWLRFGDLFGETEGFVCAIMDEVMMTNNYRKYIVKDGTVDICRACHRPGESIRHIISGCPSLANGDYLHRHNLVARIIHQQLALKYNLVESEVPYYRYVPDPVLENGNCTLYWDRSIITDRTIVANKPDIVVIDRLERRAMIVDIAVPHDENLVKTEKDKQTKYLDLAREVVDMWDVNTAVIVPIVVTANGIIAKSLDQHLKRLSLGSWIKGLIQKAVLLDTARIVRRFLSQGP

SEQ ID NO: 12092 - protein, 960 aa, Mamestra brassicae
MHNKNRALVCALDSQLANCFDSSEDLADTHSILYCAAAAACRVAYVKFPNSDRATRPAVPAWQCRIERRIGEARALIGKLICFREGNTRRRVMRFVRRAFSGTDTSPRDYLTRVTERIDFLKQKIYAWANRIRRYKRRVERYTQNRTFQSNERWVYRAWERPDQGVTDTRLPDDDVMCSFWRNIWSVPVSHTEGDWTREVERACDPIPEMGAITISPQDVARAVRPLPNWKSPGPDGLHNFWIKWFKRSHARLASQFQSALESGSLPQFLTTGITHLLHKSGSTAEPKNYRPITCLPTVYKVLTSILRAKINQHIETNSIMSASQNGCRNRSRGTKELLLIDVAISQQVRRSRRDLSTCWIDYKKAYDSVPHTWLMRVLELYKVDAVLRTFLMSCMGQWRTVLRYPGCRQIQANSDPIRIERGIFQGDSLSPLWFCLALNPLSTLLEGSGQGYRLRRGGQVISHLLYMDDLKLFAPNNLQLMKLLKVTETFSSAISMEFGVDKCAVMHVKRGEIMESVGTQLSDSIHLRSLSSTETYKYLGMSEALGINANDVKQSLKERFFGRLNKVLNSLLSGGNKVRAFNGWVMPVLMYSFGILKWTQTELDALDRRVRSLLTANRMHHPRSSVMRLYIPRKCGGRGFLNAKTLHNREICSLREFFLEADVGMHRDVVAVDKGLTALSLANENWRKPVVLDTNDRREVWQSKELHGRFYRVLHGPDVDFLASVAWLRFGDLFGETEGLVCAIMDEVMMTNNYRKYIVKDGTVDICRACHRPGESIRHIISGCSSLANGDYLHRHNLVARIIHQQLALKHNLVESEVPYYRYVPDPVLENGNCTLYWNRSIITDRTIIANKRDIVVIDRLERRAMIVDIAVPHDVNLVKTEKDKQTKYLDLAREVVDMWDVNTAVIVPIVVTANGIIAKSLDQHLKRLSLGSWIKGLIQKAVLLDTARIVRRFLSQGP

SEQ ID NO: 12093 - protein, 1200 aa, Noctua fimbriata
MKMLTRAAAKRARLSPPDPSLSSASPPPKSSPVVSAVTPAVAVASSSSDEYFSPPTTPPPVRRRGGRRPPDGLGPRGPPASDRVPAPGGSVQRMRWTQSINANVMRAYYGATEVGNNLTAYRVRMLSLFQVLEPAVNVSAQRLSDQVRVIQRNRMMDDTVLDRLRTEMQSSHVIATPPPQAVVPPQSTIIPNRDNDVSNDIVTNVSTQCNEEMRSALEGAIREYRFMQPDLRPRIPRLPMHNKNRALVAVLDSQLSNYFDNCEDLTDAHSILYCAAVAACRVAHVKFSDDRATRPKPAVPPWQYRIERRIGGARTLIGKLICFREGNTRPRVMRFVRRAFSGTDISPRDYMSRITERIDFLKQKVYAWANRIRRYKRRVDRYTQNRTFQRDERWVYRAWERPNQGVADTRLPDDDAMCSFWRSIWSVPVSHTEGEWTQGVERACDLVPEMGAITISPQDVVRAVRPLPNWKSPGPDGLHNFWIKWFTRSHARLAILFQSALESGSLPEFLTTGITHLLHKSGSTAEPKHYRPITCLPTVYKVLTSILRAKINKHIDDNSIMSASQNGCRNGSRGTKELLLIDMAISQQVLRSRSDLSTCWIDYKKAYDSVPHTWLMRVLELYKVDATLRTFLMSCMGQWRTVLRYPGCRQIQRNSEPIRIERGIFQGDSLSPLWFCLALNPLSTLLEDSGLGYRLRRGGQVISHLLYMDDLKLFAPNDSQLMELLKVTETFSSTIRMEFGVDKCAVMHVKRGEILESVGTQLSDSINLRSLSATETYKYLGMSEALGINVADMKQSLKERFFGRLKKVFNSLLSGGNKVRAFNGWVMPVLMYSFGILKWTQTELDALDRRVRTLLTAYRMHHPRSSVMRLYIPRKCGGRGFLNAKTLHNREICSLREYFLETDVGMHRDVVAVDKGLTPLSLAKENWRKPLVLDTNDRMEVWQSKELHGRFFRALHGPDVDLSASVAWLRSGDLFGETEGFVCAIMDEVMMTNNYRRFIVKDGTVDICRACHRPGESIRHIISGCSRLANGEYLHRHSLVARIIHQQLALKYNLVESEVPYYKYVPDPVLENGSITLYWDQSIITDRTIVANKPDIVVVDRSERRTMIVDITVPHDENLVKAEKDKKIKYLDLAREVVDMWDVDSAIIVPIVVSAHGLIAKSLDQYLRRLSLGSWIKGLIQKAVLLDTARIVRRFLSLEP

SEQ ID NO: 12094 - protein, 974 aa, Noctua fimbriata
MQPDLRPRIPRLPMHNKNRALVAVLDSQLSNYFDNCEDLTDAHSILYCAAVAACRVAHVKFSDDRATRPKPAVPPWQYRIERRIGGARALIGKLICFREGNTRPRVMRFVRRAFSGTDISPRDYMSRITERIDFLKQKVYAWANRIRRYKRRVDRYTQNRTFQRDERWVYRAWERPDQGVADTRLPDDDAMCSFWRSIWSVPVSHTEGEWTQGVERACDLVPEMGAITISPQDVVRAVRPLPNWKSPGPDGLHNFWIKWFTRSHARLAILFQSALESGSLPEFLTTGITHLLHKSGSTAEPKNYRPITCLPTVYKVLTSILRAKINKHIDDNSIMSASQNGCRNGSRGTKELLLIDMAISQQVRRSRSDLSTCWIDYKKAYDSVPHTWLMRVLELYKVDATLRTFLMSCMGQWRTVLRYPGCRQIQRNSEPIRIERGIFQGDSLSPLWFCLALNPLSTLLEDSGLGYRLRRGGQVISHLLYMDDLKLFAPNDLQLMELLKVTETFSSAIRMEFGVDKCAVMHVKRGEIVESVGIQLSDSINLRSLSATETYKYLGMSEALGINVADMKQSLKERFFGRLKKVFNSLLSGGNKVRAFNGWVMPVLMYSFGILKWTQTELDALDRRVRTLLTAYRMHHPRSSVMRLYIPRKCGGRGFLNAKTLHNREICSLREYFLETDVGMHRDVVAVDKGLTPLSLAKENWRKPLVPDTNDRMEVWQSKELHGRFFRALHGPDVDLSASVAWLRSGDLFGETEGFVCAIMDEVMMTNNYRRFIVKDGTVDICRACHRPGESIRHIISGCSRLANGEYLHRHNLVARIIHQQLALKYNLVESEVPYYKYVPDPVLENGSITLYWDQSIITDRTIVANKPDIVVVDRSERRTMIVDITVPHDENLVKAEKDKKIKYLDLAREVVDMWDVDSAIIVPIVVSAHGLIAKSLDQYLRRLSLGSWIKGLIQKAVLLDTARIVRRFLCLEP

SEQ ID NO: 12095 - protein, 1147 aa, Noctua fimbriata
MITRSRAKQLQEAHTPSPGSSLNGRATSVSTVSPVAAVASSSSDEFFSPPSTPSPSPRRRGRGRPPAGLGPRGQPAPNRVPAAGGNVSRMRWTQSINEQVMRAYYGATEGGSNLTAYRGRMLSLFQVLEPGVSVSAQRLSDQVRVIQRNHMLDDTVLDRLRSESRSNLVTPASPMTAVQLQNVTIASPRSDRGGEGDDDEVISVSTQCNAQLRSALESAFREYRSTPPELRPRLPRLPMHKKNKALVCALNSQLSNCFDTSKDLADTHSILYCGAVAACRVAHVKFPNNDRATRPKLAVPAWQCRIERRIGEARALIGKLICFREGNTRPRVMRFVRRAFSGTDVSFRDYLARVTERIDFLKQKICAGASRIRRYKRRVERYTQNRTFQSDERWVYRAWERPDQGVTDTRLPDDNAMCSFWRSIWSVPVSHTEGDWIREVERACDPIPEMGAIIISPQDVACAVRPLPNWKSPGPDGLHNFWIKWFQRSHVRLASQFQLALESGSLPQFLTTGITHLLHKSGSTAEPKNYRPITCLPTVYKVLTSILRAKINHHIDSNSIMSASQNGCRNGSHGTKELLLIDMAVSQQVRRSRRDLSTCWIDYKKAYDSVPHTWLMRVLELYKVDATLRTFLMSCMGNWRTVLRYPGCRQIQGNSEPIRIERGIFQGDSLSPLWFCIALNPLSTLLEGSGLGYRLRRDGQVISHLLYMDDLKLYAPNNLQLMKLLKVTETFSSSIRMEFGVDKCAVMHVKQAEIMESVGTQLSDSIHLRSLSSTETYKYLGMSEALGINTADMKQSLRERFFGRLNKVLSSLLSGGNKVRAFNGWVMPVLMYSFGILKWTQTELDALDRRVRVLLTANRMHHPRSSVMRLYIPRKCGGRGFLNAQTLHNREVCSLREYFLEADVGMHRDVVSVDKGLTPLSLANENWRKPRVLDTNDRKEVWQGKELHGRFYRALHGPDVDFLASVAWLRFGDLFGETEGFVCAIMDEVMMTNNYRKYIVKDGTVDICRACHRPGESIRHIISGCSRLANGEYLHRHNLVAKIIHQQLALKYNLVESEVPYYKYVPDPVLDDGNITLYWDRSIVTDRTIVANKPDIVVIDRLERRAMIVDITVPHDENLVKAEKDKQFKYLDININIWLTRLSTYGT

SEQ ID NO: 12096 - protein, 1198 aa, Noctua fimbriata
MLTRAAAKRARLSPPDPSLSSASPPPESSPVMSAVTPAVAVASSSSDEYFSPPTTPPPVRRRGGRRPPDGLGPRGPPASDRVPAPGGSVQRMRWTQSINENVMRSYYGATEGGNNLTAYRVRMLSLFQVLEPAVNVSAQRLSDQVRVIQRNRMLDDTVLDRLRTEMQSSHVIATPPPQAVVPPQSTIIPNRDNDVSNDIVTNVSTQCNEEMRSALEGVIREYRFMQPDLRPRIPRLPMHNKNRALVAVLDSQLSNYFDNCEDLTDAHSILYCAAVAACRVAHVKFSNDRATRPKPAVPPWQYRIERRIGGARALIGKLICFREGNTRPRVMRFVRRAFSGTDISPRDYMSRITERIDFLKQKVYAWANRIRRYKRRVDRYTQNRTFQRDERWVYRAWERPDQGVADTRLPDDDAMCSFWRSIWSVPVSHTEGEWTQGVERACDLVPEMGAITISPQNVVRAVRPLPNWKSPGPDGLHNFWIKWFTRSHARLAILFQSALESGSLPEFLTTGITHLLHKSGSTAEPKNYRPITCLPTVYKVLTSILRAKINKHIDDNSIMSASQNGCRNGSRGTKELLLIDMAISQQVRRSRRDLSTCWIDYKKAYDSVPHTWLMRVLELYKVDATLRTFLMSCMGQWRTVLRYPGCRQIQRNSEPIRIERGIFQGDSLSPLWFCLALNPLSTLLEDSGLGYRLRRGGQVISHLLYMDDLKLFAPNDLQLMELLKVTETFSSAIRMEFGVDKCAVMHVKRGEIVESVGTQLSDSINLRSLSATETYKYLGMSEALGINVADMKQSLKELFFGRLKKVFNSLLSGGNKVRAFNGWVMPVLMYSFGILKWTQTELDALDRRVRTLLTAYRMHHPRSSIMRLYIPRKCGGRGFLNAKTLHNREICSLREYFLETDVGMHRDVVAVDKGLTPLSLAKENWRKPLVLDTNDRMEVWQSKELHGRFFRALHGPDVDLSASVAWLRSGDLFGETEGFVCAIMDEVMMTNNYLRFIVKDGTVDIYRACHRPGESIRHIISGCTRLANGEYLHRHNLVARIIHQQLALKYNLVESEVPYYKYVPDPVLENGSITLYWDQSIITDRTIVANKPDIVVVDRSERRTMIVDITVPHDENLVKAEKDKKIKYLDLAREVVDMWDVDSAIIVPIVVSAHGLIAKSLDQYLRRLSLGSWIKGLIQKAVLLDTARIVRRFLSLEP

SEQ ID NO: 12097 - protein, 1199 aa, Atethmia centrago
MLTRAAAARRARLPPPDSSLSSASPPPVPSPTVSAVTTPAAVVASSSSDEYFSPPTTPPPVRRRGGRRPPDGLRPRGPPASDRVPAPGESVQRMRWTRSINENVMRSYYGATEGGNNLTAYRVRMLSLFQVLEPAVNVSAQRLSDQVRVIQRNHMLDDTVLERLRSEIQSSHVIAPPSQTVVVLPQLDTHQADEGSDDRATNVSTQCNVELRSALEDAIREYRFMSPEVRPRLPRLPMHKKNRALVAVLDSQLSNYFDDCEDLTDTHSILYCAAVAVCRVAHVIFPNDSRATRPKPTVPIWQCRIERRIGGARALIGKLICFREGNTRPRVMRFVRRAFSGTDISPQDYMFRVTERIDFLKQKVYAWANRIRRYKRRVDRYTQNRTFQSDERWVYRGWEQRDQGVTDTRLPDDDVMCSFWRSIWSVPVSHTEGDWARKIERACDPLPEMGAITICPQDVARAVRPLPNWKSPGPDGLHNFWLKWFSGSHARLAAQYQTALESGSLPQFLTIGVTHLLHKSGSTAEPKNYRPITCLPTVYKVLTSILRAKINKHIDTNSIMSASQNGCRNGSRGTKELLLIDMTISQQVRRFRKDLSTCWIDYKKAYDSVPHTWLMRVLELYKVDATLRTFLISCMGQWRTVLRYPGCRNIQRNSEPIRIERGIFQGDSLSPLWFCLALNPLSTLLEDSGLGYRLRRGGQVISHLLYMDDLKLFASNNLQLMELLKITETFSSAIRMEFGVDKCAVMHVKRGEIVESVGTQLSDSINLRALSASETYKYLGMSEALGINVTDMKQSLKQRFFDRLKKVFNSLLSGGNKVRAFNGWVMPVLMYSFGILKWTQTELDALDRRVRTLLTAYRMHHPRSSVMRLYIPRKCGGRGFLNAKTLHNREVCSLREYFLEADVGMHRDVVAVDKGLTPLSLAKENWRKLVVRDTNDGREVWQSKELHGRFFRALHEPDVDFQASVAWLRFGDLFGETEGFVCAIMDEVIMTKNYRRFIVKDGTVDMCRACHRPGESIRHIISGCSRLANEEYLHRHNLVARIIHQQLALKYSLVESEVPYYRYVPDPVLDNGNITLYWDRSIITDRTIVANKPDIVVVDRTERRAMIVDITVPHDGNLVKAEKDKQIKYLDLAREVVDMWDVDSAIIVPIVVSANGLIAKSLDQHLRRLTLDGWIKGLIQKAVLLDTARIVRRFLSLEP

SEQ ID NO: 12098 - protein, 975 aa, Atethmia centrago
MSPEVRPRLPRLPMHKKNRALVAVLDSQLSNYFDDCEDLTDTHSILYCAAVAVCRVAHVIFPNDSRATRPKPTVPIWQCRIERRIGGARALIGKLICFREGNTRPRVMRFVRRAFSGTDISPQDYMSRVTERIDFLKQKVYAWANRIHRYKRRVDRYTQNRTFQSDERRVYRGWEQRDQGVTDTRLPDDDVMCSFWRSIWSVPVSHTEGDWARKVERACDPLPEMGAITICPQDVARAVRPLPNWKSPGPDGLHNFWLKWFLGSHARLTAQYQTALESGSLPQFLTIGVTHLLHKSGSTAEPKNYRPITCLPTVYKVLTSILRAKINKHIDTNSIMSASQNGCRNGSRGTKELLLIDMTISQQVRRFRKDLSTCWIDYKKAYDSVPHTWLMRVLELYKVVATLRTFLMSCMGQWRTVLRYPGCRNIQRNSEPIRIERGIFQGDSLSPLWFCLALNPLSTLLEDSGLGYRLRRGGQVISHLLYMDDLKLFASNNLQLMELLKITETFRSAIRMEFGVDKCAVMHVKRGEIVESVGTQLSDSINLRALSASETYKYLGMSEALGINVTDMKQSLRQRFFDRLKKVFNSLLSGGNKRRAFNGWVMPVLMYSFFILKWTQTELDALDRRVRTLLTAYRMHHPRSSVMRLYIPRKCGGRGFLNAKTLHNREVCSLREYFLEADVGMHRDVVAVDKGLTPLSLAKENWRKLVVLDTNDRREVWQSKELHGRFFRALHEPDIDFQASVAWLRFGDLFGETEGFVCAIMDEVIMTKNYRRFIVKDGTVDMCRACHRPGESIRHIIYGCSRLANEEYLHRHNLVARIIHQQLALKYSLVESEVPYYRYVPDPVLDNGNITLYWDRSIITDRTIVANKPDIVVVDRTERRAMIVDITVPHDGNLVKAEKDKQIKYLDLAREVVDMWDVDSAIIVPIVVSANGLIAKSLDQHLRRLTLDGWIKGLIQKAVLLDTARIVRRFLSLEP

SEQ ID NO: 12099 - protein, 1198 aa, Atethmia centrago
MLTRSAAVRARLPPPDSSLSSASPPPVPSPTVCAVTTPTAAVASSSSDEYFSPPTTPPPVRRRGGRRPPDGLGSRGPPASDRIPAPGGSVKRMRWTQSVNENVMRSYYGATEGGNNLTAYRVRMLSLFQVLEPAVNVSAQRLSDQVRVIQRNHMLDDTVLDRLRSEMQRSHVIVPPSQTVVLSPQLSTNQADEGSDDRATNVSTQCNVELRSALEDAIREYRLMSPELRPRLPRLPMHKKNRALVAALDSQLSNYFDDCEDLTDTHSILYCAAVAVCRVAHVKFAKDSRTTRPKPTVPAWQCRIESRIGGARALIGKLICFREGNTRPRVMRFVRRAFSGTDIGPQDYMTRVTERIDFLKQKVYAWANRIRRYKRRVERYTQNRNFQSDERWVYRGWERPNQDVTDTRLSDDDVMCSFWRSIWSVPVSHTEGDWARKVERACDPIPEMGAITICPQDVARAVRPLPNWKSPGPDGLHNFWLKWFLRSHARLAAQYQTALESGSLPQFLTTGVTHLLHKSGSTAEPKNYRPITCLPTVYKLLTSILRAKINKHIDTNSIMSASQNGCRNGSRGTKELLLIDMTISQQVRRSRKDLSTCWIDYKKAYDSVPHTWLMRVLELYKVDASLRTFLMSCMGQWRTVLRYPGCRNIQRNSEPIRIERGIFQGDSLSPLWFCLALNPLSTLLEDSGLGYRMRRGGQVISHLLYMDDLKLFASNNLQLMELLKITESFSSAIRMEFGVDKCAVMHVKRGKIVESVGTQLSDSINLRTLSASETYKYLGMSEALGINVTDMKQSLKERFFGRLKKVFNSLLSGGNKVRAFNGWIMPVLMYSFGILKWTQTELDALDRRVRTLLTAYRMHHPRSSVMRLYIPRKCGGRGFLNAKTLHNREVCSLREYFLEADVGMHRDVVAVDKGLTPLSLAKENWRKLVVLDTNDRREVWQSKELRGRFFRALHEPDVDFQASVAWLRFGDLFGETEGFVCAIMDEVIMTKNYRRFIVKDGTVDVCRACHRPGESIRHIISGCSRLANEEYLHRHNLLARIIHQQLALKYSLVESEVPYYRYVPDPVLDNGNITLYWDRSIITDRTIVANKPDIVVVDRTERRAMIVDITIPHDGNLVKAEKDKQIKYLDLAREVVDMWDVDSAIIVPIVVSANGLIAKSLDQHLKRLTLDGWIKGLIQKAVLLDTARIVRRFLSLEP

SEQ ID NO: 12100 - protein, 868 aa, Mesoligia furuncula
MRFVRRAFLGTDISPQDYMSCVTERIDFLKQKVYAWANRICRYKRRVERYTQNRTFQSDEIWVYRGWERPDQSVADTCLPDDEAMCSFWRSIWSVPVSHTEGDWAREVERACDPIPEMGAITICPQDVARAVRPLPNWKSPGPDGLHNFWIKWFLRSHARLASQFQTALESGSLPQFLTTGITHLLHKSGSTAEPKNYRPITCLPTVYKVLTSILRAKIDRHINTNSIMSVSQNGCKNGSRGTKELLLIDMAISQQVRCSRKDLSTCWIDYKKAYDSVPHTWLMRVLELYKVDATLRTFLMSCMGQWRTVLRYPGCRNIQRNSEPIRIERGIFQGDNLSPLWFCLALNPLSTLLEDSGLGYRLRRGGQDISHLLYMDDLKLFAPNNLQLMELLKVTQTFSSAIRMEFGVDKCAVMHVKRGEIVESVGTQLSDSTNLRALSASETYKYLGMSEALGINVTDMKQSLKERFFGRLKKVLNSLLSGGNKVRAFNGGVLPVLMYSFGILKWTQTELDALDRRVRTLLTANRMHHPRSSVMRLYIPRKCGGRGFLNAKTLHNREIWSLREYFLETDVGMHRDVVAVDKGLIPLSLAKENWRKPVVLDTNDRMEVWQSKELHGRFLRALHAPDVDLLASVAWLRFSDLFGETEGFVCAIMDEVMMTNNYRRFIVKDGTVDICRACHRPGESIRHIISGCSRLANGEYLHRHNLVARIIHQQLSLKYSLVESEVPYYRYVPDPVLENGNISLYWDRSIITDRTIVANKPDIVVVDRSERRAMIVDITVPHDENLVKAEKDKQIKYLDLAREVVDMWNVDSAIIVPIVVTANGLIAKSLDQHLRRLSLGSWIKGLIQRAVLLDTARIVRRFLSLEP

SEQ ID NO: 12101 - protein, 1198 aa, Mesoligia furuncula
MLTRLAARRARLLPPDSSLSSASPPPVPSPTVSAVMTPAAAVASSSSDEYFSPPTTPPPARRRRGRRPPDGLGLRGPPASDRVPAPGGSVQRMRWTQSINENVMRSYYGATEGGNILTAYRVRMLSLFQVLEPAVNVSAQRLSDQVRVIQRNHMLDDTVLDRLRSEMQSSHVIAPQSQTAVILPQPNISHADEGSNDTAINISTQCNEELRSALEDAIQEYRFMSPELRPRLPRLPMHNKNRALVAALDSQLSKYFDICEDLIDTHSILYCAAVAACRVAHVKFANDSRATRPKQAVPAWQCRIERRIGGARTLIGKLICFREGNTRPRVMRFVRRAFSGTDISPQDYMSCVTERIDFLKQKVYVWANRIRRYRRRVERYTQNRTFQSDERWVYRGWERPDQGMAETCLPDDDAMCSFWRNIWSVPVSHTEGDWAREVERACDPIPEMGAITICPQDVARAVRPLPNWKSPEPDGLHNFWIKWFPRSHALLASQFQTALKSGSLPQFLTTGITHLLHKSGSTAEPKNYRPITCLPTVYKVLTSILRTKINKHIDTNSIMSASQNGCRNGSRGTKELLLIDMAISQQVRRFRKDLSTCWIDYKKAYDSVPHTWLMRVLELYKVDTTLRTFLMSCMGQWRTVLRYPGCRNIQRNSEPIRIGRGIFQGDSLSPLWFCLALNPLSTLLEDSGLGYRLRRGGQVISHLLYMDDLKLFAPNNLQLMELLKITETFSSAIRMEFGVDKCAVMHVKQGEIVESVGTQLSDSTNLRALSASETYKYLGMSEALGINVTDMKQSVKERFLGRLKKVLNSLLSGGNKVRAFNGWVMPVLMYSFGILKWTQTELDALDRRVRTLLTANRMHHPRSSVMRLYIPRKCGGRGFLNAKTLHNREICSFREYFLETDVGMHRDVVIVDKGLTPLSLAKENWRKPVVLDTNDRMEVWQSKELHGRFLRALRGPDVDLQASVAWLRFGNLFGETEGFVCAIMDEVMMTNNYRRFIVKDGTVDICRACHRPEESIRHIISGCSRLANGEYLHRHNLVARIIHQQLALKYNLVESEVPYYRYVPDPVLENGNITLYWDRSIITDRTIVANKPDIVVVDRSERRAMIVDITVPHDENLVKAEKDKQIKYLDLAREVVDMWDVDTAIIVPIVVTANGLIAKSLDQHLRRLSLGSWIKGLIQRAVLLDTARIVRRFLSLEP

SEQ ID NO: 12102 - protein, 1206 aa, Mesoligia furuncula
MLTRSRARLLLKNTHPTSSGSSLSSASQLPDPAPDVSSVRPAAAVASSSSDEYFSPPTTPPPVCRRGRGRPPASLGLRGPPASDRVPAPGGSVQRMRWTQTVNENVMRAYFGATEGGSNLTAYRGRMLSLFQVLEPAVNVSAQRLSDQVRVIQRNHMLDNVVLDRLRLESRNSHVTPASSLIAVQLQNVPSVSPRPDHVYVEDDDEAITVSSQCNARLRSALEDAFREYRSIPPGLRPRLPRLPMHKKNKALVCALDSQLSNCFNNSKDLTDTHSILYCAAVAACHVAHVKFPNSDRAPRPKPAVPAWQCRIECRIGEARALIGKLICFREGNTRPRVMRFVRRAFSGTDISSRDYLSRVTERIDFLKQKIYAWANRIRRYRRRVERYTQNRTFQNDERWVYRAWERPDQGVTDTPLPDDDAMCSFWRNIWSVPVSHTEGDWTAKIERACDLIPEMGVLTISPQDVARAVRPLPNWKSPGPDGLHNFWIKWFQGSHARLASQFQSALESGSLPQFLTTGITHLLHKSGSTADPKNYRPITCLPTVYKVLTSILRAKINKHIDTNSIMSVSQNGCRNGSRGTKELLLIDMTISQQVRRFRNDLSTCWIDYKKAYDSVPHTWLMRVLELYKVDTTLRTFLMSCMGQWRTVLRYPGCRNIQRNSEPIRIERGIFQGDSLSPLWFCLALNPLSTLLEDSGLGYRLRRGGQVISHLLYMDDLKLFAPNNLRLMELLKITETFSSAIRMEFGVDKCAVMHVKRGEIVESVETQLSDSTNLRALSASETYKYLGMSEALGINVTDMKQSLKERFFGRLKKVFNSLLSGGNKVRAFNSWVMPVLMYSFGILKWTQTELDALDRKVRTLLTANRMHHPRSSVMRLYIPRKCGGRGFLNAKTLHNREICSLREYFLETDVGMHRDVVAVDKGLTPLSLGKENWRKPVVLDTNDRMEVWQSKELHGRFFRALHGPDVDLLASVAWLRFGDLFGETEGFVYAIMDEVMMTNNYRRFIVKDGTVDICRACHRPGESIRHIISGCSRLANGEYLHRHNLVARIIHQQLALKYSLVESEVPYYRYVPDPVLENGNITLYWDRSIITDRTIVANKPDIVVVDRSERRAMIVDITVPHDENLVKAEKDKQVKYLDLAREVVDMWDVDSAIIVPIVVTANGLIAKSLDQHLKRLSLGSWIKGLIQKAVLLDTARIVRRFLSLEP

SEQ ID NO: 12103 - protein, 872 aa, Spilarctia lutea
MSFRSGNTRPRVMRFVKRAFLGTTISPQEYMSCVTERIDFLKQKVYAWANRIRRYRKRVDRYNQNRMFQRNEKWVYRKWENLSPCMSDGQVPDENATNSFWHNIWSVPVIHTEGDWYRDVERSCESLLPMEPISIDEEDVSCAVRSLPNWKAPGPDGLHNFWLKWFRSSHACLASQFQTALDSGSLPQFLTTGITHLLYKSGDAMDPKNFRPITCLPTLYKLLTSILRLKITTHINHNSILSISQNGCRSGTRGTKELLIIDVTISQQVRRNRKSLATCWIDYKKAFDSVPHTWLLKVLELYKIDTTLCTFLKVCMGQWRTALRYPGCRQSAMNDVLIKIERGIFQGDSLSPLWFCLALNPLSTLLEGSGLGYRLQKDDRVISHLLYMDDLKLLAPTKLQLTALLKVTENFSNSIKMEFGVDKCAVMYVKKGEIVESEGIELSDSTKLRSLSATETYKYLGFSQSLGMPESDMKQTLRERFFSRLKKVLKSLLSGGNKVRACNGWVMPVLMYSFGVLRWTQTELDAIDRRVRTLLTAFRMHHPRSSVMRLYIPRRLGGRGLLNIKTLHNREVYNLREYFLQTDVGVHRSVVTVDTGLTPLALAKENWRKPVVLSTNDRREVWKGKVLHGRFYRALNGPDIDFKASTSWLRYSDLFGETEGFVCAIMDEVIMTNNYRKYILRDGTVDICRACHRPGESIRHIISGCSRLANGEYLHRHNQVARIVHQQLALKYNLVISEVPYYRYVPDPVLENGRATLYWDRSIITDRTIVANKPDIVVIDRLERRAMIVDIAVPHDENLVKVEKEKQIKYLDLSHEIVDMWNVDSVIIVPIVVSAHGLIAKSLDQHLKRLTLGGWIRPQGGFGRQPGVRTLP

SEQ ID NO: 12104 - protein, 1198 aa, Xestia c-nigrum
MLTRAAARRARLPPPDPSLSSASPPPEPSPIVSAVTPAVAVASSSSDEYFSPPTTPPPARRRGGRRPPDGLGPRGPPASDRVPASGGSVQRMRWTQSNNENVMRAYYGATEGGNNLTAYRVRMLSLFQVLEPAVNVSAQRLSDQVRVIQRNRMLDDTVLDRLRTEMHSSHVIATPPSQAVVPPQSTTITYRDDDVSSDMITNVGTQYSEDMRSALEGAIREYRFMTPELRPRLPRLPMHNKNRMLVAVLDSQLSSYFDNCEDLTDVHSILYCAAVAACRVARVKFSDDRATRPKPAVPAWQYRIEQRIGGARALIGKLICFREGNTRPRVMRFVRRAFSGTGINPRDYMSRVTERIDFLKQKVYAWASRIRRYKRRVDRYTQNRTFQRDERWVYRAWERPDQGVADTRLPDDDAMCSFWRSIWSVPVSHAEGEWTRVIERACDPVPEMGAITISPQDVACAVRPLPNWKSPGPDGLHNFWIKWFTRSHARLATLFQSALESGSLPEFLTTGITHLLHKSGSTAEPKNYRPITCLPTVYKVLTSILRTKICKHVDDNSVMSASQNGCRNGSRGTKELLLIDMAISQQVRRSRKDLSTCWIDYKKAYDSVPHTWLMRVLELYKVDATLRTFLMSCMGQWRTVLRYPGCRQIQRNSEPIRIERGIFQGDSLSPLWFCLALNPLSTLLEDSGLGYQLRKDGRVISHLLYMDDLKLFAPNDLQLMELLKVTETFSSAIRMEFGVDKCAVMHVKRGGIVESVGTQLSDSINLRSLSATETYKYLGMSEALGINVADMKQSLKERFFGRLKKVFNSLLSGGNKVRAFNGWVMPVLMYSFGILKWTQTELDALDTKVRKLLTAFRMHHPRSSVMRLYIPRKCGGRGFLNAKTLHNREICSLRDYFLEADVGMHRDVVTMDKGLTPLSLAKENWRKPIILTTDDRRKEWQGKELHGRYYRALHGPDVDFLASVSWLRSGDLFGETEGFVCAIMDEVMMTNNYRRFIVKDGTVDICRACHRPGESIRHIISGCSRLANGEYLHRHNLVARIIHQQLALKYNLVESEVPYYRYVPDPVLVNGSITLYWDQSIITDRTVIANRPDIVVMDRSERRAMIVDITVPHDENLVKAKKDKQIKYLDLAREVVDMWEVDSAIIVPIVVSAHGLIAKSLDQHLRRLSLGSWIKGLIQKAVLLDTARIVRRFLSLEP

SEQ ID NO: 12105 - protein, 1159 aa, Xestia c-nigrum
MLTRSAARRALLPPPDPSLSPASPPPEPSPIVSAVTPAVAVASSSSDEYFSPPTTPPPARRRGGRRPPDGLGPRGPPASDRVPAPCGSVQRMRWTQSNNENVMRAYYGATEGGNNLTAYRVRMLSLFQVLEPAVNVSAQRLSDQVRVIQRNRMLDDTVLDRLWTEVQSSHVTATPPSQAVVPPQSTVITDRDDDVCSDMITNVATQYSEDMRSALEGAIREYRFVTPELRPRLPRLPMNNKNRMLVAVLDSQLSNYFDDCEDLTDVHSVLYCAAVAACRVARVKFSDDRATRPKPAVPAWQYRIEQRIGGARALIGKLICFREGNTRPRVMRFVRRAFSGTDISPRDYMSRVTERIDFLKQKVYAWASRIRRYKRRVDRYTQNRTFQRDERWVYRAWERPDQGVADTHLPDDDAMCSFWRSIWSVPVSHAEGEWTRVIERACDPVPEMGAITISPQDVACAVRPLPNWKSPGPDGLHNFWIKWFTGSHARLATLFQSALESGSLPEFLTTGLTHLLHKSGSTAEPKNYRPITCLPTVYKVLTSILRTKICKHIDDNSVMSASQNGCRNGSRGTKELLLIDMAISQQVRRSRKDLSTCWIDYKKAYDSVPHTWLMRVLELYKVDATLRTFLMSCMRQWRTVLRYPGCRQIQRNSEPIRIERGIFQGDSLSPLWFCLALNPLSTLLEDSGLGYQLRKDGRVISHLLYMDDLKLFAPNDLQLMELLKLTETFSSAIRMEFGVDKCAVMHVKRGEIVESVGTQLSDSINLRSLSATETYKYLGMSEALGINVADMKQSLKERFFGRLKKVFNSLLSGGNKVRAFNGWVMPVLMYSFGILKWTQTELDALDTKVRKLLTAFRMHHPRSSVMRLYIPRKCGGRGFLNAKTLHNREICSLREYFQEADVEMHRDVVAMDKGLTPLSLAKENWRKPIVLTTDDRRKEWQGKQLHGRFYRALHGPDVDFLASVSWLRSGDLFGETEGFVCAIMDEVMMTNNYRRFIVKDGTVDICRACHRPGESIRHIISGCSRLANGEYLHRHNLVARIIHQQLALKYNLVESEVPYYRYVPDPVLVNGNITLYWDQSIITDRTVIANRPDIVVMDRSERRAMIVDITVPHDENLVKAEKDKQIKNLDLAREVVDMWEVDSAIIVPIVVSAEHTCFA

SEQ ID NO: 12106 - protein, 1198 aa, Griposia aprilina
MLTRSAARRARPPPPDSSLSSASLPPVSSPTVSAVTTPAAVVASSSSDEYFSPPTTPPPVRRRGGHRPPDGLGPRGPPASDRVPAPGGSVQRMRWTRSINENVMRSYYGATEGGNNLTAYRVRMLSLFQVLEPAVNVSAQRLSDQVRVIQRNHMLDDAVLDRLRNEMQSSHVIAPPSQTVVVLPHSNTSQADEESDDRATNVSTQCNDELRSALEDAIREYRFISPDLRPRLPRLPMHNKNRVLVAALDAQLSNYFDDCVDLTDTHSILYCAAVAVCRVAHVKFANDSRATRPKPAVPAWQCRIERRIGEARALIGKLICFREGNTRPRVMRFVRRAFAGTNISPQDYMSCVTERIDFLKQKVYAWANRIRRYKRRVERYTQNRTFQRDERWVYRGWEQPDQGVADTCLPDDDAMCSFWRNIWSVPVSHTEGDWTREVERACDPIPEMGAITICPQDVTRAVRPLPNWKSPGPDGLHNFWIKWFGRSHARLAAQYQVALESGSLPQFLTTGVTHLLHKSGSTAEPKNYRPIACLPTVYKVLTSILRDKINKHIDTNYIMSPSQNGCRNGSRGTKELLLIDMAISQQVRRSRKDLSTCWIDYKKAYDSVPHTWLMRVLELYKVEATLRTFLMSCMRQWRTVLHYPACRNTQRNSEPIRIERGIFQGDSLSPLWFCLALNPLSTLLEDSGLGYRLRRGGQVISHLLYVDDLKLFAPNNSQLMDLLKVTETFSSAIRMEFGVDKCAVMHVKRGEIVESVGTQLSDSINLRALSASETYKYLGMSEALGINGTDMKQSLKDRFFGRLKKVFNSLLSGGNKVRAFNGWVMPVLMYSFGILKWTQTELDALDRKVRTLLTANRMHHPRSSVMRLYIPRKCGGRGFLNAKTLHNREICSLREYFLEADVGMHRDVVTVDKGLTPLSLAKENWRKPVVLDTNDRMEVWQSKELHGRFFRALHGPDVDQLASVAWLRFGDLFGETEGFVCAIMDEVMMTNNYRRFIVKDGTVDICRACHRPGESIRHIISGCSRLANEEYLHRHNLVARIIHQQLALKYSLVESEVPYYRYVPDPVLENGHITLYWDRSIITDRTIVANKPDIVMVDRLERRAMIVDITVPHDGNLVKAEKDKQIKYLDLAREVVDMWDVDSAIIVPIVVTANGLIAKSLDQHLRRLSLGSWIKGLIQKAVLLDTARIVRRFLSLEP

SEQ ID NO: 12107 - protein, 1199 aa, Griposia aprilina
MMLTRSAKRRAHPPPPDSSLSSASPPPVSSPTVSAVTTPAAVVASSSSDEYFSPPTTPPPVRRRGGHRPPDGLGPRGPPASDRVPAPGGSVQRMRWTRSINENVMRSYYGATEGGNNLTAYRVRMLSLFQVLEPAVNVSVQRLSDQVRVIQRNHMLDDTVLDRLRNEMQSSHVIAPPSQTVVVLPQSNTSQADEESDDRATNVSTQCNDELRSALEDAIREYRFISPELRPRLPRLPMHNKNRVLVAALDAQLSNYFDDCVDLTDTHSILYCAAVAACRVAHIKFANDSRPTRPKPAVPAWQCRIERRIGGARALIGKLICFREGNTRPRVMRFVRRAFAGTNISPQDYMSCVTERIDFLKQKVYAWANRIRRYKRRVERYTQNRTFQRDERWVYRGWERPDQGVADTCLPDDDAMCSFWRNIWSVPVSHTEGDWGREVERACDPIPEMGAISICPQDVTRAVRPLPNWKSPGPDGLQNFWIKWFGRSHAPLAAQYQVAIESGSLPHFLTTGVTHLLHKSGSTAEPKNYRPITCLPTVYKVLTSILRAKINKHIDTNSIMSPSQNGCRNGFRGTKELLLIDMAISQQVRRSRKDLSTCWIDYKKAYDSVPHTWLVRVLELYKVDATLRTFLKSCMGQWRTILHYPGCRNIQRDNEPIRIERGIFQGDSLSPLWFCLALNPLSTLLEDSGLGYRLRRGGQVISHLLYMDDLKLFAPNNLQLMELLKVTETFSSAIRMEFGVDKCAVMHVKRGEIVESVGTQLSYSINLRALSASDTYKYLGMSEALGINGTDMKQSLKERFFGRLKKVFNSLLSGGNKVRAFNGWVMPVLMYSFGILKWTQTELDALDRKVRTLLTANRMHHPRSSVMRLYIPRKCGGRGFLNAKTLHNREICSLREYFLEADVGMHTDVVKVDKGLTPLSLAKENWRKPVVLDTNDRMEVWQSKELHGRFFRALHGPDVDQLASVAWLRFGDLFGETEGFVCAIMDEVILTNNYRRHIMKDGTVDVCRACHRPGESIRHIISGCSRLANEEYLHRHNLVARIIHQQLALKYSLVETEVPYYRYVPDPVLENGHITLYWDRSIITDRTIVANKPDIVVVDRLERRAMIVDITVPHDGNLVKAEKDKQIKYLDLAREVVDMWDVDSAIIVPIVVTANGLIAKSLDQHLRRLSLGSWIKGLIQKAVLLDTARIVRRFLSLEP

SEQ ID NO: 12108 - protein, 1075 aa, Griposia aprilina
MLSLFQVLEPAVNVSAQRLSDQVRVIQRNHMLYDTVLDRLRNEMQSSHVIAPPSQTVVVLPQSNTSQADEESDDRATNVSTQCNDELRSALEDAIQEYRFISPELRPRLPRLPMHNKNRVLVAALDAQLSNYFDDCVDLTDTHSILYCAAVAACRVAHVKFANDSRATRPKPAVPAWQCRIERRIGGARALIGKLICFREGNTRPRVMRFVRRAFAGTNISPQDYMSCVTERIDFLKQKVYAWANRIRRYKRRVERYTQNRTFQRDERWVYRDWERPDQGVADTCLPDDDAMCSFWRNIWSVPVSHTEGDWVREVERACDPIPEMGAISICPQDVTRAVRPLPNWKSPGPDGLHNFWIKWFGRSHARLAAQYQVALESGSLPQFLTTGVTHLLHKSGSTAEPKNYRPITCLPTVYKVLTSILRAKINKHIDTNSIMSPSQNGCRNGSRGTKELLLIDMAISQQVRRSRKDLSTCWIDYKKAYDSVPHTWLVRVLELYKVDATLRTFLKSCMEQWRTVLHYPGCRNIQRNNEPIRIERGIFLGDSLSPLWFCLALNPLSTLLEDSGLGYRLRRGGQVISHLLYMDDLKLFAPNNLQLMELLKVTETFSSAIRMEFGVDKCAVMHVKRGEIVESVGTQLSDSINLRALSAFETYKYLGMSEALGINGTNMKQLLKERFFGRLKKVFNSLLSGGNKVRAFNGWVMPVLMYSFGILKWTQTELDALDRKVRTLLTANRMHHPRSSVMRLYIPRKCGGRGFLNAKTLHNREICSLREYFLEADVGMHRDVVTVDKGLTPLSLAKENWRKPVVLDTNDRMEVWQSKELHGRFFRALHGPDVDQLASVAWLRFGDLFGETEGFVCAIMDEVILTNNYRRHIMKDGTVDVCRACHRPGESIRHIISGCSRLANEEYLHKHNLVARIIHQQLALKYSLVESEVPYYRYVPDPVLENGHITLYWDRSIITDRTIVANKPDIVVVDRLERRAMIVDITVPHDGNLVKAEKDKQIKYLDLAREVVDMWDVDSAIIVPIVVTANGLIAKSLDQHLRRLSLGSWIKGLIQKAVLLDTARIVRRFLSLEP

SEQ ID NO: 12109 - protein, 1198 aa, Griposia aprilina
MLTRSAARRARPPPPDSSLSSASLPPVSSPTVSAVTTPAAVVASSSSDEYFSPPTTPPPVRRRGGHRPPDGLGPRGPPASDRVPAPGGSVQRMRWTRSINENVMRSYYGATEGGNNLTAYRVRMLSLFQVLEPAVNVSAQRLSDQVRVIQRNHMLDDTVLDRLRNEMQSSHVIAPPSQTVVVLPQSNTSQADEESDDRATNVSTQCNDELRSALEDAIREYRFISPELRPRLPRLPMHNKNRVLVAALDAQLSNYFDDCVDLTDTHSILYCAAVAACRVAHVKFANDSRATRPKPAVPAWQCRIERRIGEARALIGKLICFREGNTRPRVMRFVRRAFAGTNISPQDYMSCVTERIDFLKQKVYAWANRIRRYKRRVERYTQNRTFQRDERWVYRGWERPDQGVADTCLPDDDAMCSFWRNIWSVPVSHTEGDWTREVERACDPIPEMGAITICPQDVTRAVRPLPNWKSPGPDGLHNFWIKWFGRSHARLAAQYQVALESGSLPQFLTTGVTHLLHKSGSTAEPKNYRPIACLPTVYKVLTSILRDKINKHIDTNSIMSPSQNGCRNRSRGTKELLLIDMAISQQVRRSRKDLSTCWIDYKKAYDSVPHTWLMRVLELYKVEATLRTFLMSCMGQWRTVLHYPACRNTQRNSEPIRIERGIFQGDSLSPLWFCLALNPLSTLLEDSGLGYRLRRGGQVISHLLYMDDLKLFAPNNSQLMDLLKVTETFSSAIRMEFGVDKCAVMHVKRGEIVESVGTQLSDSINFRALSASETYKYLGMSEALGINSTDMKQSLKERFFGRLKKVFNSLLSGGNKVRAFNGWVMPVLMYSFGILKWTQTELDALDRKVRTLLTANRMHHPRSSVMRLYIPRKCGGRGFLNAKTLHNREICSLREYFLEADVGMHRDVVTVDKGLTPLSLAKENWRKPVVLDTNDRMEVWQSKELHGRFFRALHGPDVDQLASVAWLRFGDLFGETEGFVCAIMDEVMMTNNYRRFIVKDGTVDICRACHRPGESIRHIISGCSRLANEEYLHRHNLVARIIHQQLALKYSLVESEVPYYRYVPDPVLENGHITLYWDRSIITDRTIVANKPDIVVVDRLERRAMIVDITVPHDGNLVKAEKDKQIKYLDLAREVVDMWDVDSAIIVPIVVTANGLIAKSLDQHLRRLSLGSWIKGLIQKAVLLDTARIVRRFLSLEP

SEQ ID NO: 12110 - protein, 1106 aa, Griposia aprilina
MRWTRSINENVMRSYYGATEGGNNLTAYRVRMLSLFQVLEPAVNVSAQRLSDQVRVIQRNHMLDDTVLDRLRNEMQSSHVIAPPSQTVVVLPQSNTSQADEESDDRATNVSTQCNDELRSALEDAIREYRFISPELRPRLPRLPMHNKNRVLVAALDAQLSNYFDDCVDLTDTHSILYCAAVAACRVAHVKFANDSRATRPKPAVPAWQCRIERRIGEARALIGKLICFREGNTRPRVMRFVRRAFAGTNISPQDYMSCVTERIDFLKQKVYAWANRIRRYKRRVERYTQNRTFQRDERWVYRGWERPDQGVADTCLPDDDAMCSFWRNIWSVPVSHTEGDWTREVERACDPIPEMGAITICPQDVTRAVRPLPNWKSPGPDGLHNFWIKWFGGSHARLAAQYQVALESGSLPQFLTTGVTHLLHKSGSTAEPKNYRPIACLPTVYKVLTSILRDKINKHIDTNYIMSPSQNGCRNGSRGTKELLLIEMAISQQVRRSRKDLSTCWIDYKKAYDSVPHTWLMRVLELYKVEATLRTFLMSCMGQWRTVLHYPACRNTQRNSEPIRIERGIFQGDSLSPLWFCLALNPLSTLLEDSGLGYRLRRGGQVISHLLYMDDLKLFAPNNSQLMDLLKVTETFSSAIRMEFGVDKCAVMHVKRGEIVESVGTQLSDSINLRALSASETYKYLGMSEALGINGTDMKQSLKDRFFGRLKKVFNSLLSGGNKVRAFNGWVMPVLMYSFGILKWTQTELDALDRKVRTLLTANRMHHPRSSVMRLYIPRKCGGRGFLNAKTLHNREICSLREYFLEADVGMHRDVVTVDKGLTPLSLAKENWRKPVVLDTNDRMEVWQSKELHGRFFRALHGPDVDQLASVAWLRFGDLFGETEGFVCAIMDEVMMTNNYRRFIVKDGTVDICRACHRPGESIRHIISGCSRLANEEYLHRHNLVARIIHQQLALKYSLVESEVPYYRYVPDPVLENGHITLYWDRSIITDRTIVANKPDIVMVDRLERRAMIVDITVPHDGNLVKAEKDKQIKYLDLAREVVDMWDVDSAIIVPIVVTANGLIAKSLDQHLRRLSLGSWIKGLIQKAVLLDTARIVRRFLSLEP

SEQ ID NO: 12111 - protein, 962 aa, Griposia aprilina
MHNKNRMLVAALDAQLSNYFDDCVDLTDTHSILYCAAVAACRVAHIKFANDSRPTRPKPAVPAWQCRIERRIGGARALIGKLICFREGNTRPRVMRFVRRAFAGTNISPQDYMSCVTERIDFLKQKVYAWVNRIRRYKRRVERYTQNRTFQRDERWVYRGWERPDQGVADTCLPDDDAMCSFWRNIWSVPVSHTEGDWGREVERACDPIPEMGAISICPQDVTRAVRPLPNWKSPGPDGLQNFWIKWFGRSHARLAAQYQVAIESGSLPQFLTTGVTHLLHKSGSTAEPKNYRPITCLPTVYKVLTSILRAKINKHIDTNSIMSPSQNGCRNGSRGTKELLLIDMAISQQVRRSRKDLSTCWIDYKKAYDSVPHTWLVRVLELYKVDATLRTFLKSCMGQWRTILHYPGCRNIQRDNEPIRIERGIFQGDSLSPLWFCLALNPLSTLLEDSGLGYRLRRGGQVISHLLYMDDLKLFAPNNLQLMELLKVTETFSSAIRMEFGVDKCAVMHVKRGEIVESVGTQLSYSINLRALSASDTYKYLGMSEALGINGTDMKQSLKERFFGRLKKVFNSLLSGGNKVRAFNGWVMPVLMYSFGILKWTQTELDALDRKVRTLLTANRMHHPRSSVMRLYIPRKCGGRGFLNAKTLHNREICSLREYFLEADVGMHTDVVKVDKGLNQLSLAKENWRKPVVFDTNDRMEVWQSKELHGRFFRALHGPDVDQLASVAWLRFGNLFGETEGFVCAIMDEVILTNNYRRYIMKDGTVDVCRACHRPGESIRHIISGCSRLANEEYLHRHNLVARIIHQQLALKYSLVESEVPYYRYVPDPVLENGHITLYWDRSIITDRTIVANKPDIVVVDRLERRAMIVDITVPHDGNLVKAEKDKQIKYLDLAREVVDMWDVDSAIIVPIVVTANGLIAKSLDQHLRRLSLGSWIKGLIQKAVLLDTARIVRRFLSLEP

SEQ ID NO: 12112 - protein, 1197 aa, Griposia aprilina
MLTRSAALRARLPTPDSLLSSASPPPVSSPIVSAVTTPAAVVASSSSDEYFSPPTTPPPARRRGGHRPPDGLGPRGPPASDRVPAPGGSVQRMRWTQSINENVMRSYYGATEGGNNLTAYRVRMLSLFQVLEPAVNVSAQRLSDQVRVIQRNHMLDDTVLDRLRSEMQSSHVITPPSQTVVVLPQPITSHDEGSDDRATNVSTQCNEELRSALEGAIREYRFMSPELRPRLPRLPMHNKNRALVAALDSQLSNYFDDCVDLTDTHSILYCAAVAACRVAHVKFANDSRATRPKPAVPAWQCRVERRIGGARALIGKLICFREGNTRPRVMRFVRRAFAGTDVSPQDYISCITERIDFLKQKVYAWASRIRRYKRRVERYTQNRTFQRDERWVYRDWERPDQGVADTYLPDDDAMCSFWHNIWSVPVSHTEGDWTREVERACEPIPEMGAITVCPQDVARAVRPLPNWKSPGPDGLHNFWIKWFLRSHARLAAQFQAALESGSLPQFLTTGVTHLLHKSGSIAEPKNYRPITCLPTVYKVLTSILRAKINKHIDTNSIMSASQNGCRNGSRGTKELLLIDMAISQQVRRSRKDLSTCWIDYKKAYDSVPHTWLMRVLELYKVDATLRTFLKSCMRQWRTVLRYPTCRNTQRNSEPIRIERGIFQGDSLSPLWFCLALNPLSTLLEDSGLGYRLRRGGRVISHLLYMDDLKLFAPNNLQLIELLKVTETFSSAIRMEFGLDKCAVMHVKRGEIVESVGTQLSDSMNLRALSASETYKYLGMSEALGVNNTDMKQSLKERFFGRLKKVFNSLLSGGNKVRAFNGWVMPVLMYSLGILKWTQTELDTLDRRVRTLLTANRMHHPRSSVMRLYIPRKCGGRGFLNAKTLHNREICSLREYFLEADVGMHRDVVAVDKGLTPLSLAKENWRKPVVLDTNDRMEVWQSKELHGRFFRALHGPDVDVQASVAWLRFGDLFGETEGFVCAIMDEVMMTNNYRRFIVKDGTVDICRACHHPGESIRHIISGCSRLANEEYLHRHNLVARIIHQQLALKYSFVESEVPYYRYVPDPVLENGTITLYWDRSIITDRTIIANKPDIVLVDRRERRAMIVDITIPHDGNLVKAEKDKQIKYLDLAREVVDMWDVDSAIIVPIVVTANGLIAKSLDQHLRRLSLGSWIKGLIQKAVLLDTARIVRRFLSLEP

SEQ ID NO: 12113 - protein, 1198 aa, Griposia aprilina
MLTRSAARRARPPPPDSSLSSASLPPVSSPTVSAVTTPAAVVASSSSDEYFSPPTTPPPVRRRGGHRPPDGLGPRGPPASDRVPAPGGSVQRMRWTRSINENVMRSYYGATEGGNNLTAYRVRMLSLFQVLEPAVNVSAQRLSDQVRVIQRNHMLDDTVLDRLRNEMQSSHVIAPPSQTVVVLPQSNTSQADEESDDRATNVSTQCNDELRSALEDAIREYRFISPELRPRLPRLPMHNKNRVLVAALDAQLSNYFDDCVDLTDTHSILYCAAVAACRVAHVKFANDSRATRPKPAVPAWQCRIERRIGEARALIGKLICFREGNTRPRVMRFVRRAFAGTNISPQDYMSCVTERIDFLKQKVYAWANRIRRYKRRVERYTQNRTFQRDERWVYRGWERPDQGVADTCLPDDDAMCSFWRNIWSVPVSHTEGDWTREVERACDPIPEMGAITICPQDVTRAVRPLPNWKSPGPDGLHNFWIKWFGRSHARLAAQYQVALESGSLPQFLTTGVTHLLHKSGSTAEPKNYRPIACLPTVYKVLTSILRDKINKHIDTNYIMSPSQNGCRNGSRGTKELLLIDMAISQQVRRSRKDLSTCWIDYKKAYDSVPHTWLMRVLELYKVEATLRTFLMSCMGQWRTVLHYPACRNTQRNSEPIRIERGIFQGDSLSPLWFCLALNPLSTLLEDSGLGYRLRRGGQVISHLLYMDDLKLFAPNNSQLMDLLKVTETFSSAIRMEFGVDKCAVMHVKRGEIVESVGTQLSDSINLRALSASETYKYLGMSEALGINGTDMKQSLKDRFFGRLKKVFNSLLSGGNKVRAFNGWVMPVLMYSFGILKWTQTELDALDRKVRTLLTANRMHHPRSSVMRLYIPRKCGGRGFLNAKTLHNREICSLREYFLEADVGMHRDVVTVDKGLTPLSLAKENWRKPVVLDTNDRMEVWQSKELHGRFFRALHGPDVDQLASVAWLRFGDLFGETEGFVCAIMDEVMMTNNYRRFIVKDGTIDICRACHRPGESIRHIISGCSRLANEEYLHRHNLVARIIHQQLALKYSLVESEVPYYRYVPDPVLENGHITLYWDRSIITDRTIVANKPDIVMVDRLERRAMIVDITVPHDGNLVKAEKDKQIKYLDLAREVVDMWDVDSAIIVPIVVTANGLIAKSLDQHLRRLSLGSWIKGLIQKAVLLDTARIVRRFLSLEP

SEQ ID NO: 12114 - protein, 975 aa, Omphaloscelis lunosa
MSPELRPRLPRLPMHNKNRALVAALDSQLSNYFDDCEDLTDTHSILYCAAVAVCRVAHVKFSNDSRATRPKPAVPAWQCRIERRICGARTLIGKLICFREGNTRPRVMRFVRRAFLGTDISPQDYMTRVTERIDFLKQKVYAWANRIRRYKRRVERYTQNRTFQSDERWVYRAWERPNQGVTDTHLPDEDAMCSFWRSIWSVPVSHTEGDWTREVERACDSIPEMGAITICPQDVARAVRPLPNWKSPGPDGLHNFWIKWFVRSHARLAAQYQTALESGSLPQFLTTGVTHLLHKSGSTAEPKNYRPITCLPTVYKVLTSVLRAKINKHIDTNSIMSASQNGCRNGSRGTKELLLIDMAISQQVRRSRKDLSTCWIDYKKAYDSVPHTWLMRVLELYKVDITLRTFLMSCMGQWRTVLRYPGCRNIQRNSEPIRIERGIFQGDSLSPLWFCLALNPLSTLLEASGLGYRLRRGGQVISHLLYMDDLKLFAPNNLQLMELLKVTETFSSAIRMEFGVDKCAVMHVKRGKIMESVGTQLSDSINLRALSASETYKYLGMSEALGINVTDMKQSLKERFFGRLKKVLNSLLSGGNKVRAFNGWVMPVLMYSFGILKWSQTELDALDRRVRTLLTAYRMHHPRSSVMRLYIPRKCGGRGFLNAKTLHNREICSLREYFLEADVGMHRDVVVVDKGLTPLSLAKENWRKPVVLDTKNRMEIWQSKELHGRYFRALHGPDVDLPASVAWLRCGDLFGETEGFVCAIMDEVMMTNNYRRFIVKDGTVDICRACHRPGESIRHIISGCSRLANEEYLHRHNLVARIIHQQLALKYSLVESEVPYYRYVPDPVLENGNITLYWDRSIITDRTIVANKPDIVVVDRGERSAMIIDITVPHDENLVKAEKDKQIKYLDLAREVVDMWDVDSAIIVPIVVTANGLIAKSLDQHLRRLSLGSWIKGLVQKAVLLDTARIVRRFLSLEP

SEQ ID NO: 12115 - protein, 868 aa, Omphaloscelis lunosa
MRFVRRAFLGTDISPQDYMTRVTERIDFLKQKVYAWANRIRRYKRRVERYTQNRTFQSDERWVYRAWERPNQGVTDTHLPDEDAMCSFWRSIWSVPVSHTEGDWTREVERACDSIPEMGAITICPQDVARAVRPLPNWKSPGPDGLHNFWIKWFVRSHARLAAQYQTALESGSLPQFLTTGVTHLLHKSGSTAEPKNYRPITCLPTVYKVLTSVLRAKINKHIDTNSIMSASQNGCRNGSRGTKELLLIDMAISQQVRRSRKDLSTCWIDYKKAYDSVPHTWLMRVLELYKVDITLRTFLMSCMGQWRTVLRYPGCRNIQRNSEPIRIERGIFQGDSLSPLWFCLALNPLSTLLEASGLGYRLRRGGQVISHLLYMDDLKLFAPNNLQLMELLKVTETFSSAIRMEFGVDKCAVMHVKRGKIMESVGTQLSDSINLRALSASETYKYLGMSEALGINVTDMKQSLKERFFGRLKKVLNSLLSGGNKVRAFNGWVMPVLMYSFGILKWSQTELDALDRRVRTLLTAYRMHHPRSSVMRLYIPRKCGGRGFLNAKTLHNREICSLREYFLEADVGMHRDVVVVDKGLTPLSLAKENWRKPVVLDTKNRMEIWQSKELHGRYFRALHGPDVDLPASVAWLRCGDLFGETEGFVCAIMDEVMMTNNYRRFIVKDGTVDICRACHRPGESIRHIISGCSRLANEEYLHRHNLVARIIHQQLALKYSLVESEVPYYRYVPDPVLENGNITLYWDRSIITDRTIVANKPDIVVVDREERSAMIIDITVPHDENLVKAEKDKQIKYLDLAREVVDMWDVDSAIIVPIVVTANGLIAKSLDQHLRRLSLGSWIKGLVQKAVLLDTARIVRRFLSLEP

SEQ ID NO: 12116 - protein, 1204 aa, Omphaloscelis lunosa
MLTRSATRRAHPPPPDSSLSSASPPSIPNPTVNVVTTPAAAVASSSSDEYFSPPTSPTPVRRQGRGRPPAGLGPRGQQAPNRVPAAGGNVSRIRWTQSMNENVMRAYYGATEGGINLTAYRSRMLSLFQVLEPTINVSAQRLSDQVRVIQHNHRLDNATPDRLRLEMQNSFASNPPPSQNVVQAPAAVPLQANQHEEEEDGRAIPADNLCNVELRSALEDAIREYRFTSPDLRPRLPRLPMNKRNRALVCALDALLPNFIESSANLCDTHSILYCTAVAACRIARVKFPNTDRSVRPKPVAPAWQCRIECRINEARVLIGKLICFREGNTRPRVMRFVRRAFSGTSISPREYVSHVTERIDFLKQKVYAWANRIRRYRRRVDRYTQNRMFQNDERWVYRTWERPTPNQGVTDTRLPNSDAMKAFWQSIWSVPVNHTEGDWMRVVEQACDPIPHMEAISITPLDVARAVRPLPNWKSPGPDGLHNFWLKWLQRSHTCLATQFQSSLDTGSLPLFFTTGVTHLLHKSGSTAEPKNYRPITCLPTIYKVLTSILRAKISHHINNNLIMSVSQNGCKNGSRGTKELLLIDMTISQQVRKSRKDLSTCWIDYKKAYDSVPHTWLMRVLELYKIDATLRTFLMSCMRQWRTVLLYPGCRQIRGIDEPIRIERGIFQGDSLSPLWFCLALNPLSTLLEDSGLGYRLRRGGQVISHLLYMDDLKLFAPNNLRLMELLKITETFSSAIRMEFGVDKCAVMHVKRGEIMESVGTQLADSIHFRYLSSTETYKYLGMSEALGINVTDMKQSLKERFFGRLNKVLNSLLSGGNKVRAFNGWVMPVLMYSFGILKWTQTELDALDRKVRTLLTTNRMHHPRSSVMRLYIPRKCGGRGFLNAKTLHNREIYSLREYFLQTNVGMHRDVVAVDKGLTPLSLAKENWRKPTVLDTNDRKEIWQGKELHGRFFRALHGPDVDFLTSVSWLRFGDLFGETEGFVCAIMDEVIMTNNYRKYIVKDGTVDICRACHQPGESIRHIVSGCSRLANGEYLHRHNLVARIIHQQLALQYNLIESEVPYYRYVPDPVLENGHTTLYWDRSIITDRTIVANKPDIVVIDRRERRAMIVDIAVPHDENLVKAEKDKKIKYLDLAHEVVDMWDVDSAIIVPIIVTVNGLIAKSLDQHLRRLSLRGWIKGLIQKAVLLDTARIVRRFLSLEP

SEQ ID NO: 12117 - protein, 1198 aa, Omphaloscelis lunosa
MLTRSAARRARLPPPDSPLSSASSPPVLSPTVNAVMTPAAAVASSSSDEYFSPPTTPPPARRRGGRRPPDGLGPRGPPASDRVPAPGGSVQRMRWTRSINENVMRSYYGATEGGINLTAYRVRMPSLFQVLEPAVNVSAQRLSDQVRVIQRNHMLDDTELDRLRSEMQSSHVIAPPVRSVIIPSQIITSQADERIDDRATNVSTQCNEELRSALEGAIQEYRFMSPELRPRLPRLPMHNKNKALVAVLDSQLSNYFDDCEDLTDTHSILYCAAVAACRVAHVKFANDSRATRPKPAAPAWQCRIERRIGGARTLIGKLICFREGNTRPRVMRFVRRAFLGTDISPQDYLTRVTERIDFLKQKVYAWANRIRRYKRRVERYTQNRTFQSDERWVYTAWERPDQGVADTHRPDDDAMCSFWRSIWSVPVNHTEGDWTREVERACDPIPEMGAITICPQDVARAVRPLPNWKSPGPDGLHNFWIKWFLRSHARLAAQYQTALESGSLPQFLTTGVTHLLHKSGSTAEPKNYRPITCLPTVYKVLTSILRAKINKHIDTNSIMSASQNGCRNGSRGTKELLLIDTAINQQVRRSRKDLSTCWIDYKKAYDSVPHTWLMRVLELYKVDTTLRTFLMSCMGQWRTVLRYPGCRNTQRNSEPIRIERGIFQGDSLSPLWFCLALNPLSTLLEASGLGYRLRRGGQVISHLLYMDDLKLFAPNNLQLMELLKVTETFSNAIRMEFGVDKCAVMHVKRGEIVESVGTQLSDSINLRALSASETYKYLGMSEALGINVTDMKQSLKERFFGRLKKVLNSLLSGGHKVRAFNGWVMPVLIYSFGILKWTQTELDALDRRVRTLLTAYRMHHPRSSVMRLYIPRKCGGRGFLNAKTLHNREICSLREYFLGVDVGMHRIVVVVDKGLTPLSLAKENWRKPVVLDTKDRMEIWQSKELHGRYFRALHGPDVDLPASVTWLRFGDLFGETEGFVCAIMDEVMMTNNYRRFIVKDGTVDICRACHRPGESIRHIISGCSRLANEEYLHRHNLVARIIHQQLALKYSLVESEVPYYRYVPDPVLENGNITLYWDRSIITDRTIVANKPDIVVVDRGERRTMIIDITVPHDENLVKAEKDKQIKYLDLAREVVDMWDVDSAIIVPIVVTANGLIAKSLDQHLRRLSLGSWIKGLIQRAVLLDTARIVRRFLSLEP

SEQ ID NO: 12118 - protein, 1205 aa, Omphaloscelis lunosa
MLTRSRARKLIDTHPTSSGSSLSSASQLPDPAPDVSPVIPVPAVASSSSDEYFSPPTTPPPTRQRGRGRPPASLGLRGPPASDRVPASGGSVQRMRWTQTVNENVMRAYFGATEGGSNLTAYRGRMLSLFQVLEPAVNVSAQRLSDQVRVIQRNHMLDDVVLDRLRLESRNNHVTPASPLVTVQLQNLPSSSPRSDRVGEEDDDGVISVSSQCNVRLRSALEDAFWEYRSIPPGLRPQLPRLPMHKKNKALMCTLDSLLSNCFDGSKDLADTHSILYCAAVAACRVAHVKFPNSDRAPRPKPAVPAWQCRIERRIGEARVLIGKLICFREGNTRPRVMRFVKRAFSGTDISFQDYLTRVTERIDFLKQKIYAWANRIRRYRRRVERYTQNRTFQSDERWVYRAWERPDQGVADTHLPDDDAMCSFWRSIWSVPVSHTEGDWTREVERACDPIPEMGAITICPQDVARTVRPLPNWKSPGPDGLHNFWIKWFQRSHARLASQFQSALESGSLPQFLTTGITHLLHKSGSTAEPKNYRPITCLPTVYKVFTSILRTKINKHIDSNSIMSASQNGCRNGSRGTKELLLIDMAINQQVRRSRRDLSTCWIDYKKAYDSVPHTWLMRVLELYKVNATLRTFLMSCMGQWRTVLRYPGCRQILRNSEPIRIERGIFQGDSLSPLWFCLALNPLSTLLEDSGLGYRLRRGGQVISHLLYMDDLKLFAPNNLQLLELLKVTETFSSAIRMEFGVDKCAVMHVKRGEIVESVGTQLSDSIQLRSLSSIETYKYLGMSEALGVNAADMKQSLKERFFNRLNKVLNSLLSGGNKVRAFNSWVMPVLMYSFGILKWTQTELDALDRRVRTLLTANRMHHPRSSVMRLYIPRKCGGRGFLNAKTLHNREVCSLREYFLEADVGMHRDVVTVDKGLTPLSLANENWRKPIVLDTNDRREVWQSKELHGRFYRALHGPDVDLLASVSWLRFGDLFGETEGFVFAIMDEVMMTNNYRKYIVKDGTVDICRACHRPGESIRHIISGCSRLANGDYLHRHNLVDRIIHQQLALKYSLVESEVPYYRYVPDPVLENGNITLYWDRSIITDRTIVANKPDIVVIDRLERRTMIIDIAVPHDENLVKAEKDKQIKYLDLAREVVDMWDVDTAIIVPIVVTANGIIAKSLDQHLKRLSLGSWIKGLIQKAVLLDTARIVGRFLSQEP

SEQ ID NO: 12119 - protein, 1200 aa, Sesamia nonagrioides
MLTRSAARRARPPSPDSSPSSASPPPVSSPTVNAVMTPAAAVALSSSDEYFSPPTTPPPVRRRGGRRPPDCLGPRGPPASDRAPATGGNVQRMKWTQSISENVMRAYFGATEGGSNLTAYRGRMLSLFQVLEPAVNVSAQRLSDLVRVIQRNHMLDDVVLDRLRLESRNSYVTPASSLVAVQLNSVPSRPNLVDEEDDDEAISVTPQSNEKVRSALEDAFREYRSTPPELRPRLPRLPMHKKNKALVCALDSQLSNYLKDSKDLADTHSILYCGAVAICRVAHVKFPDSDRATRPKPAVPAWQCRIERRIGETRALIGKLMSFREGNTRPRVMRFVRRAFSGTDVSTRDYLLRVTERIDFLKQKIYAWANRIRRYRRRVGRYSQNRNFQSDERWVYRAWERSDQGVTDTCLPDDDATRSFWRNIWSVPVSHTEGGWTRDVERACDPVPEMGAITICPQDVARAVHPLPNWKSPGPDGLHNFWIKWFSGSHACLASQFQTALESGSLPQFLTTGITHLLHKSGSTAEPKNYRPITCLPTVYKVLTSILKAKINTHIDSNSIMSASQNGCRNGSRGTKELLLIDMAISQQVRRSRKDLSTCWIDYKKAYDSVPHTWLMRVLELYKVDATLRTFLMTCMSQWRTVLRYPGCRNIQRNSEPIRIERGIFQGDSLSPLWFCLALNPLSTLLEDSGLGYRLRRGGKVISHLLYMDDLKLFAHTNSQLKELLKITETFSSAIRMEFGVDKCAVMHVKRGEIVESVGTQLTGSINLRSLSASETYKYLGMSEALGINVTDMKQSLKERFFGRLKKVLNSLLSGGNKVRAFNGWVIPVLMYSFGILKWTQTELDALDQRVRTLLTANRLHHPRSSVMRLYIPRKCGSRGFLNAKTLHNREVCSLREYFLETDVGMHRDVVAADKGLTPLSLTKENWRKPVVLDTNDRMEVWKSKELHGRFFRALHGPDVDFQASVAWLRFGDLFGETEGFVFAIMDEVMMTNNYRRFIVKDGIVDICRACHRPGESIRHIISGCSRLANGEYLHRHNLVARIIHQQLALKYNLVELEVPYYRYMPDPVLENGHITLYWDRSIITDRTIVANKPDIVLVDRSERRAMIDDITIPHDENLVKAEKDKQIKYLDLAHEVVDMWEVDSAIIVPIVVTANGLIAKSLDLHLRRLSLGSWIKGLIQKAVLLDTARIVRKFLSLGP

SEQ ID NO: 12120 - protein, 1044 aa, Sesamia nonagrioides
MLDDTVLDRLRNEMQSSRVITHQSQSAEIPPQPTNYADEGSNDRATNVSTQYNEELRNALEAAIREYRSISAELRPRLPRLPMHNRNRALMAALDAQLSNYFDTCEDLTDTHSILYCAAVAACRVAHVKFPSDSRATRPKPVVPAWQRRIERRIGGARALIGKLICFREGNTRPRVMRFVRRAFSGTNTSPQNYMARVTERIDFLKQKVYAWANRIRRYKRRVERYTQNRTFQSNERRVYRDWERSEQGVTDTCLPDDDAMCSFWRSIWSVPVSHTEGDWARDVERACDPIPEMGAITICPQDVACAVRPLPNWKSPGPDGLHNFWIKWFPRSHARLASQFQTALVSGSLPQFLTTGITHLLHKSGSTAEPKNYRPITCLPTVYKVLTSILKTKINKHIDSNSILSASQNGCRSGSRGTKELLLIDMAISQQVRRSRKDLSTCWIDYKKAYDSVPHTWLMRVLELYKVDATLRTFLMTCMRTWRTVLRYPGCRNIQRNSEPIRIERGIFQGDSLSPLWFCLALNPLSTLLEDSGLGYRLRRGGQVISHLLYMDDLKLFAPNNSQLRELLKITETFSSSIRMEFGVDKCAVMHVKRGEIMESVGTQLTGSINLRALSASETYKYLGMSEALGINVTDMKQSLKERFFGRLKKVLNSLLSGGNKVRAFNGWVMPVLMYSFGILKWTQTELDALDQRVRTLLTANRLHHPRSSVMRLYIPRKCGGRGFLNAKTLHNREVCSLREYFLETDVGMHRDVVAADKSLTPLSLAKENWRKPVVLDTNDRLEVWKSKELHGRFFRALHGPDVDFQASVAWLRFGDLFGETEGFVFAIMDEVMMTNNYRRFIVKDGTVDICRACHRPGESIRHIISGCSRLANGEYLHRHNLVARIIHQQLALKYKLVESEVPYYRYMPDPVLENGHITLYWDRSIITDRTIVANKPDIVLVDRSERRAMIVDITIPHDENLVKAEKDKQIKYLDLAHEVVDMWEVDSAIIVPIVVTANGLISKSLDQHLRRLSLGSWIKGLIQKAVLLDTARIVRKFLSLEP

SEQ ID NO: 12121 - protein, 1197 aa, Sesamia nonagrioides
MLTRSAALRARPPPPDSLLSSASPPPVSSASVSAVTTPAAAVALSSSDEYFSPPTTPPPARRRGGRRPPDRLGPRGPSASDRVPAPGGSVQRMRWTQSINENVMRSYYGATEGGNNLTAYRVRMLSLFQVLEPAVNVSAQRLSDQVRVIQRNHMLDDTVLDRLRNEMQSSRVIAHQSQTAEIPPQSTNYADEGSNDRATNVSTQCNEELINALEAAIREYRYTSAELRPRLPRLPMHNRNRALMAALDAQLSNYFHTCEDLTDTHSILYCAAVAACRVAHVKFPSDSRATRPKPVVPAWQHRIERRIGGARALIGKLICFREGNTRPRVMRFVRRAFAGTNISPQNYMARVTERIDFLKQKVYAWANRIRRYKRRVERYTQSRTFRSNERWVYRDWERPEQGVTDTCLPDDDAMCSFWRSIWSVPVSHTEGDWARDVERACDPIPEMGAITICPQDVACAVRPLPNWKSPGPDGLHNFWIKWFPRSHTRLASQFQTALVSGSLPQFLTTGITHLLHKSGSTAEPKNYRPITCLPTVYKVLTSILKTKINKHIDSNSIMSASQNGCKNGSRGTKELLLIDMAISQQVRRSRKDLSTCWIDYRKAYDSVPHTWLMRVLELYKVDATLRTFLMSCMRTWRTVLRYPGCRNIQRNSEPIRIERGIFQGDSLSPLWFCLALNPLSTLLEDSGLGYRLRRGGQVISHLLYMDDLKLFAPNNSQLRELLKITETFSSSIRMEFGMDKCAVMHVKRGEIMESVGTQLTGSINLRALSASETYKYLGMSEALGINVTDMKQSLKERFFGRLKKVLNSLLSGGNKVRAFNSWVMPVLMYSFGILKWTQTELDALDQRVRTLLTANRLHHPRSSVMRLYIPRKCGGRGFLNAKTLHNREVCTLREYFLETDVGMHRDVVAADKGLTPLSLAKENWRKPVVLDTNDRMEVWKSKELHGRFFRALHGPDVDFQASVAWLRFGNLFGETEGFVFAIMDEVMMTNNYRRFIVKDGTVDICRACHRPGESIRHIISGCSRLANGEYLHRHNLVARIIHQQLALKYNLVESEVPYYRYMPDPVLENGHITLYWDRSIITDRTIVANKPDIVLVDRSERRAMIVDITIPHDENLVKAEKDKQIKYLDLAHEVVDMWKVDSAIIVPIVVTANGLIAKSLDQHLRRLSLGSWIKGLIQKAVLLDTARIVRKFLSLEP

SEQ ID NO: 12122 - protein, 1200 aa, Sesamia nonagrioides
MLTRSAARRARPPSPDSLLSSASPPPVSSPTVSAVTTPAATVASSSSDEYFSPPTTPPPVRRRGGRRPPDCLGPRGPSASDRVSAPGGSVQRMRWTQSINENVRRSYYGGSPIVEGGTNLTAYRVRMLSLFQLLEPAANVSAQRLSDQVRVIQRNHMLDDTVLDRLRNEMQSSRVIAHQSQSAEIPPQPTNYADEGSNDRATNVSTQCNEELRNALEVAIREYRSISAELRPRLPRLPMHNRNRALMAALDAQLSNYFDTCEDLTDTHSILYCAAVAACRVAHVKFPSDSRATRPKPVVPAWQHRIERSIGGARALIGKLICFREGNTRPRVMRFVRRAFSGTNTSPQNYMARVTEHIDFLKQKVYAWANRIRRYKRRVERYTQNRTFQSNERRVYRDWERPEQGVTDTCLPDDDAMCSFWRSIWSVPVSHTEGDWAREVERACDPIPEMGAITICPQDVAHAVHPLPNWKSPGPDGLHNFWIKWFPRSHARLASQFQTALVSGSLPQFLTTGITHLLHKSGSTAEPKNYRPITCLPTVYKVLTSILKTKIKKHINSNSILSASQNGCRSGSRGAKELLLIDMAISQQVRRSRKDLSTCWIDYKKAYDSVPHTWLMRVLELYKVDATLRTFLMTCMRTWRTVFRYPGCRNIQRNSEPISIERGIFQGDSLSPLWFCLALNPLSTLLEDSGLGYRLRRGGQVISHLLYMDDLKLFAPNNSQLNELLKITEIFSSSIRMEFGVDKCAVMHVKRGEIMEPVGTQLTSSINLRALSASETYKYLGMSEALGINVTDMKQSLKERFFSRLKKVLNSLLSGGNKVRAFNGWVMPVLMYSFGILKWTQTELDALDQRVRTLLTANRLHHPRSSVMRLYIPRKCGGRGFLNAKTLHNREICSLRDYFLETEVGMHRDVVAADKGLTPLSLAKENWREPVVLDTNDRMEVWKSKELHGRFFRALHGPDVDFQASVAWLRFGDLFGETEGFVFAIMDEVMMTNNYRRFIVKDGTVDICRACHRSGESIRHIISGCSRLANGEYLHRHNLVARIIHQQLALKYKLVESEVPYYRYMPDPVLENGHITLYWDRSIIPDRTIIANKPDIVLVDRSERRAMIVDITIPHDENLVKAEKDKQTKYLDLAHEVVDMWEVDSAIIVPIVVTANGLIAKSLDQHLRRLSLGSWIKGLIQKAVLLDTARIVRKFLSLEP

SEQ ID NO: 12123 - protein, 1197 aa, Sesamia nonagrioides
MLTRSAARRARPPSPDSLPSSASPPPASSTTVSAVTTPAATVASSSSDEYFSPPTTPPPVRRRGGRRPPDCLGPRGPSASDRVPAPGGSVQRMRWTQSINENVMRSYYGATEGGTNLTAYRVRMLSLFQVLEPAVNVSAQRLSDQVRVIQRNHMLDDTVLDRLRNEMQSSRIIAHQSQSAEIPPQPTNYADEGSNDRATNVSTQCNEELRNALEAAIREYRSISAELRPRLPRLPMHNRNRALMGALDAQLSNYFDTCEDLTDTHSILYCAAVAACRVAHVKFPSDSRATRPKPVVPAWQHRIKRRIGGARALIGKLICFREGNTRPRVMRFVRRAFAGTNISPQNYMARVTERIDFLKQKVYAWANRIRRYKRRVERYTQNRTFQSNERWVYGDWERPEQGVADTCLPDDDAMCSFWRSIWSVPVSHTEGDWARDVERACDPIPEMGAITICPQDVARAVRPLPNWKSPGLDGLHNFWIKWFPRSHASLASQFQTALVSGSLPQFLTTGITHLLHKSGSTAEPKNYRPITCLPTVYKVLTSILKAKINNHIDSNSIMSVSQNGCRSGSRGTKELLLIDMAISQQVRRSRKDLSTCWIDYKKAYDSVPHTWLMRVLELYKVDTTLRTFLMTCMGQWRTVLRYPGCRNIQRNSEPIRIERGIFQGDSLSPLWFCLALNPLSTLLEDSGLGYRLRRGGQVILHLLYMDDLKLFAPNNLQLKELLKITETFSSAIRMEFGVDKCAVMHIKRGEIVESVGTQLTSSINLRALSASETYKYLGMSEALGINVTDMKQSLKERFFGRLKKVLNSLLSGGNKVRAFNGWVMPVLMYSFGILKWTQTELDALDQRVRTLLTANRLHHPRSSVMRLYIPRKCGGRGFLKAKTLHNREICSLREYFLETDVGMHRDVVAVDKGLTPLSLAKENWRKPVVLDTNDRMEVWKSKELHGRFFRALHGPDVDLQASVAWLRFGDLFRETGGFVCAIMDEVMMTNNYRRFIVKDGTVDICRACHRPGESIRHIISGCSRLANGEYLHRHNLVARIIHQQLALKYNLVESEVPYYRYMPDPVLENGHITLYWDRSIITDRTIVANKPDIVMVDRSERRAMIVDITILHDENLVKAEKDKQIKYLDLAHEVVDMWEVDSAIIVPIVVTANGLIAKSLDQHLRRLSLGSWIKGLIQKAVLLDTARIVRKFLSLEP

SEQ ID NO: 12124 - protein, 1197 aa, Sesamia nonagrioides
MLTRSAALRARPPPPDSLLSSASPPPVSSASVSAVTTPAAAVALSSSDEYFSPPTTPPPARRRGGRRPPDRLGPRGPSASDRVPAPGGSVQRMRWTQSINENVMRSYYGATEGGNNLTAYRVRMLSLFQVLEPAVNVSAQRLSDQVRVIQRNHMLDDTVLDRLRNEMQSSRVIAHQSQTAEIPPQSTNYADEGSNDRATNVSTQCNEELINALEAAIREYRYTSAELRPCLPRLPMHNRNRALMAALDAQLSNYFDTCEDLTDTHSILYCAAVAACRVAHVKFLSDSRATRPKPVVPAWQHRIERRIGGARALIGKLICFREGNTRPRVMRFVRRAFAGTNISPQNYMARVTERIDFLKQKVYAWANRIRRYKRRVERYTQNRTFRSNERWVYRDWERPEQGVTDTCLPDDDAMCSFWRSIWSVPVSHTEGDWARDVERACDPIPEMGAITICPQDVACAVRPLPNWKSPGPDGLHNFWIKWFPRSHARLASQFQTALVSGSLPQFLTTGITHLLHKSGSTAEPKNYRPITCLPTVYKVLTSILKTKINKHIDSNSIMSASQNGCKSGSRGTKELLLIDMAISQQVRRSRKDLSTCWIDYKKAYDSVPHTWLMRVLELYKVDATLRTFLMSCMRTWRTVLRYPGCRNIQRNSEPIRIERGIFQGDSLSPLWFCLALNPLSTLLEDSGLGYRLRRGGQVISHLLYMDDLKLFAPNNSQLRELLKITETFSSSIRMEFGVDKCAVMHVKRGEIMESVGTQPTDSINLRALSASETYKYLGMSEALGINVTDMKQSLKERFFGRLKKVLNSLLSGGNKVRAFNGWVMPVLMYSFGILKWTQTELDALDQRVRTLLTANRLHHPRSSVMRLYIPRKCGGRGFLNAKTLHNREVCSLREYFLETDVGMHRDVVAADKGLTPLSLAKENWRKPVVLDTNDRLEVWKSKELHGRFFRALHGPDVDFQASVAWLRFGDLFGETEGFVFAIMDEVMMTNNYRRFIVKDGTVDICRACHRPGESIRHIISGCSRLANGEYLHRHNLVARIIHQQLALKYNLVESEVPYYRYMPDPVLENGHITLYWDRSIITDRTIVANKPDIVLVDRSERRAMIVDITIPHDENLVKAEKDKQIKYLDLAHEVVDMWEVDSAIIVPIVVTANGLIAKSLDQHLRRLSLGSWIKGLIQKAVLLDTARIVRKFLSLEP

SEQ ID NO: 12125 - protein, 1197 aa, Sesamia nonagrioides
MLTRSAARRARPPSPDSLLSSASPPPVSSPTVSAVTTPAATVASSSSDEYFSPPTTPPPVRRRGGRRPPDCLGPRGPSASDRVPAPGGSVQRMRWTQSINENVMRSYYGATEGGTNLTAYRVRMLSLFQVLEPAVNVSAQRLSDQVRVIQRNHMLDDIVLDRLRNEMQSSRVITHQSQSAEIPPQPTNYADEGSNDRATNVSTQCNEELRNALEAAIREYRSISAELRPRLPRLPMHNRNRALMAALDAQLSNYFDTCEDLTDTHSILYCAAVAACRVAHVKFPSDSRATRPKPVVPAWQRRIERRIGGARALIGKLICFREGNTRPRVMRFVRRAFSGTNTSPQNYMARVTERIDFLKQKVYAWANRIRRYKRRVERYTQNRTFQSNERRVYRDWERSEQGVTDTCLPDDDAMCSFWRSIWSVPVSHTEGDWARDVERACDPIPEMGAITICPQDVACAVRPLPNWKSPGPDGLHNFWIKWFPRSHARLASQFQTALVSGSLPQFLTTGITHLLHKSGSTAEPKNYRPITCLPTVYKVLTSILKTKINKHIDRNSILSASQNGCRSGSRGTKELLLIDMAISQQVRRSRKDLSTCWIDYKKAYDSVPHTCLMRVLELYKVDATLRTFLMTCMRTWRTVLRYPGCRNIQRYSEPIRIERGIFQGDSLSPLWFCLALNPLSTLLEDSGLGYRLRRGGQVISHLLYMDDLKLFAPNNSQLNELLKITEIFSSSIRMEFGVGKCAVMHVKRGEIMEPVGTQLTSSINLRALSASETYKYLGMSEALGINVTDMKQSLKERFFGRLKKVLNSLLSGGNKVRAFNGWVVPVLMYSFGILKWTQTELDALDQRVRTLLTANRLHHPRSSVMRLYIPRKCGGRGFLNAKTLHNREICSLRDYFLETDVGMHRDVVAADKGLTPLSLANENWRKPVVLDTNDRMEVWKSKELHGRFFRALHGPDVDFQASVAWLRFGDLFGETEGFVFAIMDEVMMTNNYRRFIVKDGTVDICRACHRPGESIRHIISGCSRLANGEYLHRHNLVARIIHQQLALKYKLVESEVPYYRYMPDPVLENGHITLYWDRSIITDRTIIANKPDIVLVDRSERRAMIVDITIPHDENLVKAEKDKQTKYLDLAHEVVDMWEVDSAIIVPIVVTANGLIAKSLDQHLRRLSLGSWIKGLIQKAVLLDTARIVRKFLSLEP

SEQ ID NO: 12126 - protein, 1200 aa, Sesamia nonagrioides
MLTRSAARRARPPSPDSSLSSASPPPVSSPTVNAVMTPAAVVASSSSDEYFSPPTTPPPARRRGGRRPPDRLGPRGPSASDRVPAPGGSVQRMRWTQSINENVMRSYYGATEGGNNLTAYRVRMLSLFQVLEPAVNVSAQRLSDQVRVIQRNHMLGDVVLDRLRLESRNSHVTPASSLVAVQLNSVSPRPNHIDEEDDDRAISVSPQCNEKLRSALEDAFREYRSIPPELRPRLPRLPMHKKNKALVCALDSQLSNYLKDSKDLNDTHSILYCGAVVICRVAHVKFPDNDRATRPKSAVPAWQCRIERRIGETRALIGKLVSFREGNTRPRVMRFVRRAFSGTDTSTRDYLFRVTECIDFFKQKIYAWANRIRRYRRRVERYSQNRNFQSDERRVYRAWERSDQGVTDTCLPDDDATCSFWRNIWSVPVSHTEGSWTRVVERACDPVPEMGAITICPQDVARAVRPLPNWKSPGPDGLHNFWIKWFSGSHARLASQFQTALESGSLPQFLTTGVTHLLHKSGSTAEPKNYRPITCLPTVYKVLTSILKSKINTHIDSNSIMSASQNGCRSGSRGTKELLLIDMAISQQVRRSRKDLSTCWIDYKKAYDSVPHTWLMRVLELYKVDATLRTFLMTCMRTWRTVLRYPGCRNIQRNSEPIRIERGIFQGDSLSPLWFCLALNPLSTLLEDSGLGYRLRRGGQVISHLLYMDDLKLFAHTDSQLKELLKITETFSSSIRMEFGVDKCAVMHVKRGEIMESVGTQLTSSINLRALSASETYKYLGMSEALGINVTDMKQSLKERFFGRLKKVLNSLLSGGNKVRAFNGWVMPVLMYSFGIHKWTQTELDALDRRVRTLLTANRLHHPRSSVMRLYIPRKCGGRGFLNAKTLHNREICSLREYFLTTDVGMHRDVVAVDKGLTSLSLAKENWRKPVVLDTNDRMEVWKSKELHGRFFKALHGPDVDLQASVAWLRFGDLFGETEGFVCAITDEVMMTNNYRRFIVKDGTVDICRACHRPGESIRHIISGCSRLANGEYLHRHNLVARIIHQQLALKYNLVESEVPYYRYTPDPVLENGYITLYWDRSIITDRTIIANKPDIVLVDRSERRAMIVDITIPHDENLVKAEKDKQIKYLDLAHEVVDMWEVDSAIIVPIVVTANGLIAKSLDQHLRRLALGSWVKGLIQKAVLLDTARIVRKFLSLEP

SEQ ID NO: 12127 - protein, 1201 aa, Sesamia nonagrioides
MLTRSAARKHARPPSPDSLLSSASPPPVSSPTVSAVTTPAAAVASSSSDEYFSPPTTPPPVRRRGGRRPPDRLGPRGPSASDRVPAPGGSVQRMRWTQSINENVMRSYYGATEGGNNLTAYRVRMLSLFQVLEPAVNVSAQRLSDQVRVIQRNHMLDDVVLDRLRLESRNSHVTPASSLVAVQLNSVSPRPNHVDEEDDDRAISVSPQCNKQLRSALEDAFREYRSTPPELRPRLPRLPMHKKNKALVCALDSQLSNYLKDSKDLTDTHSILYCGAVAICRVAHVKFPDSDRATRPKPAVPAWQCRIERRIGETRALIGKLISFREGNTRPRVMRFVRRAFSGTDISTRDYLLRVTERIDFLKQKIYAWANRIRRYRRRVERYSQNRNFQSDERRVYRAWERSDQGVTDTCLPDDDATCSFWRNIWSVPVSHTEGGWTRDVERACDPVPEMGAITICPQDVARAVRPLPNWKSPGPDGLHNFWIKWFSGSHACLASQFQTALESGSLPQFLTTGITHLLHKSGSTAEPKNYRPIACLPTVYKVLTSILKAKINTHIDSNSIMSASQNGCRNGSRGTKELLLIDMTISQQVRRSRKDLSTCWIDYKKAYDSVPHTWLMRVLELYKVDATLRTFLMTCMSQWRTVLRYPGCRNIQRNSEPIRIERGIFQGDSLSPLWFCLALNPLSTLLEDSGLGYRLRRGGQVISHLLYMDDLKLFAHTNSQLKELLKITETFSSAIRMEFGVDKCAVMHVQRGEIVESVGTQLTGSINLRYLSASETYKYLGMSEALGINVTDMKQSLKERFFGRLKKVLNSLLSGGNKVRAFNGWVMPVLMYSFGILKWTQTELDALDQRVRTLLTANRLHHPRSSVMRLYIPRKCGGRGFLNAKTLHNREICSLREYFLKTDVGMHRDVVAVDKGLTPLSLAKENWRKPVVLETNDRMEVWQSKELHGRFFRALRGPDVDFQASVAWLRCGDLFGETEGFVCAIMDEVMMTNNYRRFIVKDGTVDICRACHRPGESIRHIISGCSRLANGEYLHRHNLVARIIHQQLALKYNLVESEVPYYRYMPDPVLENGHITLYWDRSIITDRTIVANKPDIVMVDRSERRAMIVDITIPHDENLVKAEKDKQIKYLDLAHEVVDMWEVDSAIIVPIVVTANGLIAKSLDQHLRRLSLGGWIKGLIQKAVLLDTARIVRKFLSLEP

SEQ ID NO: 12128 - protein, 962 aa, Sesamia nonagrioides
MHNRNRALMGALDAQLSNYFDTCEDLTDTHSILYCAAVAACRVAHVKFPSDSRATRPKPVVPAWQHRIERRIGGARALIGKLICFREGNTRPRVMRFVRRAFSGTNTSPQNYMARVTERIDFLKQKVYAWANRIRRYKRRVERYTQNRTFQSNERRVYRDWERPEQGVTDTCLPDDDAMCSFWRSIWSVPVSHTEGDWAQDVERACDPIPEMGAITICPQDVAHAVRPLPNWKSPGPDGLHNFWIKWFPRSHARLASQFQTALVSGSLPQFLTTGITHLLHKSGSTAEPKNYRPITCLPTVYKVLTSILKTKINKHIDSNSILSASQNGCRSGSRGTKELLLIDMAISQQVRRSRKDLSTCWIDYKKAYDSVPHTWLMRVLELYKVDATLRTFLMTCMRTWRTVLRYPGCRNIQRNSEPIRIERGIFQGDSLSPLWFCLALNPLSTLLEDSGLGYRLRRGGQVISHLLYMDDLKLFAPNNSQLNELLKITEIFSSSIRMEFGVDKCAVMHVKRGEIMEPVGTQLTSSINLRALSASETYKYLGMSEALGINVTDMKQSLKERFFGRLKKVLNSLLSGGNKVRAFNGWVMPVLMYSFGILKWTQTELDALDQRVRTLLTANRLHHPRSSVMRLYIPRKCGGRGFLNAKTLHNREICRLRDYFLETDVGMHRDVVAADKSLTPLSLAKENWRKPVVLDTNDRMEIWKSKELHGRFFRALHGPDVDFQASVAWLRFGDLFGETEGFVFAIMDEVMMTNNYRRFIVKDGTVDICRACHRPGESIRHIISGCSRLANGEYLHRHNLVARIIHQQLALKYKLVESEVPYYRYMPDPVLENGHITLYWDRSIITDRTIVANKPDIVLVDRSERRAMIVDITIPHDENLVKAEKDKQIKYLDLAHEVVDMWEVDSAIIVPIVVTANGLIAKSLDQHLRRLSLGSWIKGLIQKAVLLDTARIVRKFLSLEP

SEQ ID NO: 12129 - protein, 1200 aa, Apamea monoglypha
MMMLTRSAARRARPPPPDSSLSSASPPPVPSLTVSAVTTPAAVVASSSSDEYFSPPTTPPPARRRGGRRPPDGLGPRGPPASDRVPALGGSVQRMRWTQSINENVMRSYYGATEGGNNLTAYRVRMLSLFQVLEPAVNVTAQRLSDQVRVIQRNHMLDDTVLDRLRNEIQSSHVIAPQSQTAAVLPQSNTSHADEGSNDRATNVSIQCNEELRNALEGAIREYRFMSPELRPRLPRLPMHNKNRALVAILDAQLSSYFDVCEDLTDTHSILYCAAVAACRVAHVKFVSDSRATRPKPAIPPWQCRIERRIGGARALIGKLICFREGNTRPRVMRFVRRAFSGTDISSQDYLSRVTERIDFLKQKVYAWANRIRRYKRRVDRYTQNRTFQSDERWVYRGWERPDQGVADTCLPDDDAMYSFWRSIWSVPVSHTEGDWAREVERACDPIPEMEAITICAQDVARAVRPLPNWKSPGPDGLHNFWVKWLTRSHARLASQFQIALESGLLPQFLTTGVTHLLHKSASTAEPKNYRPITCLPTVYKVLTSILRAKINKHIDTNSIMSASQNGCKNGSRGTKELLLIDMAISQQVRRSRKDLSTCWIDYKKAYDSVPHTWLMRVLELYKVDTTLRTFLMTCMGQWRTVLRYPGCRNIQRNSEPIRIERGIFQGDSLSPLWFCLALNPLSTLLEDSGLGYRLRRGGQVISHLLYMDDLKLYAPNNLQLMELLKITETFSSAIRMEFGVDKCAVMHVKRGEIVESVGTQLSDSTNLRALSASETYKYLGMSEALGINVTDMKQSLKERFFGRLKKVLNSLLSGGNKVRAFNSWVMPVLMYSFGILKWTQTELDALDRRVRTLLTANRLHHPRSSVMRLYIPRKCGGRGFLNAKTLHNREICSLREYFLETDVGMHRDVVAVDKGLTPLSLAKENWRKPVVLDTNDRMEVWQSKELHGRFYRALHGPDVDLLASVAWLRFGDLFGETEGFVCAIMDEVMMTNNYRRFIVKDGTVDICRACHRPGESIRHIISGCSRLANGEYLHRHNLVARIIHQQLALKYNLVESEVPYYRYVPDPVLENGNITLYWDRSIITDRTIVANKPDIVVVDRSERRAMIVDITVPHDENLVKAEKDKQIKYLDLAREVVDMWHVDSAIIVPIVVTANGLIAKSLDQHLRRLSLGSWIKGLIQKAVLLDTARIVRRFLSLEP

SEQ ID NO: 12130 - protein, 975 aa, Apamea monoglypha
MSPELRPRLPRLPMHNKNRALVAVLDAQLSSYFDVCEDLTDTHSILYCAAVAACRVAHVKFVSDSRATRPKPAIPPWQCRIERRIGGARALIGKLICFREGNTRPRVMRFVRRAFSGTDISSQDYLSRVTERIDFLKQKVYAWANRIRRYKRRVDRYTQNRTFQSDERWVYRGWERPDQGVADTCLPDDDAMYSFWRSIWSVPVSHTEGDWAREVERACDPIPEMEAITICAQDVARAVRPLPNWKSPGPDGLHNFWVKWLTRSHARLASQFQIALESGSLPQFLTTGVTHLLHKSASTAEPKNYRPITCLPTVYKVLTSILRAKINKHIDTNSIMSASQNGCKNGSRGTKELLLIDMAISQQVRRSRKDLSTCWIDYKKAYDSVPHTWLMRVLELYKVDTTLRTFLMTCMGQWRTVLRYPGCRNIQRNSEPIRIERGIFQGDSLSPLWFCLALNPLSTLLEDSGLGYRLRRGGQVISHLLYMDDLKLFAPNNLQLMELLKITETFSSAIRMEFGVDKCAVMHVKRGEIVESVGTQLSDSTNLRALSASETYKYLGMSEALGINVTDMKQSLKERFFGRLKKVLNSLLSGGNKVRAFNSWVMPVLMYSFGILKWTQTELDALDRRVRTLLTANRLHHPRSSVMRLYIPRKCGGRGFLNAKTLHNREICSLREYFLETDVGMHRDVVTVDKGLTPLSLAKENWRKPVVLDTNDRMEVWQSKELHGRFYRALHGPDVDLLASVAWLRFGDLFGETEGFVCAIMDEVMMTNNYRRFIVKDGTVDICRACHRPGESIRHIISGCSRLANGEYLHRHNLVARIIHQQLALKYNLVESEVPYYRYVPDPVLENGNITLYWDRSIITDRTIVANKPDIVVVDRSERRAMIVDITVPHDENLVKAEKDKQIKYLDLAREVVDMWHVDSAIIVPIVVTANGLIAKSLDQHLRRLSLGSWIKGLIQKAVLLDTARIVRRFLSLEP

SEQ ID NO: 12131 - protein, 1194 aa, Furcula furcula
MLTRSKARLRPPDSSPRSVSQPPGPSPDGSLVAVTSSESDEYFSPPTSPPPVRRRRGRPPRELGLLEQPAPNRVLAPGGVVRRMRWTLSINENVMRAYYKATEGGIKLTAYRDRMLSLFQALEPAVNVSAQRLSDQVRAIQRGHMLDDAVLDRLRSEVQGSRVVPCIPSSQAVAPAVNTAPAPRPAANSDDDRDDMTTDVSTNVSSQLRSTLEDVVREYRTMPQGLRPRLPRLPMHKRNRALVCALDSLLSSYFDSSEDLADAHALLYCAAITACRVARVKFPDADTRPKPAVPAWQCRIERRIGEARVLIGKLTCFREGNMRPRVMRFVRRAFSGTGIDPREYLSRVTERIDFLKQKVCAWANRIRRYRARVDRYSQNNMFQRDQRWVYRSWERPSQIVGEVQRPDDDAMIRFWRNIWSVPVTHSEGDWIGDVGEVCEPLPEMGPITIGPQDVADAVRPLPNWKAPGPDGLHNFWLKCIRSSHICLASLFQSALESGSLPEFMTTGITHLLHKTDSTTNPKNYRPITCLPTVYKTLTSILRANIYRHVENNSIMSSSQNGCKSGARGTKELLLIDMAICQQARRNRKDLSTCWIDYKKAFDSVPHTWLMRVLELYKVNTTLRTFLASCMRQWRTVLLYPGFRQTLGNGDPIRIERGIFQGDSLSPLWFCLALNPLSTLLKSSGLGCRLRRGGQVISHLLYMDDLKLFAPTELQLTGLLKVTETFSNSIRMEFGVDKCAVMHVKRGRMVESRSVQLSDSTDLRTLSATETYKYLGMSQALNINETAMKQSLRERFLGRLRKVLKSLLSGGNKVRAYNGWVMPVLMYSFGILKWTQTELDTLDRTVRTLLTTYRMHHPRSSVMRLYIPRKCGGRGFLNAKTLHNREICNLREYFLHCGGEMHTDVVAVDNGLTPLSLAKGNWRKPVVLTTGDREAVWQSKELHGRFYRALHGPDVDFTASVAWLRFGDLFGETEGFVCAIMDEVVMTNNYRKYILRDGTIDICRACHRPGESLRHIISGCSRLANGEYLHRHNQVARIIHQQLALKYRLVTSEVPYYRYVPEPVLEDGHITLYWDRSIITDRTIVANKPDIVLIDRTERRAMIVDVTVPHDENLVKAEKDKQCKYLDLAHEVVDMWDIDNAIIVPIVVSAHGLMAKSLDKHLKRLTLDGWIKGQIQKAVLLETARIVRKFLCLEP

SEQ ID NO: 12132 - protein, 1052 aa, Furcula furcula
MLDGAVLDRLRSEVQGSRVAPCTSSSQAVAPVVNTAPAPRLVAISDDNRDDITTNVSTNISTQLRSTLEDVVREYRTMPCGLRPRLPRLPMHKRNRALVCALDSLLSSYFDSSEDLADAHSLLYCAAMTACRVARVKLQNTDAATRPRPAVPAWQCRIERRIGEARVLIGKLTCFREGNTRPRVMRFVRRAFSGTGIDPREYLSRVTERIDFLKQKVCAWASRIRRYRARADRYFQNNMFQRDQRWVYRSWERPSQTEGDVRRPDDDAMATFWRNIWSVPVTHSEGDWIGDVEQVCEPLPEMGAITIWPQDVADAVRLLPNWKAPGPDGLHNFWLKSIRSSHICLASLFQSALESGSLPEFMTTGITHLLHKTNSTTDPKNYRPITCLPTVYKTLTSILRTKIYRHVEDNSIMSASQNGCRSGARGTKELLLIDMAICQQARRNRKDLSTCWIDYKKAYDSVPHTWLMRVLELYKVNATLRTFLASCMRQWRTVLRYPGSRRTLGDGEPIRIERGIFQGDSLSPLWFCLALNPLSTLLKSSGLGYRLRRGGQVISHLLYMDDLKLFAPTELQLMGLLRVTETFSNSIRMEFGVDKCAVMHVKRGRIVESRSVQLSDSTDLKTLSATETYKYLGMSQALGINETDMKQSLRDRFLGRLRKVLKSLLSGGNRVRAYNGWVMPVLMYSFGILKWTQTELDTLDRTVRTLLTTYRMHHPRSSVMRLYIPRKCGGRGFLNAKTLHNREIYNLREYFLHCGGEMHTDVVAVDNGLTPLSLAKGNWRKPVVLTTGDREAVWQSKELHGRFYRALHGPDVDFSASVAWLRFGDLFGETEGFVCAIMDEVVMTNNYRKYILRDGTIDICRACHHPGESLRHIISGCSRLANGEYLHRHNQVARIIHQQLALRYRLVTSEVPYYRYVPEPVLEDGHITLYWDRSIITDRTIVANRPDIVLIDRTERRAMIVDVTVPHDENLVKAEKDKECKYLDLAHEVVDMWDIDKAIIVPIVVSAHGLMAKSLDKHLKRLTLDGWIKGQIQKAVLLETARIVRRFLSLEP

SEQ ID NO: 12133 - protein, 1200 aa, Arctia plantaginis
MITRARSKAQLTSPDSSLRSVLPSTETTTEAPAVAEASSSTSSDEFFSPPTSPTPVRRQGRGRPPICLGSRGPLTSNRVPATGGNVRRMKWTNSINENVMRAYYRATEMGTNLTAYRVRLVSLFQELEPAVNVSAQRLSDQVRAIQRCHLLDDAVLERIRSDIRNSLIIPSSSHTVDLVATSTPQLVSHTNDVDELVEGEVISVSTQYNDRIRSALVDAILEYRYVNWNNRPRLSRLPIHKRNLALVGALDSLLPDYLDNSEDLGDTHSILYCAAVAVCRVAGVNIVENVTTTRPKSTVPAWQCRIERRIAETRVLIGKLISFRSGNTRPKVMRFVKQAFLGTTIGPQQYMSCVTERIDFLKQKIYAWANRIRRYKKRIDRYNQNRMFQRNEKWVYRKWEEPDPCVSHGHLPDENVTHTFWRNIWSVPVTHIEGDWLRDVRRSCESITPMEPVIIDKDDVSCAVRSLPNWKSPGLDGLHNFWLKWFRSSHACLASQFQAALNSGSLPQFLTTGITHLLYKSGSVMDPKNFRPITCLPTMYKLLTSILRLKITLHINNNSIMSVSQNGCRSGSRGTKDLLIIDRAISQQVRRNRKSLATCWIDYKKAYDSVPHTWLLRVLELYKIDTTLCTFLKSCMGQWRTALRYPGCRQTTVIDAPIKIERGIFQGDSLSPLWFCLALNPLSTLLEGSGLGYRLQKDDQVISHLLYMDDLKLLAPTKLQLSALLKVTENFSNSIKMEFGVDKCAVMYVKKGEIVESEGIELSDSTKLRSLSATETYKYLGISQSLGIPESDMKQTLQERFFARLKKVLKSLLSGGNKVRACNGWVMPILMYSFGILKWTQTELDALDRRVRTLLTAFRMHHPRSSVMRLYIPRKLGGRGLLNIKTLHNREICNLREYFLHTDVGMHRNVVAVDIGFTPLALAKENWRKPVVFSTNDRREVWKGKELHGRFYRALNGSDIDFKASTTWLRYGDLFGETEGFVCAIMDEVIMTNNYRKYILKDGTVDICRACHRPGESIRHIISGCSRLANGEYLHRHNQVARIVHQQLALKYHLVNLEVPYYRYVPDPVLENGRATLYWDRSIITDRTIVANKPDIVVIDRLERRAIIVDIAVPHDENLVKVEKEKQIKYLDLSHEIVDMWNVDSVIIVPIVVSAHGLIAKSLDQHLKRLTLDGWIKGLIQKAVLLDTARIVRRFLSLQS

SEQ ID NO: 12134 - protein, 1200 aa, Arctia plantaginis
MITRARSKAQLTSPDSSLRSVLPSTETTTEAPAVAEASSSTSSDEFFSPPTSPTPVRRQGRGRPPICLGSRGPLTSNRVPATGGNVRRMKWTNSINENVMRAYYRATEMGTNLTAYRVRLVSLFQELEPAVNVSAQRLSDQVRAIQRCHLLDDAVLERIRSDIRNSLIIPSSSHTVDLVANSTPQLVSHTNDVDELVEGEVISVSTQYNDRIRSALEDAILEYRYVNWNNRPRLSRLPIHKRNLALVGALDSLLPDYLDNSEDLGDTHSILYCAAVAVCRVAGVNIVENVTTTRPKSTVPAWQCRIERRIAETRVLIGKLISFRSGNTRPRVMRFVKQAFLGTTIGPQQYMSCVTERIDFLKQKIYAWANRIRRYKKRIDRYNQNRMFQRNEKWVYRKWEEPDPCVSHGHLPDENVTHTFWRNIWSVPVTHIEGDWLRDVRRSCESITPMEPVIIDKDDVSCAVRSLPNWKSPGLDGLHNFWLKWFRSSHACLASQFQAALNSGSLPQFLTTGITHLLYKSGSVMDPKNFRPITCLPTMYKLLTSILRLKITLHINNNSIMSVSQNGCRSGSRGTKDLLIIDRAISQQVRRNRKSLATCWIDYKKAYDSVPHTWLLRVLELYKIDTTLCTFLKSCMGQWRTALRYPGCRQTTVIDAPIKIERGIFQGDSLSPLWFCLALNPLSTLLEGSGLGYRLQKDDQVISHLLYMDDLKLLAPTKLQLSALLKVTENFSNSIKMEFGVDKCAVMYVKKGEIVESEGIELSDSTKLRSLSATETYKYLGISQSLGIPESDMKQTLQERFFARLKKVLKSLLSGGNKVRACNGWVMPILMYSFGILKWTQTELDALDRRVRTLLTAFRMHHPRSSVMRLYIPRKLGGRGLLNIKTLHNREICNLREYFLHTNVGMHRNVVAVDIGFTPLALAKENWRKPVVFSTNDRREVWKGKELHGRFYRALNGSDIDFKASTTWLRYGDLFGETEGFVCAIMDEVIMTNNYRQYILKDGTVDICRACHRPGESIRHIISGCSRLANGEYLHRHNQVARIVHQQLALKYHLVNLEVPYYRYVPDPVLENGRATLYWDRSIITDRTIVANKPDIVVIDRLERRAIIVDIAVPHDENLVKVEKEKQIKYLDLSHEIVDMWNVDSVIIVPIVVSAHGLIAKSLDQHLKRLTLDGWIKGLIQKAVLLDTARIVRRFLSLQS

SEQ ID NO: 12135 - protein, 852 aa, Arctia plantaginis
MRFVKQAFLGTTIGPQQYMSCVTERIDFLKQKIYAWANRIRRYKKRIDRYNQNRMFQRNEKWVYRKWEEPDPCVSHGHLPDENVTHTFWRNIWSVPVTHIEGDWLRDVRRSCESITPMEPVIIDKDDVSCAVRSLPNWKSPGLDGLHNFWLKWFRSSHACLASQFQAALNSGSLPQFLTTGITHLLYKSGSVMDPKNFRPITCLPTMYKLLTSILRLKITLHINNNSIISVSQNGCRSGSRGTKDLLIIDRAISQQVRRNRKSLATCWIDYKKAYDSVPHTWLLRVLELYKIDTTLCTFLKSCMGQWRTALRYPGYRQTTVIDAPIKIERGIFQGDSLSPLWFCLALNPLSTLLEGSGLGYRLQKDDQVISHLLYMDDLKLLAPTKLQLSALLKVTENFSNSIKMEFGVDKCAVMYVKKGEIVESEGIELSDSTKLRSLSATETYKYLGISQSLGIPEFDMKQTLQERFFGRLKKVLKSLLSGGNKVRACNGWVMPILMYSFGILKWTQTELDALDRRVRTLLTAFRMHHPRSSVMRLYIPRKLGGRGLLNIKTLHNREICNLREYFLHTDVGMHRNVVAVDIGFTPLALAKENWRKPVVFSTNDRREVWKGKELHGRFYRALNGSDIDFKASTTWLRYGDLFGETEGFVCAIMDEVIMTNNYRKYILKDGTVDICRACHRPGESIRHIISGCSRLANGEYLHRHNQVARIVHQQLALKYHLVNLEVPYYRYVPDPVLENGRATLYWDRSIITDRTIVANKPDIVVIDRLERRAIIVDIAIPHDVNLVKVEKEKQIKYLDLSHEIVDMWNVDSVIIVPIVVSAHGLIAKSLDQHLKDVGRLDQGSDTEGSPP

SEQ ID NO: 12136 - protein, 1210 aa, Amphipyra berbera
MLTRSRTKTQDTRTRPRPSASSLSSASQPPDSSIVSDVTPAAAVASSSSDEFYSPPTSPPPPPPPRRGRRGRGRPPACMGPRGPPASDRVPAPGGSVQRMRWTLTMNENCMRAYFGATEGGTNLTAYRGRMLSLFQVLEPTVNVSAQRLSDQVRVIQRDHRLTDAALDRLRSEVQSNRIISLQSQTAAQPQTPTVVPPLPIQADEESDDRVTNVSTQCNEQLRSALELAIREYRFTPPNIRPRIPRLPMHRKNRALMCALDSLLSSYFDNSENLEDTHSILYCAAVAACRVAHAKFDNNDRATRPKPAVPAWQCRIERRINEARALIGKLICFREGNTRPRVMRFVRRAFSGTDINPRDYLSRVTERIDFLKQKVYAWANRIRRYKRRVERYTQNRMFHSDERWVYRTWERPDHDVSDTHLPDNDVMNTFWRNIWSMPVTHTEGDWMQEVQRACEPIEEMGDITIVPQDVTSAVRPMANWKSPGPDGLHNFWLKWLRSSHARLASQFQSSLESGSLPEFLTTGVTHLLHKSGSTAEPKNYRPITCLPTVYKLLTSILRAKINSHIINNSIMSVSQNGCKNGSRGTKELLLIDMTISQQVRRSRKDLSTCWIDYKKAYDSVPHTWLMRVLELYKVNTTLCAFLTSCMGQWRTVLHYPGCRQIQGRGEPIRIERGIFQGDSLSPLWFCLALNPLSTLLEGSGLGYRLRRGGQVISHLLYMDDLKLFAPNNLQLMKLLKVTETFSNSIRMEFGVDKCAVMHVKRGGIMESVGTQLSDSIHLRPLSSTETYKYLGMSEALGINETDMKQSLRERFYGRLKKVLKSLLSGGNKVRAFNGWVMPVLMYSFGILKWTQTELDALDRRVRTLLTAYRMHHPRSSVMRLYIPRKCGGRGFLNAKTLHNREVCSLREYFLQADVGMHRDVVAVDKGYTPLSLAKENWRKPVVLDTNGRREVWQSKELHGRFYRALHGPDVDFLASVAWLRFGDLFGETEGFVCAIMDEVMMTNNYRKYIVKDGTVDICRACHCPGESIRHIISGCSRLANGEYLHRHNLVARIIHQQLALKYNLVDAEVPYYKYVPDPVLENGHITLYWDRSIITDRTIVANKPDIVVIDRTERLTMIVDITVPHDENLVKAEKDKEIKYQDLAHEVVDMWEVDSAVIVPIVVTANGLIAKSLDHHLTRLSLGSWVKGLIQKAVLLDTARIVRKFLSLRP

SEQ ID NO: 12137 - protein, 1203 aa, Amphipyra berbera
MLTRARARKQTAHPRSPDSSLSSASQPPESSPPVSAVTPAAAVASSSSDEYYSPPSSPPPVRRRGGARPPACLGPRGQPATNRVPAAGGNVSRMRWTQSINENVMRAYYGATEGGINLTAYRERMLFLFQVLEPAINVSAQRLSDQVRVVQRNRRLDDTVLERLRSEARNSQTVTFPVQAAVQMQPLAVPPRPIHVDGEGDGEAINVSNQCSEELRSALDDAILEFRTTPPEIRPRLPRLPMHGKNRALMCALDSLLSNYFDGSEDLADTHSILYCAAIAACRVAHVKFTENERATRPKPAVPAWQSRIERRIGGARVLIGKLICFREGNNRPRVMRFVRRAFSGTDISPRDYMSRVTERIDFLKQKVYAWANRIRRYKRRVERYTQNRIFQSDQRRVYRAWERPDPGGGDVRLPDDDALSSFWRSIWSVPIAHTEDGWMRDIEQACEPIAEMEPITITPQDVADAARPLPNWKSPGPDGLHNFWLKWLRSSHARLASQFQSSLESGSLPQFLTTGVTHLLYKSGSTAEPKNYRPITCLPTVYKLLTSILRVKITTHIDNNCIMSASQNGCRKGSRGTKELLLIDMAISQQVRRSQKDLSTCWIDYKKAYDSVPHSWLMRVLELYKINTTLRTFLMSCMRHWRTVLRYPGCRRIRGSGEQIRIERGIFQGDSLSPLWFCLALNPLSTLLEGTGLGYQLRRGGQVISHLLYMDDLKLFAPTDLQLMELLKVTENFSNSIRMEFGVDKCAVMHVKRGRIAESEGIQLPNSVQLRSLSPTETYKYLGMSEALGISETDMRQSLRERFFGRLNKLLKSLLSGGNKVRAFNGWVMPVLMYSFGTLKWTQADLDALDRRVRALLTAHRMHHPRSSVMRLYIPRKCGGRGFLNAKTLHNREVYSLREYFLQAEGVIHRDVVAVDKGFTPLALARENWRKPAVLSTSDREVVWQSKELHGRYYRALHGPDVDFSASVSWLRSGNLFGETEGFVCAIMDEVMMTNNYRKYIVKDGTVDICRACHRPGESIRHIVSGCSRLANGEYLHRHNLVARIIHQQLALKYNLVESEVPYYRYVPDPVLENGHATLYWDRSIITDRTIVANKPDIVVIDRSERRTMIVDITVPHDENLVKAEKDKQIKYLDLAHEVVGMWDVDSAVIVPIVVTANGIIAKSLDIHLMRLSLGGWIKGLIQRAVLLDTARIVRRFLSLEP

SEQ ID NO: 12138 - protein, 1111 aa, Amphipyra berbera
MRWTQSMNENCMRAYFGATEGGTNLTAYRGRMLSLFQVLEPAVNVSAQRLSDQVRVIQRDHRLTDDALDRLRSEVQSNCIISLQSQTAAQPQVPPMVPPQPIRADEESDDRVTIVSAQCNEQLRSALELAIREYRFTPPNLRPRIPRLPMNRQNRALMCALDSLLSNYFDNSEGLEDTHSILYCAAVAACRVAHVKFDNNDRATRPKPAVPAWQCRIERRINEARALIGKLICFREGNTRPRVMRFVRRAFSGTDINPREYMSRVTERIDFLKQKVYAWANRIRRYKWRVERYTQNRMFHSDERWVYRTWERPEHDVSDTHLPDNDVMNTFWRNIWSMPVTHTEGDWMQEVQRACEPIEEMGDIIIVPQDVTSAVRPMANWKSPGPDGLHNFWLKWLRSSHARLASQFQSSLESGSLPPFLTTGITHLLHKSGSTAEPKNYRPITCLPTIYKLLTSILRAKINTHIINNSIMSASQNGCKNGSRGTKELLLIDMAISQQVRRSRKDLSTCWIDYKKAYDSVPHTWLMRVLELYKVNTTLCAFLTSCMGQWRTVLHYPGCRQIQGRGEPIRIERGIFQGDSLSPLWFCLALNPLSTLLEGSGLGYRLRRGGQVISHLLYMDDLKLFAPNNLQLMKLLKVTETFSNSIRMEFGVDKCAVMHVKRGGIMESVGTQLSDSIHLRSLSSTETYKYLGMSEALGINETDMKQSLRERFYGRLKKVLKSLLSGGNKVRAFNGWVMPVLMYSFGILKWTQTELDALDRRVRTLLTAYRMHHPRSSVMRLYIPMKCGGRGFLNAKTLHNREVCSLREYFLQADVGMHRDVVAVDKGFTPLSLAKENWRKLVVLDTNGRREVWQSKELHVRFYRALQGPDVDFLASVAWLRFGDLFGETEGFVCAIMDEVMMTNNYRKYIVKDGTVDICRACHCPGESIRHIISGCSRLANGEYLHRHNLVARIIHQQLALKYNLVDAEVPYYKYVPDPVLENGHITLYWDRSIITDRTIVANKPDIVVIDRTERLTMIVDITVPHDENLVKAEKDKEIKYQDLAHEVVDMWEVDSAVIVPIVVTANGLIAKSLDHHLTRPSLGSWVKGLIQKAVLLDTARIVRKFLSLRP

SEQ ID NO: 12139 - protein, 1203 aa, Amphipyra berbera
MLTRARARKQTAHPRSPDSSLSSASQPPESSPPVSAVTPAAAVASSSSDEYYSPPSSPPPVRRRGGARPPACLGPRGQPATNRVPAAGGNVSRMRWTQSINENVMRAYYGATEGGINLTAYRERMLFLFQVLEPAINVSAQRLSDQVRVVQRNRRLDDTVLERLRSEARNSQTVTFPVQAAVQMQPLAVPPRPIHVDGEGDGEAINVSNQCSEELRSALDDAILEFRTTPPEIRPRLPRLPMHGKNRALMCALDSLLSNYFDGSEDLADTHSILYCAAIAACRVAHVKFTENERATRPKPAVPAWQSRIERRIGGARVLIGKLICFREGNNRPRVMRFVRRAFSGTDISPRDYMSRVTERIDFLKQKVYAWANRIRRYKRRVERYTQNRIFQSDQRRVYRAWERPDFGGGDVRLPDDDALSSFWRSIWSVPIAHTEDGWMRDIEQACEPIAEMEPITITPQDVADAARPLPNWKSPGPDGLHNFWLKWLRSSHARLASQFQSSLESGSLPQFLTTGVTHLLYKSGGTAEPKNYRPITCLPTVYKLLTSILRVKITTHIDNNCIMSASQNGCRKGSRGTKELLLIDMAISQQVRRSQKDLSTCWIDYKKAYDSVPHSWLMRVLELYKINTTLRTFLMSCMRHWRTVLRYPGCRRIRGSGEQIRIERGIFQGDSLSPLWFCLALNPLSTLLEGTGLGYQLRRGGQVISHLLYMDDLKLFAPTDLQLMELLKVTENFSNSIRMEFGVDKCAVMHVKRGRIAESEGIQLPNSVQLRSLSPTETYKYLGMSEALGISETDMRQSLRERFFGRLNKLLKSFLSGGNKVRAFNGWVMPVLMYSFGTLKWTQADLDALDRRVRALLTAHRMHHPRSSVMRLYIPRKCGGRGFLNAKTLHNREVYSLREYFLQAEGVMHRDVVAVDKGFTPLALARENWRKPAVLSTNDREVVWQSKELHGRYYRALHGPDVDFSASVSWLRSGNLFGETEGFVCAIMDEVMMTNNYRKYIVKDGTVDICRACHRPGESIRHIVSGCSRLANGEYLHRHNLVARIIHQQLALKYNLVESEVPYYRYVPDPVLENGHATLYWDRSIITDRTIVANKPDIVVIDRSERRTMIVDITVPHDENLVKAEKDKQIKYLDLAHEVVGMWDVDSAVIVPIVVTANGIIAKSLDIHLMRLSLGGWIKGLIQRAVLLDTARIVRRFLSLEP

SEQ ID NO: 12140 - protein, 1205 aa, Amphipyra berbera
MLTRSRAKALTETTRPRSSAPSLSSASQPPDSSIVSDVTPAAAVASSSSDEYFSPPTSPPPARRRGRGRPPDSLRPRGPLASDRVPAAGGSVQRMRWTPTMNENCMRAYFGATEGGTNLTAYRGRMLSLFQVLEPTVNVSAQRLSDQVRVIQRDHRLTDAALDRLRSEVQSNAIISLQSQTAAQPRTPTVVPPLPTHANEESDDRVTNVSTQCNEQLRSALELAIREYQFTPPNIRPRIPRLPMHRKNRALMCALDSLLSSYFDNSENLEDTHSILYCAAVAACRVAHAKFDNNDKATRPKPAVPAWQCRIERRINEARALIGKLICFREGNTRPRVMRFVRRAFSGTDINPRDYMSRVTERIDFLKQKVYAWANRIRRYKRRVERYTQNRMFHSDERWLYRTWERPDHDVSDAHPPDNDVMNTFWRNIWSMPVTHTEGDWMQEVQRACEPIKEMGDITIVPQDVTSAVRPMANWKSPGPDGLHNFWIKWLRSSHARLASQFQSSLESGSLPEFLTTGVTHLLHKSGSTAEPKNYRPITCLPTVYKLLTSILRAKINSHILYNSIMSVSQNGCKNGSRGTKELLLIDMAISQQVRRSRKDLSTCWIDYKKAYDSVPHTWLMRVLELYKVNTTLCAFLTSCMGQWRTVLHYPGCRQIQGRGEPIRIERGIFQGDSLSPLWFCLALNPLSTLLEGSGLGYRLRRGGQVISHLLYMDDLKLFAPNNLQLMKLLKVTETFSNSIRMEFGVDKCAVMHVKRGGIMESVGTQLSDSIHLRSLSSTETYKYLGMSEALGINETDMKQSLRERFYGRLKKVLKSLLSGGNKVRAFNGWVMPVLMYSFGILKWTQTELDALDRRVRTLLTAYRMHHPRSSVMRLYIPRKCGGRGFLNAKTLHNREVCSLREYFLQADVGMHRDVVAVDKGFTPLSLAKENWRKPVVLDTNGRREVWQSKELHGRFYRALHGPDVDFLASVAWLRFGDLFGETEGFVCAIMDEVMMTNNYRKYIVKDGTVDICRACHCPGESIRHIISGCSRLANGEYLHRHNLVARIIHQQLALKYNLVDAEVPYYKYVPDPVLENGHITLYWDRSIITDRTIVANKPDIVVIDRTERLTMIVDITVPHDENLVKAEKDKEIKYQDLAHEVVDMWEVDSAVIVPIVVTANGLIAKSLDHHLTRLSLGSWVKGLIQKAVLLDTARIVRKFLSLRP

SEQ ID NO: 12141 - protein, 962 aa, Amphipyra berbera
MHRKNRALMCALDSLLSSYFDNSENLEDTHSILYCAAVAACRVAHAKFDNSDKATRPKRAVPAWQCRIERRINEARALIGKLICFREGNTRPRVMRFVRRAFSGTDINPRDYMSRVTERIDFLKQKVYAWANRIRRYKRRVERYTQNRMFHSDERWVYRTWERPDHDVNDTHPPDNDVMNTFWRNIWSMPVTHTEGDWMQEVQRACEPIEEMGDITIVPQDVTSAVRPMANWKSPGPDGLHNFWIKWLRSSHARLASQFQSSLESGSLPEFLTTGVTHLLHKSGSTAEPKNYRPITCLPTVYKLLTSILRAKINSHIINNSIMSVSQNGCKNGSRGTKELLLIDMAISRQVRRSRKDLSTCWIDYKKAYDSVPHTWLMRVLELYKVNTTLCAFLTSCMGQWRTVLHYPGCRQIQGRGEPIRIERGIFQGDSLSPLWFCLALNPLSTLLEGSGLGYRLRRGGQVISHLLYMDDLKLFAPNNLQLMKLLKVTETFSNSIRMEFGVDKCAVMHVKRGGIMESVGTQLSDSIHLRSLSSTETYKYLGMSEALGINETDMKQSLRERFYGRLKKVLKSLLSGGNKVRAFNGWVMPVLMYSFGILKWTQTELDALDRRVRTLLTAYRMHHPRSSVMRLYIPRKCGGRGFLNAKTLHNREVCSLREYFLQADVGMHRDVVAVDKGFTPLSLAKENWRKPVVLDTNGRREVWQSKELHGRFYRALHGPDVDFLASVAWLRFGDLFGETEGFVCAIMDEVILTNNYRKYIVKDGTVDICRACHCPGESIRHIISGCSRLANGEYLHRHNLVARIIHQQLALKYNLVDAEVPYYKYVPDPVLENGHITLYWDRSIITDRTIVANKPDIVVIDRSERLAMIVDITVPHDENLVKAEKDKEIKYQDLAHEVVDMWEVDSAVIVPIVVTANGLIAKSLDQHLTRLALGSWIKGLMQKAVLLDTARIVRKFLSLRP

SEQ ID NO: 12142 - protein, 1197 aa, Noctua janthe
MLTRSATRRARLSPPDPSLSSASPPPESSPIVSAVTPAVAVASSSSDEYFSPPTTPPPVRRRGGRRPPDGLGPRGPPASDRVPAPGGSVPRMRWTQSINANVMRAYYGATEGGNNLTAYRVRMLSLFQVLEPAVNVSAQRLSDQVRVIHCNGMLDDTVLDRLRTEMQSSHVIATPPQTVVPPQSTIIPTHDNNVSNDMVTNVSTQCNEEMRCALEGAIREYRFMQPDLRPRVPRLPMHNKNKVLVAVLDSQLSNYFDNCENLTDAHSVLYCAAVAACRVAHVKFSDDRATRPKPAVPSWQYRIERRIGEARALIGKLICFREGNTRPRVMRFVRRAFSGTDISARDYMSRVTERIDFLKQKVYAWANRIRRYKRRVDRYTQNRTFQRDERWVYRAWERPDQGVADTHLPDDDAMCSFWRSIWSVPVSHTEGEWTREVERACDLVPEMGAITISPQDVVRAVRPLPNWKSPGPDGLHNFWIKWFTRSHARLAILFQSALESGSLPEFLTTGITHLLHKSGSTAEPKNYRPIACLPTVYKVLTSILRAKINKHIDDNSVMSASQNGCRNGSRGTKELLLIDMAISQQVRRSRRDLSTCWIDYKKAYDSVPHTWLMRVLELYKVDSTLRIFLMSCMGQWRTVLRYPGCRQIQRNSEPIRIERGIFQGDSLSPLWFCLALNPLSTLLEDSGLGYRLRRGGQVISHLLYMDDLKLFAPNDLQLMELLKVTETFSSAIRMEFGVDKCAVMHVKRGEIVESVGTQLSDSINLRSLSATETYKYLGMSEALGINVADMKQSLKERFFGRLKKVFNSLLSGGNKVRAFNGWVMPVLMYSFGILKWTQTELDALDRRVRTLLTTYRMHHPRSSVMRLYIPRRCGGRGFLNAKTLHNREICSLREYFLETDVGMHRDVVAVDKGLTPLSLAKENWRKPVVLDTNDRMEVWQSKELHGRFFRALHGPDVDLPASVAWLRSGDLFGETEGFVCAIMDEVMMTNNYRRFIVKDGTVDICRACHRPGESIRHIISGCSRLANGEYLHRHNLVARIIHQQLALKYNLVESEVPYYKYVPDPVLENGNITLYWDRSIVTDRTIVANKPDIVVVDRSERRAMIVDITVPHDGNLVKAEKDKQIKYLDLAHEVVDMWDVDSTIIVPIVVSAHGLIAKSLDQYLRRLSLGSWIKGLIQKAVLLDTARIVRRFLSLEP

SEQ ID NO: 12143 - protein, 1099 aa, Noctua janthe
MQMSCAHTMGLQRGGNNLTAYRVRMLSLFQVLEPAVNVSAQRLSDQVRVIQRNGMLDDTVLDRLRTEMQSSHVIATPPQTVVPPQSTIIPTHDNNVSNDMVTNVSTQCNEEMRCALEGAIREYRFMQPDLRPRVPRLPMHNKNKVLVAVLDSQLSNYFDNCENLTDAHSVLYCAAVAACRVAHVKFSDDRATRPKPAVPSWQYRIERRIGEARALIGKLICFREGNTRPRVMRFVRRAFSGTDISARDYMSRVTERIDFLKQKVYAWANRIRRYKRRVDRYTQNRTFQRDERWAYRAWERPDQGVADTHLPDDDAMCSFWRSIWSVPVSHTEGEWTREVERACDLVPEMGAITISPQDVVRAVRPLPNWKSPGPDGLHNFWIKWFTRSHARLAILFQSALESGSLPEFLTTGITHLLHKSGSTAEPKNYRPIACLPTVYKVLTSILRAKINKHIDDNSVMSASQNGCRNGSRGTKELLLIDMAISQQVRRSRRDLSTCWIDYKKAYDSVPHTWLMRVLELYKVDSTLRIFLMSCMRQWRTVLRYPGCRQIQRNSEPIRIERGIFQGDSLSPLWFCLALNPLSTLLEDSGLGYRLRRGGQVISHLLYMDDLKLFAPNDLQLMELLKVTETFSSAIRMEFGVDKCAVMHVKRGEIVESVGTQLSDSINLRSLSATETYKYLGMSEALGINVADMKQSLKERFFGRLKKVFNSLLSGGNKVRAFNGWVMPVLMYSFGILKWTQTELDALDRRVRTLLTTYRMHHPRSSVMRLYIPRRCGGRGFLNAKTLHNREIYSLREYFLETDVGMHRDVVAVDKGLTPLSLAKENWRKPVVLDTNDRMEIWQSKELHGRFFRALHGPDVDLPASVAWLRSGDLFGETEGFVCAIMDEVMMTNNYRRFIVKDGTVDICRACHRPGESIRHIISGCSRLANGEYLHRHNLVARIIHQQLALKYNLVESEVPYYKYVPDPVLENGNITLYWDRSIITDRTIVANKPDIVVVDRSERRAMIVDITVPHDGNLVKAEKDKQIKYLDLAHEVVDMWDVDSAIIVPIVVSAHGLIAKSLDQYLRRLSLGSWIKGLIQKAVLLDTARIVRRFLSLEP

SEQ ID NO: 12144 - protein, 1197 aa, Noctua janthe
MLTRSAARRARLSPPDPSLSSASPPPESSPVVSAVTPAVAVASSSSDEYFSPPTTPPPVRRRGGRRPPDGLGPRGPPASDRVPAPGGSVPRMRWTQSINANVMRAYYGATEGGNNLTAYRVRMLSLFQVLEPAVNVSAQRLSDQVRVIQRNRMLDDTVLDRLRSEMQSSHVITPSVQAVVLPQSSTISNHANNVNNDMVTNVSTQCNEEMRSALEGAIREYRFMQPDLRPRISRLPMHNKNRALVAVLDSQLSNYFDSCEELTDAHSILYCAAVTACRVAHVKFSDDRATRPKPAVPAWQYRIERRIDGARALIGKLICFREGNTRPRVMRFVRRAFSGTDISPRDYMSRVTERIDFLKQKVYAWANRIRRYKRRVDRYTQNRTFQRDERWVFRAWERPDQGVADTRLPDDDAMCSFWRSIWSVPVSHTEGEWTRRVERACDLVPEMGAINISPQDVVRAVRPLPNWKSPGPDGLHNFWIKWFTRSHARLAILFQSALESGSLPEFLTTGITHLLHKSGSTAEPKNYRPITCLPTVYKVLTSILRAKINKHIDDNSVMSASQNGCRNGSRGTKELLLIDMAISQQVRRSRKDLSTCWIDYKKAYDSVPHTWLMRVLELYKIDATLRTFLMSCMGQWRTVLRYPGCRQIQRNSEPIRIERGIFQGDSLSPLWFCLALNPLSTLLEDSGLGYRLRRGGQVISHLLYMDDLKLFAPNDLQLMELLKVTETFSSAIRMEFGVDKCAVMHVKRGEIVESVGTQLSDSINLRSLSATETYKYLGMSEALGINVADMKQSLKERFFGRLKKVFNSLLSGGNKVRAFNGWVMPVLMYSFGILKWTQTELDALDRRVRTLLTAYRMHHPRSSVMRLYIPRRRGGRGFLNAKTLHNREICSLREYFLETDVGMHRDVVAVDKGLNPLSLAKENWRKPVVLDTNDRMEVWQSKELHGRFFRALHGPDVDLSASVAWLRSGDLFGETEGFVCAIMDEVMMTNNYRRFIVKDGTVDICRACHRPGESIRHIISGCSRLANGEYLHRHNLVARIIHQQLALKYNLVESEVPYYKYVPDPVLENGSITLYWDRSIITDRTIVANKPDIVVVDRSERRAMIVDITVPHDENLVKAEKDKQIKYLDLAREVVDMWDVDSAIIVPIVVSAHGLIAKSLDQYLRRLSLGSWIKGLIQKAVLLDTARIVRRFLSLEP

SEQ ID NO: 12145 - protein, 1200 aa, Mythimna ferrago
MLTRAAARRARPPPLASSLSSASLPPEPSLTVSAVTPAAAAASSSSDEYYSPPTTPPPARRRGGRRPPACLGPRGPPVSDRVPAAGGSVPRMRWTQSTNENVMRAYYGATEGGNNLTAYRVRMLSLFQVLEPAVNVSAQRLSDQVRVIQRNNMLDDTVLDRLRTEMSNRVITPPSQPVVPVVVPQSSHISLHTDEVSTDTVTNVSTQCNNELRSALECAIREYRNMPLELRPRLPRLPMHNKNKALVAALDSQLSNYFDDCEDLTDTHSIMYCAAVAACRVAHVKFPNSDVATRPKPAVPAWQYRIERRIGGARALIGKLICFREGNTRPRVMRFVRRAFSGTDISPRDYMSRVTERIDFLKQKVYAWANRIRRYKRRVERYIQNSTFRSNERWVYRAWERPDQGVTDTRPPDDDAMCSFWRNIWSVPVSHTEGGWTREVERACESVTEMGAITISPQDVARAVRPLPNWKSPGPDGLHNFWIKWLQRSHARLASQYQAALESGSLPEFLTTGVTHLLHKSGSTAEPKNYRPITCLPTVYKVLTSILRAKINHHVDNNAIMSASQNGCRNGSRGTKELLLIDMAISQQVRRSRKDLSTCWIDYKKAYDSVPHTWLMRVLELYKVDATLRTFLMSCMRQWRTVLRYPGCRNIQRNSEPVRIERGIFQGDSLSPLWFCLALNPLSTLLENSGLGYRLKRGGQVISHLLYMDDLKLFAPNNLQLMELLKVTETFSSAIRMEFGVDKCAVMHIKRGEIVESVGIQLSDSIHLRSLSPTETYKYLGMSEALGINATDMKQSLRERFFGRLKKVLNSLLSGGNKVRAFNGWVMPVLMYAFGVLKWTQTELDALDRRVRTLLTAYRMHHPRSSVMRLYIPRKCGGRGFLNAKSLHNREVCSLREYFLAADGGMHRDVVAVDKGLTPLSLANENWRKPVVLDTNVRREVWQSKELHGRFFRALHGPDVDQLASVAWLRVGDLFGETEGFVCAIMDEVIMTNNYRRFIVKDGTVDICRACHRPGESIRHIISGCSRLANGEYLHRHNLVARIIHQQLALKYSLVESEVPYYRYVPDPVLDSGDITLYWDRSIITDRTIVANKPDIVVVDRSERHAMIVDISVPHDENLAKAEKDKQIKYIDLAREVVDMWEVDSAIIVPIVVSANGLIAKSLDQHLRRLSLGDWIKGLIQKAVLLDTARIVRRFLSLEP

SEQ ID NO: 12146 - protein, 1200 aa, Mythimna ferrago
MLTRSRARQQQTHPTSSDSSFSSASQPPGPAPAVSPVIPVAAVASSSSDEYFSPLTTPPPARRRGRGRPPACLGPRGPPASGGVPAAGGSVQRMRWTQSINENVMRSYFGATEGGTNLTAYRGRMLSLFQVLEPAVNVSAQRLSDQVRVIQRNRMLDDAVLDRLRLESRNGRVSPVSPPAAVQLQPSVSPRPDHVGEDDDDGAISVSTQCNARLRSALEDAFREYRSIPPELRPRLPRLPMHRKNRALVCALDSQLSNCFDSSEDLTDTHSILYCAAAAACRVAHVKIPNSDRATRPAKPAWQCRIERRIGEARALIGKLICFREGNTRPRVMRFVRRAFSGTDVSPRDYLPRITERIDFLRQKVYAWANRIRRYKRRVERYTQNRAFQSNERWVYRAWERPDQSVIDTRLPDDDAMYSFWRSIWSVPVSHTEGDWTRGVERECELIPEMGAITISPQDVARAVRPLPNWKSPGPDGLHNFWLKWFKSSHARLASQFQSALESGSLPQFLTTGITHLLHKSGSTAEPKNYRPITCLPTVYKVLTSILRAKINSHIETNSIMSASQNGCRNGSRGTKELLLIDVAISQQVRRSRRDLSTCWIDYKKAYDSVPHTWLMRVLELYKIDVTLRTFLMSCMGQWRTVLHYPGCRRVSENSEPLRIERGIFQGDSLSPLWFCLALNPLSTLLEGSGLGYRLRREGQVISHLLYMDDLKLFASNNLQLMELLKVTETFSSAIRMEFGLDKCAVMHVKRGEIMESVGTQLSDSIHLRSLSSTETYKYLGISEALGINAADVKQSLRERFFCRLNKVLKSLLSGGNKVRAFNGWVMPVLMYSFGILKWTQTELDALDRRVRTLLTANRMHHPRSSVMRLYIPRKCGGRGFLNAKTLHNREVCSLREYFLETDVGMHRDVVAVDKGLTPLSLASENWRKPIVMDTNERKEVWKGKELHGRFYRALHGPDVDLLASVSWLRFGNLFGETEGFVFAIMDEVMMTNNYRKYIVKDGTVDICRACHRPGESIRHIISGCSHLANGDYLHRHNLVARIIHQQLALKYNLVESEVPYYRYVPDLVLENGSVTLYWDRSIITDRTIVANKPDIVVIDRLERRTMIVDIAVPHDENLVKAEKDKQTKYLDLAREVVDMWEVDRAIIVPIVVTANGLIAKSLDQHLRRLSLGSWIKGLIQKAVLLDTARIVRRFLSQEP

SEQ ID NO: 12147 - protein, 1200 aa, Mythimna ferrago
MLTRAAARRARPPPLASSLSSASLPPEPSLTVSAVTPAAAAASSSSDEYYSPPTTPPPARRRGGRRPPACLGPRGPPVSDRVPAAGGSVPRMRWTQSTNENVMRAYYGATEGGNNLTAYRVRMLSLFQVLEPAVNVSAQRLSDQVRVIQRNNMLDDTVLDRLRTEMSNRVITPPSQPVVPVVVPQSSHISLHTDEVSTDTVTNVSTQCNNELRSALECAIREYRNMPLELRPRLPRLPMHNKNKALVAALDSQLSNYFDDCEDLTDTHSIMYCAAVAACRVAHVKFPNSDVATRPKPAVPAWQYRIERRIGRARALIGKLICFREGNTRPRVMRFVRRAFSGTDISPRDYMSRVTERIDFLKQKVYAWANRIRRYKRRVERYIQNSTFRSNERWVYRAWERPDQGVIDTRPPDDDAMCSFWRNIWSVPVSHTEGGWTREVERACESVTEMGAITISPQDVARAVRPLPNWKSPGPDGLHNFWIKWLQRSHARLASQYQAALESGSLPEFLTTGVTHLLHKSGSTAEPKNYRPITCLPTVYKVLTSILRAKINHHVDNNAIMSASQNGCRNGSRGTKELLLIDMAISQQVRRSRKDLSTCWIDYKKAYDSVPHTWLMRVLELYKVDATLRTFLMSCMRQWKTVLRYPGCRNIQRNSEPVRIERGIFQGDSLSPLWFCLALNPLSTLLENSGLGYRLKRGGQVISHLLYMDDLKLFAPNNLQLMELLKVTETFSSAIRMEFGVDKCAVMHIKRGEIVESVGIQLSDSIHLRSLSPTETYKYLGMSEALGINATDMKQSLRERFFGRLKKVLNSLLSGGNKVRAFNGWVMPVLMYAFGVLKWTQTELDALDRRVRTLLTAYRMHHPRSSVMRLYIPRKCGGRGFLNAKSLHNREVCSLREYFLAADGGMHRDVVAVDKGLTPLSLANENWRKPVVLDTNVRREVWQSKELHGRFFRALHGPDVDQLASVAWLRVGDLFGETEGFVCAIMDEVIMTNNYRRFIVKDGTVDICRACHRPGESIRHIISGCSRLANGEYLHRHNLVARIIHQQLALKYSLVQSEVPYYRYVPDPVLDSGDITLYWDRSIITDRTIVANKPNIVVVDRSERRAMIVDISVPHDENLAKAEKDKQIKYIDLAREVVDMWEVDSAIIVPIVVSANGLIAKSLDQHLRRLSLGDWIKGLIQKAVLLDTARIVRRFLSLEP

SEQ ID NO: 12148 - protein, 1200 aa, Mythimna ferrago
MLTRSRARSQIAQPTSSGSSLSSASQPPGPAPAVSPEIPVAAVASSSSDEYFSPPTTPPPARRRGRGRPPACLGPRGPPASDGVLAAGGSVQRMRWTQSINENVMRSYFGATEGGTNLTAYRGRMLSLFQVLEPAVNVSAQRLSDQVRVIQRNRMLDDAVLDRLRLESRNGRVSPISPPAAVQRQPSVSPRPDHVGEDDDDEAISVSTQCNARLRSALEDAFREYRSIPPELRPRLPRLPMHRKNRALVCALDSQLSNCFDSSEDLSDTHSILYCAAAAACRVAHVKIPNNDRATRPAKPAWQCRIERRIGETRALIGKLICFREGNTRPRVMRFVRRAFSGTDISPRDYLPRITERIDFLKQKVYAWANRIRRYKRRVERYTQNHTFQSNERWVYRAWERPDQSVIDTRLPDDDAMYSFWRSIWSVPVNHTEGDWTREIERECELIPEMGAINISPQDVACAVRPLPNWKSPGPDGLHNFWLKWFQSSHARLASQFQSALESGSLPQFLTTGITHLLHKSGSTAEPKNYRPITCLPTVYKVLTSILRAKINNHIETNSIMSASQNGCRNGSRGTKELLLIDVAISQQVRRSRRDLSTCWIDYKKAYDSVPHTWLMRVLELYKVDATLRAFLMSCMGQWRTVLHYPGCRRVSENSEPLRIERGIFQGDSLSPLWFCLALNPLSTLLEGSGLGYRLRREGQVISHLLYMDDLKLFASNNLQLMELLKVTETFSSAIRMEFGLDKCAVMHVKRGEIMESVGTQLSDSIHLRSLCSTETYKYLGMSEALGINAADVKQSLRERFFGRLNKVLNSLLSGGNKVRAFNGWVMPVLMYSFGILKWTQTELDALDRRVRTLLTANRMHHPRSSVMRLYIPRKCGGRGFLNAKTLHNREVCSLREYFLETDVGMHRDVVAVDKGLTPLSLASENWRKPIVMDTNERKEVWKGKELHGRFYRALHGPDVDLLASVSWLRFGNLFGETEGFVFAIMDEVMMTNNYRKYIVKDGTVDICRACHRPGESIRHIISGCSHLANGDYLHRHNLVARIIHQQLALKYNLVESEVPYYKYVPDPVLENGSVTLYWDRSIITDRTIVANKPDIVVIDRLERRTMIVDIAVPHDENLVKAEKDKQTKYLDLAREVVDMWEVDRAIIVPIVVTANGLIAKSLDQHLRRLSLGSWIKGLIQKAVLLDTARIVRRFLSQEP

SEQ ID NO: 12149 - protein, 1200 aa, Mythimna ferrago
MLTRAAARRARPPPPASSLSSASPPSEPSLTESAVTPAVAAASSSSDEYYSPPTTPPPTRRRGGRRPPACLGPRGPPASDRVPAAGGSVPRMRWTQSTNENVMRAYYGATEGGNNLTAYRVRMLSLFQVLEPAVNVSAQRLSDQVRVIQRNHMLDDTVLDRLRTEMSDRVITPPSQPVVPVVVPPSSHISFHTDEVSTDTVTNVSAQCNNELRSALECAIREYRNMPLELRPRLPRLPMRNKNKALVAALDSQLSNYFDDCEDLTDTHSIMYCAAVAACHVAHVKFPNSDVATRPKPAVPAWQCRIERRIGGARALIGKLICFREGNTRPRVMRFVRRAFSGTDISPRDYMSRVTERIDFLKQKVYAWANRIRRYKRRVERYTQNSTFRSNERWVYRAWERPDQGVTDTRLPDDDAMTSFWRNIWSVPVSHTEGGWTREVERACESITEMGAITISPQDVARAVRPLPNWKSPGPDGLHNFWIKWLQRSHARLASQYQAALESGSLPEFLTTGVTHLLHKSGSTAEPKNYRPITCLPTVYKVLTSILRAKINHHVDSNAIMSASQNGCRNGSRGTKELLLIDMAISQQVRRSRKDLSTCWIDYKKAYDSVPHTWLMRVLELYKVDATLRTFLMSCMRQWRTVLRYPGCRNIHRNSEPVRIERGIFQGDSLSPLWFCLALNPLSTLLENSGLGYRLKRGGQVISHLLYMDDLKLFAPNNLQLMELLKVTETFSSAIRMEFGVDKCAVMHIKRGEIVESVGIQLSDSIHLRSLSPTETYKYLGMSEALGINASDMKQSLRERFFGRLKKVLNSLLSGGNKVRAFNGWVMPVLMYAFGVLKWTQTELDALDRRVRTLLTAYRMHHPRSSVMRLYIPRKCGGRGFLNAKTLHNREVCSLREYFLAADGGMHRDVVAVDKGLTPLSLANENWRKPVVLDTNVRKEVWQSKELHGRFFRVLHGPDVDQLASVAWLRSGDLFGETEGFVCAIMDEVIVTNNYRRFIVKDGTVDICRACHRPGESIRHIISGCSRLANGEYLHRHNLVARIIHQQLALKYSLVESEVPYYRYVPDPVLDSGDITLYWDRSIITDRTIVANKPDIVVVDRRERRAMIVDISVPHDENLVKAEKDKQIKYIDLAREVVDMWDVDSAIIVPIVVSANGLIAKSLDQHLRRLSLSGWIKGLIQKAVLLDTARIVRRFLSLEP

SEQ ID NO: 12150 - protein, 1109 aa, Mythimna ferrago
MRWTQSINENVMRSYYGATEGGNSLTAYRVRMLSLFQVLEPAVNVSAQRLSDQVRVILRNHMLDDTVLDRLRTEMSDRVITPPSQPVVPVVVPPSSHISFDTNEVSSDTVTNVSNQCNSELRSALECAIREYRNIPSELRPRIPRLPMCNKNRALVAALDSQLSSYFDDCEDLTDAHSIMYCAAVAACRVAHVKFPNSDVATRPKPAVPAWQCRIERRIGGARALIGKLICFREGNTRPRVMRFVRRAFSGTDISPRDYMSRVTERIDFLKQKVYAWANRIRRYKRRVERYTQNRTFRSNERWVYRAWERPDQGVTDARLPDDDAMSSFWRSIWSVPVSHTEGDWIRGVERACDPIPQMGAIDISPQDVARAVRPLPNWKSPGPDGLHNFWIKWFTRSHARLAYQFQSALESGSLPQFLTTGITHLLHKSGSTAEPKNYRPITCLPTVYKVLTSILRSKINNHIDENLIMSPSQNGCRNGSRGTKELLLVDMTISQQVRRSRKDLSTCWIDYKKAYDSVPHTWLMRVLELYKIDTTLRTFLMSCMRQWSTVLCYPGCRNIQRNSEPVRIERGIFQGDSLSPLWFCLALNPLSTLLENSGLDYRLKRGGQVISHLLYMDDLKLFAPNNLQLMELLKVTETFSSAIRTEFGVDKCAVMHVKRGEVVESMSTRLTDSINLRSLSPTETYKYLGMSEALGISITNMKQSLKERFFGRLKKVFNSLLSGGNKVRAFNGWVMPVLMYSFGVLKWTQTELDALDRRVRTLLTAYRMHHPRSSVMRLYIPRKCGGRGFLNAKTLHNREVCSLREYFLAADVGMHRDVVAVDKGLTPLSLANENWRKPIVLDTNDRREVWQSKELHGRFFRALHGPDVDQLASVAWLRFGDLFGETEGFVYAIMDEVIMTNNYRRFIVKDGTVDICRACHRPGESIRHIISGCSRLANGEYLHRHNLVARIIHQQLALKYSLVESEVPYYRYEPDPVLNNGHITLYWDRPIITDRTIVANKPDIVVVDRSERRAMIVDISVPHDENLVKAEKDKQIKYIDLAREVVDMWEVDSAIIVPIVVSANGLIAKSLDQHLRRLALGSWIKGLIQKAVLLDTARIVRRFLSLEP

SEQ ID NO: 12151 - protein, 1200 aa, Mythimna ferrago
MLTRAAARRARPPPPASSLSSASPPPEPSPIVSAVTPAVAAASSSSDEYYSPPTTPPPTRRRGGRRPPDCLGPRGPPASDRVPAPGGSVQRMRWTQSINENVMRSYYGATEGGNNLTAYRVRMLSLFQVLEPAVNVSAQRLSDQVRVILRNHMLDDTVLDRLRTEMSDRVITPPSQPVVPAVVPPSNYISFHTDEGSSDTVTNVSNQCNSELRSALECAIREYRNIPPELRPRIPRLPMCNKNRALVAALDSQLSNYFDDCEDLTDTHSIMYCAAVAACRVAHVKFPNSDVATRPKPAVPAWQCRIERRIGGARALIGKLICFREGNTRPRVMRFVRRAFSGTDISPRDYMSRVTERIDFLKQKVYAWANRIRRYKRRVERYTQNRTFRSNERWVYRAWERPDQGVTDARLPDDDAMSSFWRNIWSVPVSHTEGDWTREVERACDPIPQMGAIDISPQDVARAVRPLPNWKSPGPDGLHNFWIKWFTRSHARLAYQFQSALESGSLPQFLTTGITHLLHKSGSTAEPKNYRPITCLPTVYKVLTSILRSKINSHIDENSIMSPSQNGCRNGSRGTKELLLIDMTISQQVRRSRKDLSTCWIDYRKAYDSVPHTWLMRVLELYKIDTTLRTFLMSCMRQWSTVLRYPGCRNIQRNSEPVRIERGIFQGDSLSPLWFCLALNPLSTLLENSGLGYRLKRGGQVISHLLYMDDLKLFAPNNLQLMELLKVTEIFSSAIRMEFGVDKCAVMHVKRGEAVESVSTQLTDSINLRSLSPTETYKYLGMSEALGISITGMKQSLRERFFGRLKKVFNSLLSGGNKVRAFNGWVMPVLMYSFGVLKWTQTELDALDRRVRTLLTAYRMHHPRSSVMRLYIPRKCGGRGFLNAKTLHNREVCSLREYFLAADVGMHRDVVAVDKGLTPLSLANENWRKPIVLDTNDRREVWQSKELHGRFFRALHGPDVDQLASVAWLRFGDLFGETEGFVCAIMDEVIMTNNYRRFIVKDGTVDICRACHRPGESIRHIISGCSRLANGEYLHRHNLVARIIHQQLALKYSLVESEVPYYRYEPDPVLDNGHITLYWDRPIITDRTIVANKPDIVVVDRSERRAMIVDISVPHDENLVKAEKDKQIKYIDLAREVVDMWEVDSAVIVPIVVSANGLIAKSLDQHLRRLSLGDWIKGLIQKAVLLDTARIVRRFLSLEP

SEQ ID NO: 12152 - protein, 868 aa, Mythimna ferrago
MRFVRRAFSGTDISPRDYLPRITERIDFLKQKVYAWANRIRRYKRRVERYTQNHTFQSNERWVYRAWERPDQSVIDTRLPDDDAMYSFWRSIWSVPVNHTEGDWTREIERECELIPEMGAINISPQDVARAVRPLPNWKSPGPDGLHNFWLKWFQSSHARLASQFQSTLESGSLPQFLTTGITHLLHKSGSTAEPKNYRPITCLPTVYKVLTSILRAKINNHIETNSIMSASQNGCRNGSRGTKELLLIDVAISQQVRRSRRDLSTCWIDYKKAYDSVPHTWLMRVLELYKVDATLRAFLMSCMGQWRTVLHYPGCRRVSENSEPLRIERGIFQGDSLSPLWFCLALNPLSTLLEGSGLGYRLRREGQVISHLLYMDDLKLFASNNLQLMELLKVTETFSSAIRMEFGLDKCAVMHVKRGEIMESVGTQLSDSIHLRSLCSTETYKYLGMSEALGINAADVKQSLRERFFGRLNKVLNSLLSGGNKVRAFNGWVMPVLMYSFGILKWTQTELDALDRRVRTLLTANRMHHPRSSVMRLYIPRKCGGRGFLNAKTLHNREVCSLREYFLETDVGMHRDVVAVDKGLTPLSLASENWRKPIVMDTNERKEVWKGKELHGRFYRALHGPDVDLLASVSWLRFGNLFGETEGFVFAIMDEVMMTNNYRKYIVKDGTVDICRACHRPGESIRHIISGCSHLANGDYLHRHNLVARIIHQQLALKYNLVESEVPYYKYVPDPVLENGSVTLYWDRSIITDRTIVANKPDIVVIDRLERRTMIVDIAVPHDENLVKAEKDKQTKYLDLAREVVDMWEVDRAIIVPIVVTANGLIAKSLDQHLRRLSLGSWIKGLIQKAVLLDTARIVRRFLSQEP

SEQ ID NO: 12153 - protein, 1200 aa, Mythimna ferrago
MLTRAAARRARPPPPASSLSSASPPPDPSPTVSAVTPAVAAASSSSDEYYSPPTTPPPARRRGGRRPPACFGPQGPPASDRVPATGGSVPRMRWTQSTNENVMRAYYGATEGGNNLTAYRVRMLSLFQVLEPAVNVSAQRLSDQVRVIQRNHMLDDTVLDRLRTEMSNHVIAPSSQPVVPVMVPPSNHVANPADVESTDMVIQVSTQCTNELRSALECAIREYRNMPSVLRPRLPRLPMHNKNKALVAALDMQLSNYFDNCKDLTDAHSIMYCAAVAACRVAHVKFPNSDVATRPKPAVPAWQCRIERRIGGARALIGKLICFREGNTRPRVMRFVRRAFSGTDICPRDYMLRVTERIDFLKQKVYAWANRIRRYKRRVERYTQNRAFQSNERWVYRAWERPDQGVTDTRLPDNDAMCSFWRNIWSVPVSHTEGGWTREVEQACEPITEMGAITISPQDVARAVRPLPNWKSPGPDGLHNFWIKWLQRSHACLASQYQAALESSSLPEFLTTGVTHLLHKSGSTAEPKNYRPITCLPTVYKVLTSILRDKINNHIDNNSIMSASQNGCRKGSRGTKELLLIDMAISQQVRRSRKDLSTCWIDYKKAYDSVPHTWLMRVLELYKIDATLRTFLMSCMRQWRTVLRYPGCRNIQRSSEPVRIERGIFQGDSLSPLWFCLALNPLSTLLENSGLGYQLKRGGQVTSHLLYMDDLKLFAPNKLQLMELLKVTETFSSAIRMEFGVDKCAVMHVKRGEIVESVSTQLLDSISLRSLSATETYKYLGMSEALGINATDMKQSLRERFFGRLKKVFNSLLSGGNKVRAFNGWVMPVLMYSFGVLKWTQTELDALDRRVRSLLTANRMHHPRSSVMRLYIPRKCGGRGFLNAKTLHNREVCSLREYFLAADVGMHRDVVAVDKGLTPLSLANENWRKPVVLDTNDRKEVWQSKELHGRFFRALHGPDVDQLASVAWLRVGDLFGETEGFVCAIMDEVIMTKNYRRFIVKDGTVDICRACHRPGESIRHIISGCSRLANGEYLHRHNLVARIIHQQLALKYSLVESEVPYYRYVPDPVLDNGDITMYWDRSIITDRTIVANKPDIVVVDRSERRAMIVDISVPHDENLVKAEKDKQIKYIDLAREVVDMWDVDSAIIVPIVVSGNGLIAKSLDQHLRRLALGSWIKGLIQKAVLLDTARIVRRFLSLEP

SEQ ID NO: 12154 - protein, 1199 aa, Acronicta aceris
MLTRARARYIEHHTRLTTPDSSPSSALQQPQHGRTSPNAAATASSSSDEYYSPPTSPPPVRRRGGRRPPDRLGPRGPLASGGIPASGGSVQRMRWTRSLNENVMRAYYGATEGGTNLTAYRGRMLSLFQALEPTIDVSTQRLSDQVRVIQRNHMLDDSVLDQLRSEVQSSRAIAHPSQSVAPSATLPQTNLAEVGSDDRVTNVSTQYNEKLRSALEGAFREYRSSPPELRPRLPRLPMNNKNLALVCALDSLLSDYFDSSEDLADTHSILYCAAVAACRVAHVKFPESDRATRPKPMIPAWQSRIEQRIGEARALIGKLICFREGNTRPRVMRFVRRAFSGTNIDPRDYASCVTERIDFLKQKVYAWANRIRRYKRRAERYSLNRTFKGDQRWVYRTWDRPDNGVSDVCRPNDDAMSSFWRNIWSVPVNHTEDDWIFDVERACESLPAMDEINISPQDVACAVHSVPNWKAPGPDGLHNFWIKWLRSSHARLASQFQSSLESGTLPQFLTTGITHLLHKSGDTADPKNYRPITCLPTVYKLLTSILRAKICYHIDESSIMSASQNGCRNGSRGTKELLLIDMTISQQVRRLRKNLSTCWIDYKKAYDSVPHTWLMRVLELYKVDVSLRTFLRSCMGQWRTVLHYPGCRQIQRISEPIRIERGIFQGDSLSPLWFCLALNPLSTLLEESRLGYRLRRGGQVISHLLYMDDLKLFASSDLHLMELLKITENFSNSIRMEFGVEKCAVMHVKRGGIVESVGIQLSDSTQLRSLAATETYKYLGMAEALGINVADMKQSLQVRFFGRLTKVLKSLLSGGNKVRAFNGWVMPVLMYSFGVLKWTQTELETLDRKVRTLLTAYRMHHPRSSVMRLYIPRKCGGRGFLNAKNLHNREVCSLREHFLKTEMGMHRDVVAVDNGLTPLSMAKENWRKPVVLSTNDRRNVWQGKELHGRYYRALHEPGVDTLASVSWLRFGDLFGETEGFVCAIMDEVMMTNNYRKFIVKDGTVDICRACHRPGESIRHIISGCSRLANGEYLHRHNLVARIIHQQLALKYNLVESEVPYYKYVPDPVLENGHATLYWDRSIITDRTIIANKPDIVVIDRLERRAMIVDITVPHDENLFKAEKEKEIKYLDLAHEVVDMWGVDAAIIVPIVVSANGLIAKSLDRHLKRLSLGGWIKGLIQKVVLLDTARIVRRFLSLGP

SEQ ID NO: 12155 - protein, 1192 aa, Eilema sororculum
MLTRAQASRNRSAPTTSPDSSLSSAAQPPAVEPAASSSSSSDEFFSPPTSPTPVRRPGRGRPPTCLGPRRPPASNRAPATGGDVHRMRWTTSINENVMRAYFAATEGGTNLSAYRTRMLPLFQALEPSINVSAQRLSDQVRVIHRNRMLNETVLETLRLECLRNICVTPAPAPAPASTVEINDDTCVAPDDTPIPVSIQYNEEIKEALECALREYRSMPVHFRPRLPRLPIHRRNIALVSALDSLLPRYLENSENLGDTHSILYCTAVAACRMAGAKFPNKDPAIRLKSAIPAWQCRIERRVAEARVLIGKLICFRSGNTRPRVMRYVTRAFAGTDISPRDYTSRVTERIDFLKQKVYAWANRIRRYKKRVDRYTVNRIFQRGQRWVYRSWERTEESVDDVRRPDAETTNAFWRSIWSVPVNHTEGDWMREVERACETIPEMEKINIDAIDVDCAVRSLSNWKSPGPDGLHNFWLKWLRSSHVVLASQFQSAVESGTLPAFMTTGVTHLLHKTGSTLEPNNYRPITCLPTVYKLLTSILRAKINNHINNNSIMCASQNGCRNGARGTKELLLIDMAISQQARRNRKDLTACWIDYKKAFDSVPHTWLLRVLELYKVNTTLCTFLRSCMGQWRTVLFYPGCRQALGSGEPITIERGIFQGDSLSPLWFCLALNPLSTLLVNSGLGYRLRREGQMVSHLFYMDDLKLFAHTNPQLIALLKVTETFSNSIKMAFGVDKCAVIHVKRGRVVESEGIQLSDSTNLRSLLVTETYKYLGMSQALCINEVDMKQMLQERFFGRLKKVLNSLLSGGNKVRACYSWVMPLLMYSFGILKWTQTELDTIDRKVRTQLTAFRMHHPRSSVMRLYIPRKCGGRGFLNAKTLHNREVCNLRDYFLKSNVDMHRDVVNVDTGLTPLGLAKENWRRPTIVGTDSRREVWQSKELHGRFYRALHRPEVDLLTSVSWLRFSDLFGETEGFVCAIADEVIKTNNYRKYIMRDGTIDICRACHQPGESLRHITSGCSRLANGEYLHRHNQVARIIHQRLALKYSLVEVEVPYYRYVPEPVLENSHITLYWDRSIITDRTVVANKPDIVVIDRSERRALIVDVTIPHDENLVKAEKDKQVKYLDLAHEVVDMWNVDSAIIVPIVVSVNGLIAKSLDQHLKRLGLDGWVKGQIQKAVLLDTARIVRKFLSLKP

SEQ ID NO: 12156 - protein, 1192 aa, Eilema sororculum
MLTRAQAKRHRNAPTTSPDSSLSSAAQPPAVEPAASSSSSSDEFFSPPTSPTPVRRPGRGRPPTCLGPRRPPASSGAPATGGDVHRMRWTTSINENVMRAYFAATEGGTNLSAYRTRMLPLFQALEPSINTSAQRLSDQVRVIQRNRMLNETVLETLRLECLRNICVTRAPAPAPASTAGINDDTCVAPDDTPVPVSIQYNEEIKEALECALREYRSMPVHVRPRLPRLPIHRRNIALVSALDSLLPRYLENSENLGDTHSILYCTAVAACRMAGAKFPIKDPAIRPKFTIPAWQCRIERRVAEARVLIGKLICFRSGNTRPRVMRYVTRAFAGTDISPQDYTSRVTERIDFLKQKVCAWANRIRRYKKRVDRYTVNRMFQRDQRWVYRSWERTDESVDDVRRPDAEATNAFWRSIWSVPVSHTEGDWMREVERTCETIPEMEEIYIDATDVDCAVRSLSNWKSPGPDGLHYFWLKWLRSSHVVLASQFQSAIESGTLPAFMTTGVTHLLHKTGSTLEPNNYRPITCLPTVYKLLTSILRAKINNHINNNSIMCASQNGCRNGARGTKELLLIDMAISQQARRNRKDLTACWIDYKKAFDSVPHTWLLRVLELYKVNTTLCTFLRSCMRQWRTVLFYPGCCRALGGGVPITIERGIFQGDSLSPLWFCLALNPLSALLVNSGLGYRLRREGQMVSHLFYMDDLKLFAHTNPQLIALLKVTETFSNSIKMAFGVDKCAVIHVKRGRVVESEGIQLSDSTNLRSLLVTETYKYLGMSQALCINEVDMKQLLQERFFGRLKKVLNSLLSGGNKVRACNSWVMPLLMYSFGIIKWTQTELDTIDRKVRTQLTAFRMHHPRSSVMRLYIPRKCGGRGFLNAKTLHNREVCNLRDYFLKSNVDMHRDVVNVDTGLTPLGLAKENWRRPTIVSTDSRREVWQSKELHGRFYRALHRPEVDLLASVSWLRFSDLFGETEGFVCAIADEVIKTNNYRKYIMRDGTIDICRACHQPGESLRHITSGCSRLANGEYLHRHNQVARIIHQRLALKYNLVEVEVPYYRYVPEPVLENSHITLYWDRSIITDRTVIANKPDIVVIDRSERRALIVDVTIPHDENLVKAEKDKQVKYLDLAHEVVDMWNVDSAIIVPIVVSVNGLIAKSLDQHLKRLGLDGWVKGQMQKAVLLDTARIVRKFLSLEP

SEQ ID NO: 12157 - protein, 1045 aa, Eilema sororculum
MLNETVLETLRLECLRNICVTPAPAPAPASTVEINDDTCVAPDDTPIPVSIQYNEEIKEALECALREYRSMPVHVRPRLPRLPIHRRNIALVSALDSLLPRYLENSENLGDTHSILYCTAVAACRMAGAKFPNKDPAIRLKSAIPAWQCRIERRVAEARVLIGKLICFRSGNTRPRVMRYVTRAFAGTDISPQDYTSRVTERIDFLKQKVYAWANRIRRYKKRVDRYTVNRMFQRDQRCVYRSWERTEESVDDVRRPDAEATNAFWRSIWSVPVNHTEGDWMREVERACETIPEMEKINIDAIDVDCAVRSLSNWKSPGPDGLHNFWLKWLRSSHVVLASQFQSAVESGTLPAFMMTGVTHLLHKTGSTLEPNNYRPITCLPTVYKLLTSILRAKINNHINNNSIMCASQNGCRNGARGTKELLLIDMAISQQARRNRKDLTACWIDYKKAFDSVPHTWLLRVLELYKVNTTLCTFLRSCMGQWRTVLFYPGCRQALGSGEPITIERGIFQGDSLSPLWFCLALNPLSTLLVNSGLGYRLRREGQMVSHLFYMDDLKLFAHTNPQLIALLKVTETFSNSIKMAFGVDKCAVIHVKRGRVVESEGIQLSDSTNLRSLLVTETYKYLGMSQALCINEVDMKQMLQERFFGRLKKVLNSLLSGGNKVRACNSWVMPLLMYSFGILKWTQTELDTIDRKVRTQLTAFRMHHPRSSVMRLYIPRKCGGRGFLNAKTLHNREVCNLRDYFLTSNVDMHRDVVNVDTGLTPLGLAKENWRRPTIVSTDSRREVWQSKELHGRFYRALHRPEVDLLASVSWLRFSDLFGETEGFVCAIADEVIKTNNYRKYIMRDGTIDICRACHQPGESLRHITSGCSRLANGEYLHRHNQVARIIHQRLALKYNLVEVEVPYYKYVPEPVLENSHITLYWDRSIITDRTVVANKPDIVVIDRSERRALIVDVTIPHDENLVKAEKDKQVKYLDLAHEVVDMWNIGSAIIVPIVVSVNGLIAKSLDQHLKRLGLDGWVKGQMQKAVLLDTARIVRKFLSLEP

SEQ ID NO: 12158 - protein, 920 aa, Eilema depressum
MAGVKFPIKDPAIRPKSAIPAWQCRIERRVAEARVLIGKLICFRSGNTRPRVMRYVTRAFAGTDISPQKYTSRITERIDFLKQKVCAWANRIRRYRKRVDRFTVNCMFRRDQRWVYRGWEQTGESVDDVRRPEAAATNAFWRSIWSVPVSHTEGDWMCEVEGACESIPEMEDITIDAIDVDCAVRPLSNWKSPGPDGLHNFWLKWLRSSHALLASQFQSAVESGMLPAFMTTGVTHLLHKTGSTLEPNNYRPITCLPTVYKLLTSILRVKINNHINNNSIMCASQNGCRNGARGTKELLLIDMAISQQARRRNKDLAACWIDYKKAFDSVPHTWLLRVLELYKVNATLCTFLRSCMRQWRTVLFYPGCRQALGDGEPITIERGIFQGDSLSPLWFCLALNPLSTLLVNSGLGYRLRREGQMVSHLLYMDDLKLFAHTNPQLMALLKITENFSNSIKMGFGVEKCAVIHVKRGRVVESQGIQLSDSTSLRSLLVTETYKYLGMSQALCINEAGMKQMLQERFFDRLKKVLNSLLSGGNKVRACNSWVMPLLMYSFGILKWTQTELDTIDRRVRTQLTAFRMHHPRSSVMRLYIPRKCGGRGFLNAKTLHNREVCNLRDYFLKSNVDMHRDVVSVDTGLTPLGLAKENWRRPIVVGTDSRREVWQSKELHGRFYRALHRPEVDLLASVSWLRFGDLFGETEGFVCAIADEVIKTNNYRKYIMRDGTIDICRACHQPGESLRHITSGCSRLANGEYLHRHNQVARIIHQRLALKYNLVELEVPYYRYVPEPVLENSHITLYWDRSIITDRTVVANKPDIVVIDRSERRALIVDVTIPHDENLVKAEKDKQVKYLDLAHEIVDMWNVDSAIIVPIVVTVNGLIAKSLDQHLKRLGLDGWVKGQMQKAVLLDTARIVRKFLSLEP

SEQ ID NO: 12159 - protein, 1197 aa, Ptilodon capucinus
MRRLCRQRTVNEPNAQSTPPDPSPRSASPSPVTAVASSESDEYFSPPTSPPPVRQQRGRPPGHLGLLGQPAPNRVLVPSGVVRSMRWTSSINENVMRAYYEATEGGTNLTAYRNRMLPLFQSLEPAVNVSAQRLSDQVRVIQRGNMLADTVLDRLRSEMQSRRVVPVASSQPAAQPVASATVTSRLAADSDVDRDNAPINVSNQYNELLRSTLEDVVRVYRSMPNHLRPRIPRLPMHKGNRALVGALDSLLSIYFDSSDNLADTHSILYCAAITVCRVARVKVFNTDTATRPKPAVPAWQCRIERRISEARALIGKLSCFREGNTRPRVMRFVKRAFAGTDVSPREYISHVTERIDFLKQKIYAWANRIRRYKVRVDRYSQNSMFQRDQIWVYRSWERPSEPVSELQRPDDNATTTFWRDIWSVPVTHYEGDWIGDVERMCEPIKEMEAISIGPLDVANAVRSLPNWKAPGPDGLHNFWLKWLRSSHVRLASQFQSALQSGSLPEFITTGVTHLLHKTGSTTDPKNYRPITCLPTIYKTLTSILRAKIARHVEDNSIMSASQNGCRSGSRGTKELLLIDMTICQQARRNRKDLSTCWIDYKKAYDSVPHTWLVRVLELYKIDTTLRTFLESCMRQWKTVLLCPGSRQILGNGEPIRIERGIFQGDSLSPLWFCLALNPLSTLLEESGFGFRLRRGGQVISHLLYMDDLKLFAPTALQLTGLLKVTDTFSNSIRMEFGVDKCAVMHAKQGRLVESEGIQLSDSIQLRTLAATETYKYLGMSQGLGISETDMKQLLRDRFLGRLKKVLKSLLSGGNKVRAYNGWVMPVLMYSFGILKWTQTELDTLDRTVRTTLTSYRMHHPRSSVMRLYIPRKCGGRGFLNVKTLHNREICSLREYFLRADGEMHVDVMAVDNGLTPLSLAKENWRKPVVLTTDDRRLVWQGKELHGRYYRALHGRDVDLAASVAWLRFGDLFGETEGFVCAIMDEVVMTNNYRKYILRDGTIDICRACHRPGESLRHIISGCSRLANGQYLHRHNQVARIIHQQLALKYRLVTSEVPYYRYEPQPVLEDGHISLYWDRSIITDRTIVANKPDIVLIDRQERRAIIVDITVPHDENLVKAEKDKESKYLDLAHEVVDMWDIDAAIIVPIVVSAHGLLAKSLDKHLKRLALGGCIKGQIQKAVLLETARIVRKFLSLEP

SEQ ID NO: 12160 - protein, 1166 aa, Ptilodon capucinus
MTAVASSESDEYFSPPTSPPPVRRQRGRPPGHLGLLGQPAPNRVLVPSGVVRRMRWTSSINENVMRAYYEATEGGTNLTAYRNRMLPLFQSLEPAVNVSAQRLSDQVRVIQRGNMLADTVLDRLRSEMQSRRVVPVASSQPAAQPVASATVTSRLAADSDVDRDNAPINVSNQYNELLRSTLEDVVRVYRSMPNHLRPRIPRLPMHKGNRALVGTLDSLLSIYFDSSDNLADTHSILYCAAITVCRVARVKVFNTDTATRPKPAVPAWQCRIERRISEARALIGKLSCFREGNTRPRVMRFVKRAFAGTDVSPREYISHVTERIDFLKQKIYAWANRIRRYKVRVDRYSQNSMFQRDQRWVYRSWERPSEPVSELQRPDDNATTTFWRDIWSVPVTHYEGDWIGDVERMCEPIKEMEAISIGPLDVANAVRSLPNWKAPGPDGLHNFWLKWLRSSHVRLASQFQSALQSGSLPEFITTGVTHLLHKTGSTTDPKNYRPITCLPTIYKTLTSILRAKIARHVEDNSIMSASQNGCRSGSRGTKELLLIDMTICQQARRNRKDLSTCWIDYKKAYDSVPHTWLVRVLELYKIDTTLRTFLESCMRQWKTVLLCPGSRQILGNGEPIRIERGIFQGDSLSPLWFCLALNPLSTLLEESGFGFRLRRGGQVISHLLYMDDLKLFAPTALQLTGLLKVTETFSNSIRMEFGVDKCAVMHAKQGRLVESEGIQLSDSIQLRTLAATETYKYLGMSQGLGISETDMKQLLRDRFLGRLKKVLKSLLSGGNKVRAYNGWVMPVLMYSFGILKWTQTELDTLDRTVRTTLTSYRMHHPRSSVMRLYIPRKCGGRGFLNVKTLHNREICSLREYFLRADGEMHVDVVAVDNGLTPLSLAKENWRKPVVLTTDDRRLVWQGKELHGRYYRALHGPDVDLAASVAWLRFGDLFGETEGFVCAIMDEVVMTNNYRKYILRDGTIDICRACHRPGESLRHIISGCSRLANGQYLHRHNQVARIIHQQLALKYRLVTSEVPYYRYEPQPVLEDGHISLYWDRSIITDRTIVANKPDIVLIDRQERRAIIVDITVPHDENLVKAEKDKESKYLDLAHEVVDMWDIDAAIIVPIVVSAHGLLAKSLDKHLKRLALGGWIKGQIQKAVLLETARIVRKFLSLEP

SEQ ID NO: 12161 - protein, 1212 aa, Ptilodon capucinus
MTDAPRRNPRRQCRQRSAVRHYAQSTPPDQSPRSASPSPASIIRTSVTAVASSESDEYFSPPTSPPPVRRQRGRPPGHLGLLGQPAPNRVLVPSGVVRRMRWTSSMNENVMRAYYEATEGGTNLTAYRDRMLPLFQSLEPAVNVSAQRLSDQVRVIQRGNMLADTVLDRLRSEVQSRRVVPVASSQPAAQPVARATVTSRLAADSDVDRDNAPIDVSTQYNDLLRSTLEDVVREYRSMPNHLRPRIPRLPMHKGNRALVGALDSLLSIYFDSSDDLVDTHSILYCAAITVCRVARVKVFNTDTTTRPKPAVPAWQCRIERRISEARALIGKLSCFREGNTRPRVMRFVKRAFAGTDVSPREYISRVTERIDFLKQKIYAWANRIRRYKARVDRYSQNSMFQRDQRWVYRSWERPNEPVSELQRPDDNAMTTFWRDIWSVPVTHYEGNWIGDVERMCEPIKEMEAISIGPLDVANAVRSLPNWKAPGPDGLHNFWLKWLRSSHVRLASQFQSALQSGSLPEFITTGVTHLLHKTGSTTDPKNYRPITCLPTIYKTLTSILRAKIARHVEDNSIMSASQNGCRSGSRGTKELLLIDMTICQQARRNRKDLSTCWIDYKKAYDSVPHTWLVRVLELYKIDTTLRTFLESCMRQWKTVLLCPGSRQILGNGEPIRIERGIFQGDSLSPLWFCLALNPLSTLLEESGFGFRLRRGGQVISHLLYMDDLKLFAPTALQLSGLLKVTETFSNSIRMEFGVDKCAVMHAKQGRMVESEGIQLSDSIQLRSLAATETYKYLGMSQGLGISETDMKQLLRDRFLGRLKKVLKSLLSGGNKVRAYNGWVMPVLMYSFGILKWTQTELDALDRTVRTTLTAYRMHHPRSSVMRLYIPRKCGGRGFLNVKTLHNREICSLREYFLRADGEMHVDVVAVDNGLTPLSLAKENWRKPVVLTTDDRRVVWQGKELHGRYYRALHGPDVDLAASVAWLRFGDLFGETEGFVCAIMDEVVMTNNYRRYILRDGTIDICRACHRPGESLRHIISGCSRLANGQYLHRHNQVARIVHQQLALKYRLVTPEVPYYRYEPQPVLEEGHITLYWDRSIITDRTIVANKPDIVLIDRQERRAMIIDITVPHDENLVKAEKDKESKYLDLAHEVVDMWDIDAAIIVPIVVSAHGLLAKSLDKHLKRLALGSWIKGQIQKAVLLETARIVRKFLSLEP

SEQ ID NO: 12162 - protein, 1212 aa, Ptilodon capucinus
MTDAPRRNPRRQCRQRSAVRNYAQSTPPDQSPRSASPSPASIIRTSVTAVASSESDEYFSPPTSPPPVRRQRGRPPGHLGLLGQPAPNRVLVPSGVVRRMRWTSSMNENVMRAYYEATEGGTNLTAYRDRMLPLFQSLEPAVNVSAQRLSDQVRVIQRGNMLADTVLDRLRSEVQSRRVVPVASSQPAAQPVASATVTSRLAADSDVDRDNAPIDVSTQYNDLLRSTLEDVVREYRSMPNHLRPRIPRLPMHNGNRALVGALDSLLSIYFDSSDDLVDTHSILYCAAITVCRVARVKVFNTDTATRPKPAVPAWQCRIERRISEARALIGKLSCFREGNTRPRVMRFVKRAFAGTDVSPREYISRVTERIDFLKQKIYAWANRIRRYKARVDRYSQNSMFQRDQRWVYRSWERPNEPVSELQRPDDNAMTTFWRDIWSVPVTHYEGNWIGDVERMCEPIKEMEAISIGPLDVANAVRSLPNWKAPGPDGLHNFWLKWLRSSHVRLASQFQSALQSGSLPEFITTGVTHLLHKTGSTTDPKNYRPITCLPTIYKTLTSILRVKIARHVEDNSIMSASQNGCRSGSRGTKELLLIDMTICQQARRNRKDLSTCWIDYKKAYDSVPHTWLVRVLELYKIDTTLRTFLESCMRQWKTVLLCPGSRQILGNGEPIRIERGIFQGDSLSPLWFCLALNPLSALLEESGFGFRLRRGGQVISHLLYMDDLKLFAPTALQLSGLLKVTETFSNSIRMEFGVDKCAVMHAKQGRMVESEGIQLSDSIQLRSLAATETYKYLGMSQGLGISETDMKQLLRDRFLGRLKKVLKSLLSGGNKVRAYNGWVMPVLMYSFGILKWTQTELDTLDRTVRTTLTAYRMHHPRSSVMRLYIPRKCGGRGFLNVKTLHNREICSLREYFLRADGEMHVDVVAVDNGLTPLSLAKENWRKPVVLTTDDRRVVWQGKELHGRYYRALHGPDVDLAASVAWLRFGDLFGETEGFVCAIMDEVVMTNNYRRYILRDGTIDICRACHRPGESLRHIISGCSRLANGQYLHRHNQVARIVHQQLALKYRLVTSEVPYYRYEPQPVLEEGHITLYWDRSIITDRTIVANKPDIVLIDRQERRAMIIDITVPHDENLVKAEKDKESKYLDLAHEVVDMWDIDAAIIVPIVVSAHGLLAKSLDKHLKRLALGSWIKGQIQKAVLLETARIVRKFLSLEP

SEQ ID NO: 12163 - protein, 1204 aa, Agrochola circellaris
MLTRSRARRLIDTHPTPSDSSLSSASQLPDPAPDVSPVIPAAAAASSSSDEYFSPPTSPPPARRGRGRPPASLGLRGPPASDRVPAPGGSVRRMRWTQTVNENVMRAYFGATEGGSNLTAYRGRMLSLFQVLEPAVNVSAQRLSDQVRVIQRNHMLDDAVLDRLRLESRNNRVTPASPLVAVQLHNSLSATPRPDHVGEEVDDGVISVSSQCNARLRNALEDAFREYRSTPAGLRPRLPRLPMHKKNKALVCTLDSLLSNYFDGSKDLADTHSILYCAAVAACRVAHVKFPSSDRAPQPKPAVPAWQCRIERRIGEARVLIGKLICFREGNTRPRVMRFVKRAFSGTDTSSRDYLTRVTERIDFLKQKICAWANRIRRYRRRVERYTQNRTFQSDERWVYRAWERLDQGVIDTRLPDDDAMCSFWRSIWSAPVNHTEGDWTGKIERACERIPEMGAINISPQDVACAVRPLPNWKSPGPDGLHNFWIKWLQRSHARLASQFQSALESGSLPQFLTTGITHLLHKSGSTAEPKNYRPITCLPTVYKVFTSILRTKINKHIDTNSIMSASQNGCKNGSRGTKELLLIDMAINQQVRRSRRDLSTCWIDYKKAYDSVPHTWLMRVLELYKVDATLRTFLISCMGQWRTVLRYPGCRQIQRNSEPIRIERGIFQGDSLSPLWFCLALNPLSTLLEDSGLGYRLRRGGQVISHLLYMDDLKLFAPNNLQLVELLKVTETFSSAIRMEFGVDKCAVMHIKRGGIVESGGTQLPDSIHLRSLSSIETYKYLGMSEALGINTADMKQSLKERFFDRLNKVLNSLLSGGNKVRAFNGWVMPVLMYSFGIHKWTQTELDALDRRVRTLLTVNRMHHPRSSVMRLYIPRKCGGRGFLNAKTLHNREVCSLREYFLEADVGMHRDVVSVDKGLTPLSLANENWRKPIVLDTNDRREVWQSKELHGRFYRALHGPDVDLLASVSWLRFGDLFGETEGFVFAIMDEVMMTNNYRKYIVKDGTVDICRACHRPGESIRHIISGCSRLANGDYLHRHNLVARIIHQQLALKYNLVESEVPYYKYVPDPVLENGNITLYWDRSIITDRTIVANKPDIVVIDRLERRTMIIDIAVPHDENLVKAEKDKQIKYLDLAREVVDMWDVDTAVIVPIVVTANGVIAKSLDQHLRRLSLGSWIKGLIQKAVLLDTARIVRRFLSQEP

SEQ ID NO: 12164 - protein, 1199 aa, Agrochola circellaris
MLTRSRARRLIDTHPTPSDSSLSSASQLPDPAPDVSPVIPAAAAASSSSDEYFSPPTSPPPARRGRGRPPASLGLRGPPASDRVPAPGGSVRRMRWTQTVNENVMRAYFGATEGGSNLTAYRGRMLSLFQVLEPAVNVSAQRLSDQVRVIQRNHILDRLRLESRNNRVTPASPLVAVQLQNSLSATPRPDHVGEEVDDGVISVSSQCNAQLRNALEDAFREYRSTPPGLRPRLPRLPMHKKNKALVCTLDSLLSNYFDGSKDLADTHSILYCAAVAACRVAHVKFPSSDRAPRPKPAVPAWQCRIERRIGEARVLIGKLICFREGNTRPRVMRFVKRAFSGTDTSSRDYLTRVTERIDFLKQKICAWANRIRRYRRRVERYTQNRTFQSDERWVYRAWERLDQGVIDTRLPDDDAMCSFWRSLWSAPVNHTEGDWTGKIERACERIPEMGAINISPQDVACAVRPLPNWKSPGPDGLHNFWIKWLQRSHARLASQFQSALESGSLPQFLTTGITHLLHKSGSTAEPKNYRPITCLPTVYKVFTSILRTKINKHIDTNSIMSVSQNGCKNGSRGTKELLLIDMAINQQVRRSRRDLSTCWIDYKKAYDSVPHAWLMRVLELYKVDATLRTFLISCMGQWRTVLRYPGCRQIQRNSEPIRIERGIFQGDSLSPLWFCLALNPLSTLLEDSGLGYRLRRGGQVISHLLYMDDLKLFAPNNLQLVELLKVTETFSSAIRMEFGVDKCAVMHVKRGGIVESGGTQLPDSIHLRSLSSIETYKYLGMSEALGINTADMKQSLKERFFDRLNKVLNSLLSGGNKVRAFNGWVMPVLMYSFGILKWTQTELDALDRRVRTLLTVNRMHHPRSSVMRLYIPRKCGGRGFLNAKTLHNREVCSLREYFLEADVGMHRDVVSVDKGLTPLSLASENWRKPIVLDTNDRREVWQSKELHGRFYRALHGPDVDLLASVSWLRFGDLFGETEGFVFAIMDEVMMTNNYRKYIVKDGTVDICRACHRPGESIRHIISGCSRLANGDYLHRHNLVARIIHQQLALKYNLVESEVPYYKYVPDPVLENGNITLYWDRSIITDRTIVANKPDIVVIDRLERRTMIIDIAVPHDENLVKAEKDKQIKYLDLAREVVDMWDVDTAVIVPIVVTANGIIAKSLDQHLRRLSLGSWIKGLIQKAVLLDTARIVRRFLSQEP

SEQ ID NO: 12165 - protein, 1203 aa, Hydraecia micacea
MLTRSRARRLPTTHPTSSGSSLSSASQLPEPAPNVSPVSPAAAVASSSSDEYFSPPTTPPPVCRRGRGRPPASLGLRGPPASERVPAPGGSVQRMRWTQTVNENVMRAYFGATEGGSNLTAYRGRMLSLFQVLEPAVNVSAQRLSDQVRVIQRNHMLDNVVLDRLRLESRNSHVTPASSLVAVQLQPSVPLRPDCVDVEDDDEAISVSSQCNARLRSALEDAFREYRSIPPGLRPRLPRLPMHKKNKALVCALDSQLSNCFNDSKDLADTHSILYCAAVAACRVAHVKFPNSDRAPRPKPAVPAWQCRIECRIGEARALIGKLICFREGNTRPRVMRFVRRAFSGTDISSRDYLSRVTERIDFLKQKICAWANRIRRYRRRVERYTQNSRFQSDERWVYRAWERPDQGVTDTRLPDDGAMCSFWRNIWSVPVSHTEGDWTGKIERACDLIPEMEALIISPQDVARAVRPLPNWKSPGPDGLHNFWIKWFKRSHVRLASQFQSALESGSLPQFLTTGITHLLYKSGSTADPKNYRPITCLPTVYKVLTSILRAKINKHIDTNSIMSVSQNGCKNGSRGTKELLLIDMTINQQVRRSRKDLSTCWIDYKKAYDSVPHTWLMRVLELYKVDTTLCTFLMSCMGQWRTVLRYPGCRNIQRNSEPIRIERGIFQGDSLSPLWFCLALNPLSTLLEDSGLGYRLRRGGQVISHLLYMDDLKLFAPNNLQLMELLKITETFSSAIRMEFGVDKCAVMHVKRGEIVESVGNQLSDSTNLRALTASDTYKYLGMSEALGINVTDMKQSLKERFFGRLKKVFNSLLSGGNKVRAFNDWVMPVLMYSFGILKWTQTELDALDRKVRTLLTANRMHHPRSSVMRLYIPRKCGGRGFLNAKTLHNREICSLREYFLETDVGMHRDVIVVDNGLTPLSLGKENWRKPVVLDTNDRMKVWQSKELHGRFFRALHGPDVDLLASVAWLRFGDLFGETEGFVCAIMDEVMMTNNYRRFIVKDGTVDICRACHRPGESIRHIISGCSRLANGEYLHRHNLVARIIHQQLALKYSLVESEVPYYRYVPDPVLENGNITLYWDRSIITDRTIVANKPDIVVMDRLERRAMIVDITIPHDENLVKAEKDKQIKYLDLAREVVDMWDVDSAIIVPIVVTANGLIAKSLDQHLRRLSLASWIKGLIQKAVLLDTARIVRRFLSLEP

SEQ ID NO: 12166 - protein, 1201 aa, Hydraecia micacea
MLTRSAAARRARLPPPDSSLSSASPPAPLVSSPTVSAVTAPAAAVASSSSDEYFSPPTTPPPARRRGGRRPPDSLGPRGPLASDRVPAPGGSVQRMRWTRSINENVMRSYYGATEGGSNLTAYRVRMLSLFQVLEPAVNVSAQRLSDQVRVIQRNHMLDDTVLDRLRNEIQSSHAIAPQSQTAVILPQSNTSHADEGSNDRATNVSTQCNEELSSALEDAIQEYRFMSPELRPRLPRLPMHNKNRALVAVLNSQLSKYFDDCEDLTDTHSILYCAAVAACRVAHVKFTNDSRATRPKPAVPAWQCRIERRIGGARALIGKLICFREGNTRPRVMRFVRRAFLGTDISPQDYTSCVTERIDFLKQKVYTWANRIRRYKRRVERYTQNRTFQSDERWVYRDWERPDQSVADTCLPDDDAMCSFWRSIWSVPVSHTEGDWARDVERACDPIPEMEAITICPQDVARAVRPLPNWKSPGPDGLHNFWIKWFSRSHARLASQFQTALESGSLPQFLTTGITHLLHKSGSTAEPKNYRPITCLPTVYKVLTSILRAKINKHIDTNFIMSASQNGCRNGSRGTKELLLIDMTISQQVRRFRKDLSTCWIDYKKAYDSVPHTWLMRVLELYKVDTTLRTFLMSCMGQWRTVLRYPGCRNIQRNSEPIRIERGIFQGDSLSPLWFCLALNPLSTLLEDSGLGYRLRRGGQVISHLLYMDDLKLFAPNNLQLMELLKVTQTFSNAIRMEFGVDKCAVMHVKRGEIVESVGNQLSDSTNLRALSASETYKYLGMSEALGINVTDMKQSLKERFFGRLKKVLNSLLSGGNKVRAFNGWVMPVLMYSFGILKWTQTELDALDRRVRTLLTANRMHHPRSSVMRLYIPRKCGGRGFLNSKTLHNREICSLREYFLETDVGMHRDVVMVDKGLTPLSLAKENWRKPVVLDTNDRMEVWQSKELHGRFFRALHGPDVDLLASVAWLRFGDLFGETEGFVCAIMDEVMMTNNYRRFIVKDGTVDICRACHRPGESIRHIISGCSRLANGEYLHRHNLVARIIHQQLALKYSLVESEVPYYRYVPDPVLENGNITLYWDRSIITDRTIVANKPDIVVVDRSERRAMIVDITVPHDENLVKAEKDKQIKYLDLAREVVDMWDVDSAIIVPIVVTANGLIAKSLDQHLRRLSLASWIKGLIQKAVLLDTARIVRRFLSLEP

SEQ ID NO: 12167 - protein, 975 aa, Hydraecia micacea
MSPELRPRLPRLPMHNKNRALVAVLNSQLSKYFDDCEDLTDTHSILYCAAVAACRVAHVKFTNDSRATRPKPAVPAWQCRIERRIGGARALIGKLICFREGNTRPRVMRFVRRAFLGTDISPQDYMSCVTERIDFLKQKVYAWANRIRRYKRRVERYTQNRTFQSDERWVYRDWERPDQSVADTCLPDDDAMCSFWRSIWSVPVSHTEGDWARDVERACDPIPEMEAITICPQDVARAVRPLPNWKSPGPDGLHNFWIKWFSRSHARLASQFQTALESGSLPQFLTTGITHLLHKSGSTAEPKNYRPITCLPTVYKVLTSILRAKINKHIDTNFIMSASQNGCRNGSRGTKELLLIDMTISQQVRRFRKDLSTCWIDYKKAYDSVPHTWLMRVLDLYKVDTTLRTFLMSCMGQWRTVLRYPGCRNIQRNSEPIRIERGIFQGDSLSPLWFCLALNPLSTLLEDSGLGYRLRRGGQVISHLLYMDDLKLFAPNNLQLMELLKVTQTFSNAIRMEFGVDKCAVMHVKRGEIVESVGNQLSDSTNLRALSASETYRYLGMSEALGINVTDMKQSLKERFFGRLKKVLNSLLSGGNKVRAFNGWVMPVLMYSFGILKWTQTELDALDRRVRTLLTANRMHHPRSSVMRLYIPRKCGGRGFLNSKTLHNREICSLREYFLETDVGMHRDVVMVDKGLTPLSLAKENWRKPVVLDTNDRMEVWQSKELHGRFFRALHGPDVDLLASVAWLRFGDLFGETEGFVCAIMDEVMMTNNYRRFIVKDGTVDICRACHRPGESIRHIISGCSRLANGEYLHRHNLVARIIHQQLALKYSLVESEVPYYRYVPDPVLENGNITLYWDRSIITDRTIIANKPDIVVVDRSERRAMIVDITVPHDENLVKAEKDKQIKYLDLAREVVDMWDVDSAIIVPIVVTANGLIAKSLDQHLRRLSLGSWIKGLIQKAVLLDTARIVRRFLSLEP

SEQ ID NO: 12168 - protein, 1121 aa, Eupsilia transversa
MLSLFQVLEPAVNVSAQRLSDQVRVIQRNHMLDDSVLDRLRIEMQSSHVIAPPSRTVVAPLQSNSDRADVGSDDRATNVSTQCNEELRSALEDAIREYRFMSPELRPRLPRLPMHNKNRALVAVLDSQLSNYFDDCENLTDTHSILYCAAVAACRVAHVKFTNDSGATRPKSVVPAWQCRIERRIGEARTLIGKLFCFREGNTRPRVMRFVRRAFSGPDISPQDYMARVTERIDFLKQKVYAWANRIRRYKRRVDRYTQNRTFQSDERWVYRAWEQPDQGVTDTHLPDDNAMCSFWRSIWSVPVSHTEGDWTREVERACDPIPEMGAITICPQDVARAVRPLPNWKSPGPDGLHNFWIKWFQRSHARLAAQYQAALESGSLPQFLTTGVTHLLHKSGSTAEPKNYRPITCLPTVYKVLTSILRAKINKHIDTNSIMSVAQNGCKNGSRGTKELLLIDMAISQQVRRSRKDLSICWIDYKKAYDSVPHTWLMRVLELYKVDATLRTFLMACMGQWRTVLRYPGCRNIQRNSEPIRIERGIFQGDSLSPLWFCLALNPLSTLLEDSGLGYRLRRGGQVISHLLYMDDLKLFAPNNLQLMELLKVTETFSSAIRMEFGVDKCAVMHVKRGKIVESVGAQLSDSINLRALSATETYKYLGMSEALGINVTDMKQSLKERFFGRLKKVFNSLLSGGNKVRAFNGWVMPVLMYSFGILKWTQTELDALDRRVRTLLTAYRMHHPRSSVMRLYIPRRCGGRGFLNAKTLHNREICSLREYFLETDVGMHRDVVAVDKGLTPLSLAKENWRKPVVLDTNDRSEVWQSKELHGRFFRALHGPDVDLLASVAWLRFGDLFGETEGFVCAIMDEVIMTNNYRRFIVKDGTVDICRACHRPGESIRHIISGCSRLANEEYLHRHNLVARIIHQQLALKYSLVESEVPYYRYVPDPVLENGNITLYWDRSIITDRTIVANKPDIVVVDRIERRTMIIDITVPHDGNLVKAEKDKQIKYLDLAREVVDMWDVDSAIVVPIVVTANGLIAKSLDQHLRRLSLGSWIKGLIQKAVLLDTARIVRRSTYVCLPRRREPSSHGGRQKLQNATCYDPYISTHFASFTFNTHVARPSTTHT

SEQ ID NO: 12169 - protein, 1210 aa, Amphipyra tragopoginis
MLTRSRAKARAQTTQPPPPASSLSSASQPPESSPNVSAVSAVTPAAAVASSSSDEYFSPPTSPPPARRRGGRRPPDRLGPRGPLASDRVPAPGGSMSRMRWTQTINENAMRAYFGATEGGTNLTAYRSRMLSLFQVLEPTVNVSAQRLSDQVRAIQRGHMLDDTVLDRLRSEIQCSPVISSSSQAPGLISRNVPVASPRLQHVDEEDDDRATAVSIQCHEQLRRALEDAMREYRSTRPELRPRLPRLPMHRRNRALMCALDSLLSNYFDSSEDLGDTHSILYCAAVAECRVAHVKFINNERATRPKNAVPAWQCRIERRIAEARALIGKLICFGEGNTRPRVMRFVRRAFSGTDVSPREYMSRVTERIDFLKQKVYAWANRIRRYGRRVDRYNQSRMFRSNEKWVYRNWERPDQSVGAKHLPDDDAMNSFWRSIWSVPVTHTEGDWMRDVERMCEPILDMGAIIISPQDVAGAVRPLPNWKSPGPDGLHNFWLKWLRSSHARLASQFQSSLETGTLPQFLTTGVTHLLHKSGSTAEPKNYRPITCLPTVYKVLTSILRTKITNHIDNNSIMSASQNGCRNGSRGTKELLLIDMAISQQVRRSRKDLSTCWIDYKKAYDSVPHTWLMRVLELYKVNTTLCAFLTSCMRQWRTVLRYPGCRQIQGIGEPIRIERGIFQGDSLSPLWFCLALNPLSTLLEGSGLGYRLRRGGQVISHLLYMDDLKLFAPNKLQLLELLKVTETFSNSIRMEFGVDKCAVMHVKRGRIMESVGTQLTDSIHLRSLSSTETYKYLGMSEALGINETDMKQSLRERFYGRLKKVLNSLLSGGNKVRAFNGWVMPVLMYSFGMLRWTQTELDALDRRVHTLLTAYRMHHPRSSVMRLYIPRKCGGRGFLNAKTLHNREVCSLREYFSQADVGMQRDVVAVDKGLTPLSLAKENWRKPVVLDTNGCREVWRSKELHGRFYRALHGPDVDFLASVAWLRFGDLFGETEGFVCAIMDEVMMTYNYRKYIVKDGTVDICRACHCPGESIRHIVSGYSRLANGEYLHRHNLVARTIHQQLALKCNLVDAEVPYYKYVPDPVLENGHVTLYWDRSIITDRTIVANKPDIVVIDRSERLTMIIDITVPHDENLVKAEKDKEIKYQDLAHEVVDMWDVDSAVIVPIVVTANGLIAKSLNQHLKRLSLGGWIKGLIQKAVLLDTARIVRKFLSLRP

SEQ ID NO: 12170 - protein, 960 aa, Amphipyra tragopoginis
MHNKNRALVCALDSLLSSYFESSEDLGDTHSILYCAAVAACRVANVKFNNSERATRPKPAVPAWQCRIERRIDGARALIGKLICFREGNTRPRVMRFVRRAFSGTGISPREYMSRVTERIDFLKQKVCAWASRIRRYKRRVERYAQNRMFQCDQRWVYRAWERPDQGVSGGRLPDDEAMSSFWRSIWSVPVTHTEGDWTRDIERACEPIEEMGEILISPQDVASAARPLPNWKSPGPDGLHNFWIKWLRSSHARLASQFQSSLESLPQFLTTGVTHLLHKSGSTAEPKNYRPITCLPTVYKLLTSILRSKINTHIENNSVMSSSQNGCRNGSRGTKELLLIDMAISQQVRRSRKNLSTCWIDYKKAYDSVPHTWLTRVLELYKINATLRTFLTSCMGQWRTVLRYPGCRQIRGSGEPIRIERGIFQGDSLSPLWFCLALNPLSTLLEGSGLGYPLRRGGQVVSHLLYMDDLKLFAPTKLQLVELLKVTETFSNSIRMEFGVDKCAVMHVRRGGIMESEGLQLSDSIHLRSLSANDTYKYLGMSEGLGISEADMKQSLKERFFGRLKKVLKSLLSGGNKVRAFNGWVMPVLMYSFGILKWTQTELDALDRRVRTLLTANRMHHPRSSVMRLYIPRKCGGRGLLNAKTLHNREVCSLREYFLHADAGVHRDVVAVDKGLTPLSLAKENWRKPVVLSTNDRREVWQSKELHGRFYRALHGPDVDFLASVSWLRFGDLFGETEGFICAIMDEVIMTNNYRKYIVKDGTVDICRACHCPGESLRHIISGCSRLANGEYLHRHNQVARIIHQQLALKYNLVESEVPYYKYVPDPALEKGHITLYWDRSIITDRTIVANKPDIVVIDRSERRTMIVDVTIPHDENLVKAEKDKQIKYLDLAHEVVSMWDVESATIVPIVVTANGLIAKSLDQHLKRLSLGGWIKGLIQKAVLLDTARIVRRFLSLEP

SEQ ID NO: 12171 - protein, 1205 aa, Amphipyra tragopoginis
MLTRSRAKTQQSTHLPPAASSLSSASQPPEPASIVSDVTPAAAVASSSSDEYFSPATTPPPARRRGRGRPPACLGPRGPPASDRVPASGGSVQRMRWTQSMNENCMRAYFGATEGGTKLTAYRGRMLSLFQALEPAVNVSAQRLSDQVRVIQRDHRLDDAALDRLRNEMQNSHVTLLPAQIRTQPLVPPAVPLEPNHGDEEEEDRATSAGTQCSELMRSALEDALREFRSTPPELRPRLPRLPMHNKNRALVCALDLLLSNVFESSEDLGDTHSILYCAAVAACRVAHVKFPNDNRATRPKSAVPAWQCRIERRIDEARVLIGKLTCFREGNRRPRVMRFVRRAFSGTDIGPGEYVSRITERIDFLKQKVYAWANRIRRYRRRVDRYTQNRIFQSDQRWVYRTWERPDQGVSDAHLPDNDVMNAFWRNIWSVPVTHTEGDWMQEVQRACEPIQEMGAVTIGPQDVASAVRPMPNWKSPGPDGLHNFWIKWLRSSHARLASQFQSSLESGSLPSFLTTGVTHLLFKSGSTAEPKNYRPITCLPTVYKLLTSILRAKLNHHIDSNAIMCATQNGCKNGSRGTKELLLIDMAISQQVRRSRKDLSTCWIDYKKAYDSVPHTWLMRVLELYKINATLRTFLMSCMGQWRTVLHYPGCRQIQGNGELIRIERGIFQGDSLSPLWFCLALNPLSTLLEGSGLGYRLRRGGQVISHLLYMDDLKLFAPNNLQLLELLKVTETFSNSIRMEFGVDKCAVMHVKRGRIMESVGTQLSDFIHLRSLSSTETYKYLGMSEALGINEADMKQSLRERFFGRLIKVLKSLLSGGNKVRAFNGWVMPVLMYSFGILRWTQTELDALDRRVRTLLTAYRMHHPRSSVMRLYIPRKCGGRGFLNAKTLHNREVCSLREYFSQADVGMHRDVVAVDKGLTPLSLAKENWRKPVVLDTNGRRDVWRSKELHGRFYRALHGPDVDFLASVAWLRFGDLFGETEGFVCAIMDEVMMTNNYRKYIVKDGTVDICRACHCPGESIRHIVSGCSRLANGEYLHRNNLVARIIHQQLALKYNLVDTEVPYYRYVPDPVLENGHVTLYWDRSIITDRTIVANKPDIVVIDRLERRTMIVDITVPHDENLVKAENDKKIKYLDLAHEVVDMWDVDSAVVVPIVVTANGLIAKSLDQHLMRLSLGSWIKGLIQKAVLLDTTRIVRKFLSLEP

SEQ ID NO: 12172 - protein, 1207 aa, Amphipyra tragopoginis
MLTRSRAKTLQRTHPTPSASSLSSASQPPEPASIVSDVTPAAAVASSSSDEYFSPATSPSPPPARRRGRGRPPTCLGPRGPPASDRVPAPGGSVQRMRWTQSMNENCMRAYFGATEGGTNLTAYRGWMLSLFQTLEPAVNVSAQRLSDQVRVIQRDHRLDDAALGRLRDEMQNSHATPPPSQIRTQPLVPPAVPLQPNYADEEEQDRAISAGTQYSEIMRSALEDALREFRSTPPELRPGLPRLPMHNKNIALVCALDSLLSNVLESSTDIGDTHSILYCAAVAACRVAHVKFPNDNRATRPKSTVPAWQCRIERRIDEARVLIGKLTCFREGNIRPRVMRFVRRAFSGTDVSPGEYVSRVTERIDFLKQKVYAWANRIRRYRRRVDRYTQNRIFQSDQRWVYRTWERPDQGVSDTHLPDNDVMNAFWRNIWSVPVTHTEGDWMQEVQRACEPIQEMGAVTIGPQDVTSAARPMPNWKSPGPDGLHNFWIKWLRSSHARLASQFQSSLESGSLPSFLTTGVTHLLFKSGSTAEPKNYRPITCLPTVYKLLTSILRAKINNHIDNNAIMSDSQNGCRNGSRGTKELLLIDMAISQQVRRSRKDLSTCWIDYKKAYDSVPHTWLMRVLELYKINATLRTFLMSCMGQWRTVLHYPGCRQIQGNGELIRIERGIFQGDSLSPLWFCLALNPLSTLLEGSGLGYRLRRGGQVISHLLYMDDLKLFALNNLQLVELLKVTETFSNSIRMEFGVDKCAVMHVKRGRIMESVGTQLSDAIHLRSLSSTETYKYLGMSEALGINEADMKQSLKERFFGRLIKVLKSLLSGGNKVRAFNGWVMPVLMYSFGILRWTQTELDALDRRVRTLLTAYRMHHPRSSVMRLYIPRKCGGRGFLNAKTLHNREVCSLREYFSQADVGMHRDVVEVDKGLTPLSLAKENWRKPVVLDTNGRREVWRSKELHGRFYRALHGPDVDFLASVAWLRFGDLFGETEGFVCAIMDEVMMTNNYRKYIVKDGTVDICRACHCPGESIRHIVSGCSRLANGEYLHRHNLVARIIHQQLALKYNLVDTEVPYYKYVPDPVLENGHVTLYWDRSIITDRTIVANKPDIVVIDRLERRTVIVDIAVPHDENLLKAENDKKIKYLDLAHEVVDMWDVDSAVIVPIVVTANGLIAKSLDQHLMRLSLGSWIKGLIQKAVLLDTARIVRKFLSLEP

SEQ ID NO: 12173 - protein, 1207 aa, Amphipyra tragopoginis
MLTRSRAKTLQRTHPTPSASSLSSASQPPEPASIVSDVTPAAAVASSSSDEYFSPATSPSPPPARRRGRGRPPTCLGPRGPPASDRVPAPGGSVQRMRWTQSMNENCMRAYFGATEGGTNLTAYRGRMLSLFRTLEPAVNVSAQRLSDQVRVIQRDHRLDDAALGRLRDEMQNSHATPPPSQIRTQPLVPPAVPLQPNHADEEEQDRAISAGTQYSEIMRSALEDALREFRSTPPELRPRLPRLPMHNKNRALVCALDSLLSNVLESSKDLGDTHSILYCAAVAACRVAHVKFPNDNRATRPKSTGPAWQCRIERRIDEARVLIGKLTCFREGNIRPRVMRFVRRAFSGTDVSPGEYVSHVTERIDFLKQKVYAWANRIRRYRRRVDRYTQNRIFQSDQRWVYRTWERPDQGVSDTHLPDNDVMNAFWRNIWSVPVTHTEGDWMQEVQRACEPIQEMGAVTIGPQDVTSAVRPMPNWKSPGPDGLHNFWIKWLRSSHARLASQFQSSLESGSLPSFLTTGVTHLLFKSGSTAEPKNYRPITCLPTVYKLLTSILRAKINNHIDNNAIMSDSQNGCRNGSRGTKELLLIDMAISQQVRRSRKDLSTCWIDYKKAYDSVPHTWLMRVLELYKINATLRTFLMSCMGQWRTVLHYPGCRQIQGNGELIRIERGIFQGDSLSPLWFCLALNPLSTLLEGSGLGYRLRRGGQVISHLLYMDDLKLFAPNNLQLVDLLKVTETFSNSIRMEFGVDKCAVMHVKRGRIMESVGTQLSDAIHLRSLSSTETYKYLGMSEALGINEADMKQSLKERFFGRLIKVLKSLLSGGNKVRAFNGWVMPVLMYSFGILRWTQTELDALDRRVRTLLTAYRMHHPRSSVMRLYIPRKCGGRGFLNAKTLHNREVCSLREYFSQADVGMHRDVVAVDKGLTPLSLAKENWRKPVVLDTNGRREVWRSKELHGRFYRALHGPDVDFLASVAWLRFGDLFGETEGFVCAIMDEVMMTNNYRKYIVKDGTVDICRACHCPGESIRHIVSGCSRLANGEYLHRHNLVARIIHQQLALKYNLVDTEVPYYKYVPDPVLENGHVTLYWDRSIITDRTIVANKPDIVVIDRLERRTVIVDIAVPHDENLVKAENDKKIKYLDLAHEVVDMWDVDSAVIVPIVVTANGLIAKSLDQHLMRLSLGSWIKGLIQKAVLLDTARIVRKFLSLEP

SEQ ID NO: 12174 - protein, 1206 aa, Amphipyra tragopoginis
MLTRSRAKAQNTRPPSSASSLSSASQPPEPASIVSDVTPAAAVASSSSDEYFSPATSPSPPPARRRGRGRPPTCLGPRGPPASDRVPAPGGSVQRMRWTQSMNENCMRAYFGATEGGTNLTAYRGRMLSLFQALEPAVNVSAQRLSDQVRVIQRDHRLDDAALDRLRSEMQNSHAAPLPSQIRTQTLVPPAVPLESNYADEEGEDRAISAGTQYSEIMRSALEDALREFRSTPPELRPRLPRLPMHNKNRALVCALDSLLPNVFESSEDLGDTQSILYCAAVAACRVAHVKFPNDNRATRPKSAVPAWQCRIERRIDEARVLIGKLTCFREGNRRPRVMRFVRRAFSGTDIGPGEYATRVTERIDFLKQKVYAWANRIRRYRRRVDRYTQNRIFQSDQRWVYRTWERPDQGVSDTRLPDNDVMNAFWRNIWSVPVTHTEGDWMQEVQRACEPIQEMGAVTIGPQDVTSAVRPMPNWKSPGPDGLHNFWIKWLRSSHARLASQFQSSLESGSLPAFLTTGITHLLFKSGSTAEPKNYRPITCLPTVYKLLASILRAKLNHHIDSNAIMCATQNGCKNGSRGTKELLLIDMAISQQVRRSRKDLSTCWIDYKKAYDSVPHTWLMRVMELYKVNATLRTFLMSCMGQWRTVLHYPGCRQIQGNGELIRIERGIFQGDSLSPLWFCLALNPLSTLLEGSGLGYRLRRGGQVISHLLYMDDLKLFAPNNLQLVELLKVTETFSNSIRMEFGVDKCAVMHVKRGRIMESVGTQLSDSIHLRSLSSTETYKYLGMSEALGINEADMKQSLRERFFGRLIKVLKSLLSGGNKVRAFNGWVMPVLMYSFGILRWTQTELDALDRRVRTLLTAYRMHHPRSSVMRLYIPRKCGGRGFLNAKTLHNREVCSLREYFSQADVGMHRDVVAVDKGLTPLSLAKENWRKPVVLDAKGRMEVWRSKELHGRFYRALHGPDVDFLASVAWLRFGDLFGETEGFVCAIMDEVMMTSNYRKYIVKDGTVDICRACHCPGESIRHIVSGCSRLANGEYLHRHNLVARIIHQQLALKYNLVDTEVPYYKYVPDPVLENGHVTLYWDRSIITDRTIVANKPDIVVIDRLERRTMIVDITVPHDENLVKAENDKKIKYLDLAHEVVDMWDVDSAVIVPIVVTANGLIAKSLDQHLMRLSLGSWIKGLIQKAVLLDTARIVRKFLSLEP

SEQ ID NO: 12175 - protein, 1205 aa, Amphipyra tragopoginis
MMTRSRAKAQSTQPPPSASSLSSASQPPEPASTVSDVTPAAAVASSSSDEYFSPATSPPPARRRGRGRPPASLGPRGPPASDRVPAPGGSVQRMRWTQSMNENCMRAYFGATEGGTNLTAYRGRMLSLFQALEPAVNVSAQRLSDQVRVIQRDRRLDDAALDRLRSEVQSSRIGALQSQTAVQSQVPLEVVPRSIPADEEGDDRVTNVSTQCNEQLRSALELAIREYRSTPPDLRPRLPRLPMNKKNKALMCALDSLLSSYFDGSEDLTDTHSILYCAAVAACRVAHVKVDNNDRATRPKLAVPAWQCRIERRIGEARALIGKLICFREGNTRPRVMRFVRRAFSGTDTNPRDYMSRVTERIDFLKQKVYAWANRIRRYRRRVERYTQNRMFQRDQRWVYRAWERSDQGVGDAHLPDDDAMNSFWRSIWSVPVSHTEGGWIRDVERVCEPILDMGAISISSQDVASAVRPLPNWKSPGPDGLHNFWLKWLRSSHARLASQFQSSLETGTLPQFLTTGVTHLLHKSGSTAEPKNYRPITCLPTVYKLLASILRGRISSHIENNSIMSASQNGCRNGSRGTKELLLIDMAISQQVRPSRKDLSTCWIDYKKAYDSVPHTWLMRVLELYKINATLRTFLMSCMGQWRTVLHYPGCRQIQGNGELIRIERGIFQGDSLSPLWFCLALNPLSTLLEGSGLGYRLRRGGQVISHLLYMDDLKLFAPNNLQLLELLKVTETFSNSIRMEFGVDKCAVMHVKRGRIMESVGTQLSDSIQLRSLSSTETYKYLGMSEALGINEADMKQSLRERFFGRLIKVLKSLLSGGNKVRAFNGWVMPVLMYSFGMLRWTQTELDALDRRVRTLLTAYRMHHPRSSVMRLYILRKCGGRGFLNAKTLHNREVCSLRDYFSQASVGMHRDVVAVDKRLTPLSLAKENWLKPVVLDTNGRREVWRSKELHGRFYRALHGPDVDFLASMAWLRFGDLFGETEGFVCAIMDEVMMTNNYRKYIVKDGTVDICRACHCPGESIRHIVSGCSRLANGEYLHRHNLVARIIHQQLALKYDLVDSEVPYYRYVPDPVLENGHVTLYWDRSVITDRTIVANKPDIVVVIDRSERRAMIVDVAVPHDENLVKAENDKKIKYLDLAHEVVDMWDIDSAVIVPIVVTANGLIAKSLDQHLMRLSLGSWIKGLIQKAVLLDTARIVRKFLSLEP

SEQ ID NO: 12176 - protein, 1205 aa, Amphipyra tragopoginis
MLTRSRAKTQQSTHLPPSASSLSSASQPPEPASIVSDVTPAAAVASSSSDEYFSPATTPPPARRRGRGRPPACLGPRGPPASDRVPAPGGSVQRMRWTQSMNENCMRAYFGATEGGTNLTAYRGRMLSLFRALEPAVNVSAQRLSDQVRVIQRDHRLDDAALDRLRNEMQNSHVIPLPAQIRTQPLVPPAVPLEPNHGDEEEEDRAISAGTQYSELMRSALEEALREFRSTPPELRPRLPRLPMHNKNRALVCALDLLLSNVFESSEDLGDTHSILYCAAVAACRVAHVKFPNDNRATRPKSAVPAWQCRIERRIDEARVLIGKLTCFREGNRRPRVMRFVRRAFSGTDIGPGEYVSRITERIDFLKQKVYAWANRIRRYRRRVDRYTQNRIFQSDQRWVYRTWERPDQGVSDAHLPDNDVMNAFWRNIWSVPVTHTEGDWMQEVQRACEPIQEMGAVTIGPQDVASAVRPMPNWKSPGPDGLHNFWIKWLRSSHARLASQFQSSLESGSLPSFLTTGVTHLLFKSGSTAEPKNYRPITCLPTVYKLLTSILRAKLNHHIDSNAIMCATQNGCKNGSRGTKELLLIDMAISQQVRRSRKDLSTCWIDYKKAYDSVPHTWLMRVLELYKINATLRTFLMSCMGQWRTVLHYPGCRQIQGNGELIRIERGIFQGDSLSPLWFCLALNPLSTLLEGSGLGYRLRRGGQVISHLLYMDDLKLFAPNNLQLLELLKVTETFSNSIRMEFGVDKCAVMHVKRGRIMESVGTQLSDFIHLRSLSSTETYKYLGMSEALGINEADMKQSLRERFFGRLIKVLKSLLSGGNKVRAFNGWVMPVLMYSFGILRWTQTELDALDRRVRTLLTAYRMHHPRSSVMRLYIPRKCGGRGFLNAKTLHNREVCSLREYFSQADVGMHRDVVAVDKGLTPLSLAKENWRKPVVLDTNGRRDVWRSKELHGRFYRALHGPDVDFLASVAWLRFGDLFGETEGFVCAIMDEVMMTNNYRKYIVKDGTVDICRACHCPGESIRHIVSGCSRLANGEYLHRHNLVARIIHQQLALKYNLVDTEVPYYRYVPDPVLENGHVTLYWDRSIITDRTIVANKPDIVVIDRLERRTMIVDITVPHDENLVKAENDKKNKYLDLAHEVVDMWDVDSAVIVPIVVTANGLIAKSLDQHLMRLSLGSWIKGLIQKAVLLDTARIIRKFLSLEP

SEQ ID NO: 12177 - protein, 1204 aa, Amphipyra tragopoginis
MLTRSRAKALSTHLPPSASSLSSASQPPEPASIVSVVTPAAAVASSSSDEYFSPATTPPPARRRGRGRPPACLGPRGPPASDRVPAPGGSVQRMRWTQSMNENCMRAYFGATEGGTNLTAYRGRMLSLFQALEPAVNVSAQRLSDQVRVIQRGHMLDDTVLDRLRSEVQSSPVISPSSQVLAQQQNLAAAFPRPNPAGEEDDDRATNVSTQYNEELRSALEDAMREYRCTRSDLRPRIPRLPMNRKNRALVCALDSLLSNYFDGSEDLGDTHSILYCAAVAACRVAHVKFIDNERATRPKNAVPAWQCRIERRIAEARALIGKLICFREGNIRPRVMRFVRRAFSGTDVSPREYMSRVTERIDFLKQKVCAWANRIRRYRRRVDRYTQNRLFQSDERWVYRTWERPDQRVSDTHLPDNDVMNAFWRNIWSVPVTHTEGDWMQEVQRACEPIQEMGDIIISPQDVASAVRPMSNWKSPGPDGLHNFWLKWLRSSHARLASQFQSSLESGSLPQFLTTGVTHLLHKSGRTAEPKNYRPITCLPTVYKVLTSILRAKINNHIDNNSIMSASQNGCRNGSRGTKELLLIDMAISQQVRRSRKDLSTCWIDYKKAYDSVPHTWLMRVLELYKVNTTLCAFLTSCMGQWRTVLHYPGCRQIQRMGEPIRIERGIFQGDSLSPLWFCLALNPLSTLLEGSGLGYRLRRGGQVISHLLYMDDLKLFAPNNLQLLELLKVTETFSNSIRMEFGVDKCAVMHVKRGRIMESVGTQLSDSIHLRSLSSTETYKYLGMSEALGVNETGMKQSLKERFFGRLKKVFNSLLSGGNKVRAFNGWVMPVLMYSFGILKWTQTELDALDRRVRSLLTANRMHHPRSSVMRLYIPRKCGGRGFLNAKTLHNREVCSLREYFSQADVGMHRDVVAVDKGFTPLSLAKENWRKPVVLDTNDRREVWRSKELHGRFYRALHGPDVDFLASVAWLRFGDLFGETEGFVCAIMDEVMMTNNYRKYIVKDGTVDICRACHCPGESIRHIVSGCSRLANGEYLHRHNLVARIIHQQLALKYNLVDSEVPYYKYVPDPVLENGHVTLYWDRSIITDRTIVANKPDIVVIDRSERLTMIVDITVPHDENLVKAEKDKEIKYQDLAHEVVAMWDVDSAIIVPIVVTANGLIAKSLDQHLKRLSLGGWIKGLIQKAVLLDTARIVRKFLSLRP

SEQ ID NO: 12178 - protein, 1197 aa, Noctua pronuba
MLTRAAARRARLSPPDPSLSSASPLPESSPIVSAVTPAVAVASSSSDEYFSPPTTPPPVRRRRGRRPPDGLGPRGPPASDRVPALGGSVQRMRWTQSINENVMRSYYGATEGGNNRTAYRVRMLSLFQVLEPAVNVSAQRLSDQVRVIQRNRMLDDTVLDRLRTEMQSSHVITPSAQAVVLPQSNTIPNRANDESNDMVTNVSTQCNEEIRSALEGAIREYRSMQPDLRPRIPRLPMHNKNRALVAVLDSQLSNYFDNCEDLTDAHSILYCAAVAACRVAHVKFSDDRATRPKPAVPAWQYRIERRIGGARALIGKLICFREGNTRPRVMRFVRRAFSGTDISPRDYMSRVTERIDFLKQKVYAWANRIRRYKRRVDRYTQNRTFQRDERWVYRAWERPDQGVADTRLPDDDAMCSFWRSIWSVPVSHTEDEWTREVERACDPVQEMGAITISPQDVVCAVRPLPNWKSPGPDGLHNFWIKWFTRSHARLATLFQSALESGSLPEFLTTGITHLLHKSGSTAEPKNYRPITCLPTVYKVLTSILRTKISKHINDNSIMSPSQNGCRNGSRGTKELLLIDMAISQQVRRFRRDLSTCWIDYKKAYDSVPHTWLMRVLELYKVDTTLRTFLMSCMGQWRTVLRYPGCRQIQRDSEPIRIERGIFQGDSLSPLWFCLALNPLSTLLEDSGLGYRLRRGGQVISHLLYMDDLKLFAPNDLQLMELLKVTETFSSAIRMEFGVDKCAVMHVKRGEIVESVRTQLSDSINLRSLSATETYKYLGMSEALGINVADMKQSLRERFFGRLKKVFNSLLSGGNKVRAFNGWVMPVLMYSFGILKWTQTELDALDRRVRTLLTAYRMHHPRSSVMRLYIPRRCGGRGFLNAKTLHNREICSLREYFLEADVGMHRDVVAVDKGLTPLSLAKENWRKPVVLDTNDRREVWQSKELHGRFFRALHGPDVDLSASVAWLRSGDLFGETEGFVCAIMDEVMMTNNYRRFIVKDGTVDICRACHRPGESIRHIISGCSRLANGEYLHRHNLVARIIHQQLALNYNLVESEVPYYKYVPDPVLENGCVTLYWDRSIITDRTIVANKPDIVVVDRSERRAMIVDITVPHDENLVKAEKDKQIKYLDLAHEVVDLWDVDSAIIVPIVVSAHGLIAKSFDQHLRRLSLGSWIKGLIQKAVLLDTARIVRRFLSLEP

SEQ ID NO: 12179 - protein, 1200 aa, Tinea trinotella
MLTRSRARNQSAQLTSSGSSLSSALQPPRSTPTVSPVISVAAVASSSSDECFSPPTTPPSARRRGGGRPPASLEPRGPSASGGVPATSGRVQRMRWTQSINENVMRSYFGATEGGISLTAYRGRMLTLFQVLEPAVNVSAQRLSDQVRVIQRNRMLDDVVLDRLRLESRSSHVSPVSPPVAVQLQPSALPRPNNIQENDDDVTISVSNQYNEQLRSALEDAFREYRSTPPGLRPRIPRLPMHKKNRALVCALDSQLVNHFKSSKDLADTHSILYCAAVAVCRVAHVQFPNNDRAARLAVPAWQCRIERRIGEARALIGKLISFREGNTRPRVMRFVRRVFSGTDISSRDYQTRVTERIDFLKQKIYAWANRIRRYKRRVERYTQNRTFQSNERWVYRAWERPDQDVSDMCLPDDDAMSLFWRNIWSVPVGHTEGEWTREVERACDLIPEMGAIIISPQDVACAVRPLSNWKSPGLDGLHNFWIKYFQRSHARLAAQFQSALELGSLPQFLTTGITHLLHKSGSTAEPKNYRPITCLPTVYKVLTSILRAKIDKHIDTNCIMSASQNGCRSGSRGTKELLLIDVAISQQVRRSRRDLSTCWIDYKKAYDSVPHTWLMRVLELYKVDAALRTFLVSCMGQWRTVLHYPGCRRILGNGEPIKIERGIFQGDSLSPLWFCLALNPLSTLLDGSGQGYRLRRDGQVISHLLYMDDLKLFAPNNLQLMKLLKVTETFSSAISMEFGVDKCATMHVKRGEIMESVGTQLSDSIHLRSLCSTETYKYLGMSEALGINAVDVKQSLRDRFFGRLNKVLNSLLSGGNKVRAFNGWVMPVLMYSFGILKWTQTELDALDRRVRTLLTANRMHHPRSSVMRLYIPRKCGGRGFLNAKTLHNREVCSLREYFLKTDVGMHRDVVAVDKGLTSLSLANENWRKPVVLDANDRREVWQSKELHGRFYRALHGPDVDFLASVSWLRFGDLFGETEGFVCAIMDEVMMTNNYRKYIVKDGTVDICRACHRPGESIRHIISGCSRLANGDYLHRHNLVARIIHQQLALKYNLVESEVPYYRYVPDPVLENGNITLYWDRSIITDRTIVANKPDIVVIDRLERRTIIVDVAVPHDENLVKAEKDKQIKYLDLAREVVDMWEVDTAIIVPIVVTANGLIAKSLDEHLKRLSLGSWIKRLIQKAVLLDTARIVRRFLSQEP

SEQ ID NO: 12180 - protein, 1200 aa, Tinea trinotella
MLTRSRARNQSAQLTSSGSSLSSASQPPGSTPTVSQVISVAAVASSSSDECFSPPTTPPSARRRGGGRPPASLEPRGPSASGGVPATSGRVQRMRWTQSINENVMRSYFGATEGGSSLTAYRGRMLTLFQVLEPAVNVSAQRLSDQVRVIQRNCMLDDVVLDRLRLESRSSHISPVSPPVAVQLQPSALPRPNNIEENDDDVTISVSNQYNEQLRSALEDAFREYRSTPPGLRPRIPRLPMHKKNRALVCALDSQLVNHFKSSKDLADTHSILYCAAVAVCRVAHVKFPNNDRAARLAVPAWQCRIERRIGEARALIGKLISFREGNTRPRVMRFVRRAFSGTDISSRDYQTRVTERIDFLKQKIYAWANRIRRYKRRVERYTQNRTFQSNERWVYRAWERPDQDVSDMCLPDDDAMSLFWRNIWSVPVGHTEGEWTREVERACDFIPEMGAIIISPQDVACAVRPLSNWKSPGLDGLHNFWIKCFQRSHARLAAQFQSALELGSLPQFLTTGITHLLHKSGSTAEPKNYRPITCLPTVYKVLTSILRAKIDKHIDTNCIMSASQNGCRSGSRGTKELLLIDVAISQQVRRSRRDLSTCWIDYKKAYDSVPHTWLMRVLELYKVDAALRTFLVSCMGQWRTVLHYPGCRRILGNGEPIKIERGIFQGDSLSPLWFCLALNPLSTLLDGSGQGYRLRRDGQVISHLLYMDDLKLFAPNNLQLMKLLKVTETFSSAISMEFGVDKCAIMHVKRGEIMESVGTQLSDSIHLRSLCSTETYKYLGMSEALGINAVDVKQSLRDRFFGRLNKVLNSLLSGGNKVRAFNGWVMPVLMYSFGILKWTQTELDALDRRVRTLLTANRMHYPRSSVMRLYIPRKCGGRGFLNAKTLHNREVCSLREYFLKTDVGMHRDVVAVDKGLTSLSLANENWRKPVVLDANDRREVWQSKELHGRFYRALHGPDVDFLASVSWLRFGDLFGETEGFVCAIMDEVMMTNNYRKYIVKDGTVDICRACHRPGESIRHIISGCSRLANGDYLHRHNLVARIIHQQLALKYNLVESEVPYYRYVPDPVLENGNITLYWDRSIITDRTIVANKPDIVVIDRLERRTIIVDVAVPHDENLVKAEKDKQIKYLDLAREVVDMWEVDTAIIVPIVVTANGLIAKSLDEHLKRLSLGSWIKRLIQKAVLLDTARIVRRFLSQEP

SEQ ID NO: 12181 - protein, 1200 aa, Tinea trinotella
MLTRSRARNQSAQLTSSGSSLSSASQPPGSTPTVSQVISVAAVASSSSDECFSPPTTPPSAHRRGGGRPPASLEPRGPSASGGVPATSGRVQRMRWTQSINENVMRSYFGATEGGSSLTAYRGRMLTLFQVLEPAVNVSAQRLSDQVRVIQRNRMLDDVVLDRLRLESRSSHVSPVSPPVAVQLQPSALPRPNNIEENDDDVTISVSNQYNEQLRSALEDAFREYRSTPPGLRPRIPRLPMHKKNRALVCALDSQLVNHFKSSKDLADTHSILYCAAVAVCRVAHVKFPNNDRAARLAVPAWQCRIERRIGEARALIGKLISFREGNTRPRVMRFVRRAFSGTDISSRDYQTRVTERIDFLKQKIYAWANRIRRYKRRVERYTQNRTFQSNERWVYRAWERPDQDVSDMCLPDDDAMSLFWRNIWSVPVGHTEGEWTREVERACDFIPEMGAIIISPQDVACAVRPLSNWKSPGLDGLHNFWIKCFQRSHARLAAQFQSALELGSLPQFLTTGITHLLHKSGSTAEPKNYRPITCLPTVYKVLTSILRAKIDKHIDTNCIMSASQNGCRSGSRGTKELLLIDVAISQQVRRSRRDLSTCWIDYKKAYDSVPHTWLMRVLELYKVDAALRTFLVSCMGQWRTVLHYPGCRRILGNGEPIKIERGIFQGDSLSPLWFCLALNPLSTLLDGSGQGYRLRRDGQVISHLLYMDDLKLFAPNNLQLMKLLKVTETFSSAISMEFGVDKCAIMHVKRGEIMESVGTQLSDSIHLRSLCSTETYKYLGMSETLGINAVDVKQSLRDRFFGRLNKVLNSLLSGGNKVRAFNGWVMPVLMYSFGILKWTQTELDALDRRVRTLLTANRMHHPRSSVMRLYIPRKCGGRGFLNAKTLHNREVCSLREYFLKTDVGMHRDVVAVDKGLTSLSLANENWRKPVVLDANDRREVWQSKELHGRFYRALHGPDVDFLASVSWLRFGDLFGETEGFVCAIMDEVMMTNNYRKYIVKDGTVDICRACHRPGESIRHIISGCSRLANGDYLHRHNLVARIIHQQLALKYNLVESEVPYYRYVPDPVLENGNITLYWDRSIITDRTIVANKPDIVVIDRLERRTIIVDVAVPHDENLVKAEKDKQIKYLDLAREVVDMWEVDTAIIVPIVVTANGLIAKSLDEHLKRLSLGSWIKRLIQKAVLLDTARIVRRFLSQEP

SEQ ID NO: 12182 - protein, 1198 aa, Spilosoma lubricipeda
MLTRAKLRAQLSPPDSSLCSALPPREATLEVSAVAEASSSSSSDEFFSPPTSPTPVRRQGRGRPPTSLGSRGPLTSNRVPATGGDVRRMKWTRSINENVMRAYFRATELGTNLTAYRVRLVSLFQELEPAVNVSAQRLSDQVRAIQRCHLLDDVVLERIRSDVRNTLTVPSSSHAVDVVGNTQQLPYNEDVDEQVESEIISVSTQYNDRIRSALEDAIQDYRYVNYNNRPRLPRLPIHKRNLALVSALNSLLPDYFGNSEDLSDTHSILYCAAIAVCRVAGIKFNVEQITTRPKNTVPAWQYRIERRIAETRTLIGKLIAFKFGNTRPRVMRFVKQAFLGTTISPQQYMSSVTERIDFLKQKVYAWANRIRRYKKRGDRFNQNRMFQRNEKWVYRKWEAPNPCESDGDLPDENTTNSFWRNIWSVPVTHTDGDWMRDVSRSCESITSMEPVIINEDDISCAVRSLPNWKSPGPDGLHNFWLKWFRSSHACLASQLQAALDSGSLPQFLTTGITHLLYKSGSAMDPKNFRPITCLPTLYKLLTSILRLKITKHINNNSIISVSQNGCRSGTRGTKELLITDMTISQQVRRNRKSLATCWIDYKKAFDSVPHTWLLKVLELYKIDTTLCTFLKSCMRQWRTVLRYPGCRQTAVNDVPIKIERGIFQGDSLSPLWFCLALNPLSILLEGSGLGYRLQKEAPVISHLFYMDDLKLFAPTKLQLTALLRVTENFSNSIKMEFGIDKCAVMHVKKGVIVESEGIELSDSTRLRSLSATETYKYLGFSQSLGIPESDMKQSLRERFFGRLKKVLKSLLSGGNKVRAYNGWVMPVLMYSFGILRWTQTELDALDRRVRTLLTAFRMHHPRSSVMRLYIPRKFGGRGLLNVKTLHNREIYNLREYFLHTDVGVHRSVVAVDTGLTPLALAKENWRKPVVLSTNERREVWKGKELHGRFYRALNGSDIDFKASTSWLRYGDLFGETEGFVCAIMDEVIMTNNYRKYILKDGTVDICRACHRPGESIRHIISGCSRLANGEYLHRHNQVARIVHQQLALKYKLVSSEVPYYRYVPDPVLENGRATLYWDRSVITDRTIVANKPDIVVIDRSERRAMIVDIAVPHDENLVKVEKEKQIKYLDLSHEIVEMWDVDSVIIVPIVVSVHGLIAKSLDQHLKRLTLDGWIKGLMQKAVLLDTARIVRRFLSLEP

SEQ ID NO: 12183 - protein, 1196 aa, Spilosoma lubricipeda
MLTRARARALLPSSDSSLRSALPSSDARTEVPTVAEASSSSSSDEFFSPPTSPIPVRRQGRDRPPTSLGSRGPLTSNRAPATGGDVRRMKWTQSINENVMRAYFRATELGTNLTAYRVRLVSLFQELEPAVNVSAQRLSDQVRAIQRCHLLDDTVLERICSDIRNSLTVPSSPHVVDVVTNSTPQNEDVSELVDSEIISVSTLYNDKIRSTLEDVIREYRCVNFNNRPRLPRLPIHKRNLALVSALDSLLPDYFGNSEDLSDTHSILYCAAIAVCRVAGIKFAENITTTRPENTVPAWQCRIERRIAGARTLIGKLISFRSGNTRPKVMRFVKQAFLGTTISPQQYMSCVTERIDFLKQKVYAWANRIRRYRKRIDRYNQNRMFQRNEKWVYRKWENLSPCMSDGQVPDENATNSFWRSIWSVPVAHTEGDWYRDVERSCESLLPMELINIDKEDVSCAVRSLPNWKAPGPDGLHNFWLKWFRSSHACLASQFQTALDSGSLPQFLTTGITHLLYKSGSAMDPKNFRPITCLPTLYKLLTSILRLKITTHINQNSILSVSQNGCRSGTRGTKELLIIDMTISQQVRRNRKSLATCWIDYKKAFDSVPHTWLLKVLELYKIDTTLCTFLKSCMRQWRTVLRYPGCRQTAVNDVPIKIERGIFQGDSLSPLWFCLALNPLSTLLEGSGLGYRLQKEAPVISHLFYMDDLKLFAPTKLQLTALLRVTENFSNSIKMEFGIDKCAVMHVKKGVIVESEEIELSDSTRLRSLSVTETYKYLGFSQSLGIPESDMKQSLRERFFGRLKKVLKSLLSGGNRVRAYNGWVMPVLMYSFGILRWTQTELDALDRRVRTLLTAFRMHHPRSSVMRLYIPRKFGGRGLLNVKTLHNREIYNLREYFLHTDVGVHRSVVAMDTGLTPLALAKENWRKPVVLGTNERREVWKGKELHGRFYRALNGPDIDFKASTSWLRYGDLFGETEGFVCAIMDEVIMTNNYRKYILKDGTVDICRACHRPGESIRHIISGCSRLANGEYLHRHNQVARIVHQQLALKYKLVNSEVPYYRYVPDPVLENGRATLYWDRSIITDKTIVANKPDIVVIDRSERRAMIVDIAVPHDENLVKVEKEKQIKYLDLSHEIVDMWDVDSVIIVPIVVSVHGLIAKSLDQHLKRLTLDGWIKGLMQKAVLLDTARIVRRFLSLEP

SEQ ID NO: 12184 - protein, 1198 aa, Spilosoma lubricipeda
MLTRARSRALLPSSDSSLRSALPSSDARTEVPTVAEASSSSSSDEFFSPPTSPTPVRRQGRDRPPTSLGPRGPLTSNRAPAAGGDVRRMKWTQSINENVMRAYFRATELGTNLTAYRVRLVSLFRELEPAVNVSAQRLSDQVRAIQRCHLLDDVVLERIRSDVRGTLTVPSSSHSVDLVATTPQLPHNEYVDEQVESEVMTVSTQCNDRIRRALEDAIQEYRHVDYKNRPRLPRLPIHKRNLALVSALNSLLPDYFGNSEDLSDTHSILYCAAIAVCRVAGVKFVEQITTTRPKNEVPAWQCRIERRITETRTLIGKLITFQSGNTRPRVMRFVKQAFLGTTISPQQYMSSVTERIDFLKQKVYAWANRIRRYRKRVDRFIQNRMFQRNEKWVYRKWEEPSPRVGEGRFPDENVTNTFWRNIWSVPVTHTEGDWYRDVERSCESITSMEPITISKDDIGCAVRSLPNWKSPGPDGLHNFWLKWFRSSHACLASQYQAAVDSGSLPQFLTTGITHLLYKSGSAMDPKNFRPITCLPTMYKLLTSILRLKISTHINNNLIMSVSQNGCRSGSRGTKELLIIDMTISQQVRRNRKSLATCWIDYKKAYDSVPHTWLLRVLELYKIDTTLCTFLKSCMGQWRTVLRYPGCRQTAVNDVLINIERGIFQGDSLSPLWFCLALNPLSALLEDSGLGYRLQKDDQVISHLFYMDDLKLLAPTKLQLTALLKVTENFSNSIKMEFGVDKCAVMYVKKGVIVESEGTELSDSTRLRSLSATETYKYLGFSQSLGIPEPDMKQSLRERFFGRLKKVLKSLLSGGNKVRAYNGWVMPVLMYSFGILRWTQTELDALDRRVRTLLTAFRMHHPRSSVMRLYIPRKFGGRGLLNAKTLHNREIYNLREYFLHTDVGVHRSVVTVDTGLTPLALAKENWRKPVVLSTNDRREVWKGKEFHGRFYRALNGPDIDFKASTSWLRYGDLFGESEGFVCAIMDEVIMTNNYRKYILKDGTVDICRACHRPGESIRHIISGCSRLANGEYLHRHNQVARIVHQQLALKYHLVSSEVPYYRYVPDPVLENGRATLYWDRSIITDRTIVANKPDIVVIDRLERRAMIVDIAVPHDENLVKVEKEKQIKYLDLSHEIVDMWNVDSAIIVPIVVSAHGLIAKSLDQHLKRLTLEGWIKGLMQKAVLLDTARIVRRFLSLEP

SEQ ID NO: 12185 - protein, 1198 aa, Ochropleura plecta
MLTRAAQARNARHPPPGSSLSSASPPPEPSLVVSAVTPAVAVASSSSDEYFSPPTTPPPVRRRGRHRPPDGLGPRGPPASDRVPAPGGSVQRMRWTQSINENVMRSYNGATEGGNNLTAYRVRMLSLFQVLEPAVNVSAQRLSDQVRVIQRNRMLDDTVLDRLRTEMQSSQVITSSSQAVVPPQLHQLINRVNEVSNDVATNVSTQCSEEMRSTLEGAIREYRYISPELRPRLPRLPMHNKNRALVAALDSQLSSYFDNCENLTDAHSILYCAAVTVCRVAHVKFPDDRATRPKPAIPFWQCRIERRIGAARALIGKLTCFREGNTRPRVMRFVRRAFAGTDISPPDYISRIAERIDFLKQKVYAWANRIRRYKRRVERYTQNRTFQSDERWVYRAWERPDQGVSDTRLPDDDAMSLFWRSIWSVHVSHTEGEWTREVERACDPIPEMGALTISPQDVACAVRPLPNWKSPGPDGLHNFWIKWIQRSHVRLAALFQSALESGSLPKFLTTGITHLLHKSGSTAEPKNYRPITCLPTLYKVLTSILRAKITKHIDDNSIMSASQNGCRNGSRGTKELLLIDMAISQQVRRSQRHLSTCWIDYKKAYDSVPHTWLMRVLDLYKIDATLRTFLISCMRQWSTVLRYPGCRQIQRNSEPIRIERGIFQGDSLSPLWFCLALNPLSTLLENSGLGYRLKRGGQVISHLLYMDDLKLFAPNDLQLMELLKVTETFSSAIRMEFGVDKCAVMHVKRGEIVESVGTQLSDSINLRSLSATETYKYLGMSEALGINVADMKQLLKERFFGRLRKVFNSLLSGGNKVRALNGWVMPVLMYSFGILKWTQTELDALDRKVRTLLTAFRMHHPRSSVMRLYIPRSCGGRGFLNAKTLHNREICSLREYFLETDVGMHRDVVAVDKGLTPLSLAKENWRKPVVLDTNDRREVWQSKELHGRFFRALHGPDVDQSASVAWLRSGDLFGETEGFVCAIMDEVMMTNNYRRFIVKDGTVDICRACHRPGESIRHIISGCSRLANGEYLHRHNLVARIIHQQLALKYNLVEAEVPYYRYEPDPVLEHGYITLYWDRSIITDRTVVANKPDIVVVDRSERRAMIVDITVPHDENLVKAEKDKQIKYIDLAREVVDMWDVDSAIIVPIVVSANGLIAKSLDQYLRRLSLGSWIKGLIQKAVLLDTARIVRRFLSLEP

SEQ ID NO: 12186 - protein, 1148 aa, Ochropleura plecta
MIIIIIIRRPRRRGGRRPPDGLGLRGPPASDRVPAPGGSVQRMRWTSSINENVMRSYYGATEGGNNLTAYRVRMLSLFQVLEPAVNVSAQRLSDQVRVIQRNRMLDDTVLDRLRTEMQSSQVITSSSQAVVPPQSHQLVSRADEVSNDMATNVSTQCSEEMRSALEGAIREYRYMSPELRPRLPRLPMHNKNRALVAVLDSQLSNYFDNCENLTDAHSILYCAAVAACRVAHVKFPDDGATRPKPAVPFWQCRIERRIGVARALIGKLICFKEGNTRPRVMRFVRRAFAGTDISPPDYMSRITERIDFLKQKVYAWANRIRRYKRRVERYTLNRTFQSDERWVYRAWERPDQGVSDTHLPDDDAMCLFWRSIWSVPVSHTEGEWTREVERACDPIPEMGALTISPQDVACAVRPLPNWKSPGSDGLHNFWIKWIQRSHVRLAALFQSALESGSLPKFLTTGITHLLHKSGSTAEPKNYRPITCLPTLYKVLTSILRAKITKHIDDNSIMSASQNGCRNGSRGTKELLLIDMAISQQVRRSRRHLSTCWIDYKKAYDSVPHTWLMRVLDLYKIDATLRTFLISCMRQWSTVLRYPGCRQIQRNSEPIRIERGIFQGDSLSPLWFCLALNPLSTLLENSGLGYRLKRGGQVISHLLYMDDLKLFAPNDLQLMELLKVTETFSSAIRMEFGVDKCAVMHVKRGEIVESVGTQLSDSINLRSLSATETYKYLGMSEALGINVADMKQLLKERFFGRLRKVFNSLLSGGNKVRAFNGWVMPVLMYSFGILKWTQTELDALDRKVRTLLTAFRMHHPRSSVMRLYIPRSCGGRGFLNAKTLHNREICSLREYFLETDGGMHRDVVAVDKGLTPLSLAKENWRKPVVLDTNDRREVWQSKELHGRFFRALHGPDVDQSASVAWLRSGDLFGETEGFVCAIMDEVMMTNNYRRFIVKDGTVDICRACHRPGESIRHIISGCSRLANGEYLHRHNLVARIIHQQLALKYNLVEAEVPYYRYEPDPVLEHGYITLYWDRSIITDRTVVANKPDIVVVDRSERRAMIVDITVPHDENLVKAEKDKQIKYIDLAREVVDMWDVDSAIIVPIVVSANGLIAKSLDQYLRRLSLGSWIKGLIQKAVLLDTARIVRRFLSLEP

SEQ ID NO: 12187 - protein, 1200 aa, Ochropleura plecta
MKMITRSAARRDARLPPPGPSLSSASPPPEPSLVVSAVTSAVAVASSSSDEYFSPPTTPPPARRRGGRRPPDGLGLRGPPASDRVPAPGGSVQRMRWTSSINENVMRSYYGATEGGNNLTAYRVRMLSLFQVLEPAVNVSAQRLSDQVRVIQRNRMLDDTVLDRLRTEMQSSQVITSSSQAVVPPQSHQLVSRADEVSNDMANNVSTQCSEEMRSALEGAIREYRYMSPELRPRLPRLPMHNKNRALVAVLDSQLSNYFDNCENLTDAHSILYCAAVAACRVAHVKFPDDGATRPKPAVPFWQCRIERRIGVARALIGKLICFKEGNTRPRVMRFVRRAFAGTDISPPDYMSRITERIDFLKQKVYAWANRIRRYKRRVERYTLNRTFQSDERWVYRAWERPDQGVSDTHLPDDDAMCLFWRSIWSVPVSHTEGEWTREVERACDPIPEMGALTISPQDVACAIRPLPNWKSPGPDGLHNFWIKSIQRSHTCLATLFQTALESGSLPKFLTTGITHLLHKSGSTAEPKNYRPITCLPTLYKVLTSILRAKITKHIDDNSIMSASQNGCRNGSRGTKELLLIDMAISQQVRRSRRHLSTCWIDYKKAYDSVPHTWLMRVLEMYKVDATLRTFLISCMRQWSTVLRYPGCRQIQRNSEPIRIERGIFQGDSLSPLWFCLALNPLSTLLENSGLGYRLRRGGQVISHLLYMDDLKLFAPNDLQLMELLKVTETFSSAIRMEFGVDKCAVMHVKRGEIMESVGTQLSDSTNLRSLSATETYKYLGMSEALGINVADMKQSLKERFFGRLRKVFNSLLSGGNKVRAFNGWVMPVLMYSFGILKWTQTELDALDRKVRTLLTAFRMHHPRSSVMRLYIPRSCGGRGFLNAKTLHNREICSLREYFLETDVGMHRDVVAVDKGLTPLSLAKENWHKPVVLDTNDRKEVWQSKELHGRFFRALHGSDVDQSASVAWLRSGDLFGETEGFVCAIMDEVMMTNNYRRFIVKDGTVDICRACHRPGESIRHIISGCSRLANGEYLHRHNLVARIIHQQLALKYNLVESEVPYYRYEPDPVLEHGNITLYWDRSIITDRTIVANKPDIVVVDRSERRAMIVDITVPHDENLVKAEKDKQIKYIDLAREVVDMWDVDSAIIVPIVVSANGLIAKSLDQHLRRLSLGGWIKGLIQKAVLLDTARIVRRFLSLEP

SEQ ID NO: 12188 - protein, 960 aa, Hecatera dysodea
MHNKNRALVCALDSQLENCFNSSKDLADTHSILYCAAAAACRVAHVKFPNSDRATRPAVPAWQCRIERRIGEARALIGKLICFREGNTRLRVMRFVRRAFSGTDISPRDYLTRVTERIDFLKQKVYAWASRIRRYKRRVERYTQNRTFQSNERWVYRAWERPDQVVTDTHLPDDDAMCSFWRSIWSVPVSHTEGDWTREVERTCDPIPEMGAITISPQDVARAVRPLPNWKSPGPDGLHNFWIKWFTRSHVRLASQFQSALESRSLPQFLTTGITHLLHKSGSTAEPKNYRPITCLPTVYKVLTSILRAKINDHIESNSIMSTSQNGCRNGARGTKELLLIDVAISQQVRRSRKDLSTCWIDYKKAYDSVPHTWLMRVLELYKVDAVPRAFLMSCMGQWRTVLHYPGCRQTQANSEPIRIERGIFQGDSLSPLWFCLALNPLSTLLEGSGQGYRLRRGGQVISHLLYMDDLKLFAPNNLQLMKLLKVTETFSSDISMEFGVDKCAVMHVKRGEIMESVGTQLSDSIHLRSLCSTETYKYLGMSEALGINATSVKQSLKERFFGRLNKVLNSLLSGGNKVRAFNGWVMPVLMYSFGILKWTQTELDALDRRVRSLLTANRMHHPRSSVMRLYIPRKCGGRGFLNAKTLHNREVCSLREYFLEADVGMHRDVVAVDKGLTPLSLANENWRKPVVLDTNDRREVWQSKELHGRFYRVLHGPDVDFLASVAWLRFGDLFGETEGFICAITDEVMMTNNYRKYIVKDGTVDICRACHRPGESVRHIISGCSSLANGDYLHRHNLVARIIHQQLALKYNLVESEVPYYRYVPDPVLENGNCTLYWDRSIITDRTIVANKPDLVVIDRLERRAMIVDIAVPHDENLVKAEKDKQSKYLDLAREVVDMWNVNTAVIVPIVVTANGIIAKSLDQHLKRLSLGSWIKDLIQKAVLLDTARIVRRFLSREP

SEQ ID NO: 12189 - protein, 1200 aa, Hecatera dysodea
MLTRSRTRCQNTRLTPSDSSLSSASQPPGPTPAVSPEIPVAAVASSSSDEYFSPPTTPPPARRRGRGRPPTSLGPRGPPASDRVPAIGGSVQRMRWTHSINENVMRSYFGATEGGTNLTAYRGRMLSLFQVLEPAVNVSAQRLSDQVRVIQRNRMLDDAVLDRLRLESRSSRVSPASPPAAVQIQPSISPRPDHVSEDVDDGTISVSTQCNERLRSALEDAFREYRSTPPELRPRLPRLPMHNKNRALVCALDSQLSIYFDSSENLTDTHSILYCGAAAACRVAHVKLPNSDRVARPAVPAWQCRIERRIAEARALIGKLICFREGNTRRRVMRFVRRAFSGTDISPRDYLTRVTERIDFLKQKVYAWANRIRRYKRRVERYTQNRIFQNNERWVYRAWERPDQGVTDTRLPDDEAMLSFWRNIWSVPVSHTEGDWTREVERACDSIPEMGAINISPQDVARAVRPLPNWKSPGPDGLHNFWIKWLTRSHARLASQFQSALESRSLPQFFTTGITHLLHKSGSTAEPKNYRPITCLPTVYKVLTSILRAKINDHIESNSIMSTSQNGCRSGARGTKELLLIDVAISQQVRRSRKDLSTCWIDYKKAYDSVPHTWLMRVLELYKVDAVLRAFLMSCMGQWRTVLHYPGCRQTQVNSEPIRIERGIFQGDSLSPLWFCLALNPLSTLLEGSGQGYRLRRGGQVISHLLYMDDLKLFAPNNLQLMKLLKVTETFSSDISMEFGVDKCAVMHVKRGEIMESVGTQLSDSIHLRSLCSTETYKYLGMSEALGINATSVKQSLKERFFGRLNKVLNSLLSGGNKVRAFNGWVMPVLMYSFGILKWTQTELDALDRRVRSLLTANRMHHPRSSVMRLYIPRKCGGRGFLNAKTLHNREVCSLREYFLEADVGMHRDVVAVDKGFTPLSLANENWRKPVVLDTNDRREVWQSKELHGRFYRVLHGPDVDFLASVAWLRFGDLFGETEGFICAITDEVMMTNNYRKYIVKDGTVDICRACHRPGESIRHIISGCSSLANGDYLHRHNLVARIIHQQLALKYNLVESEVPYYRYAPDPVLENGNCTLYWDRSIITDRTIVANKPDIVVIDRLERRAMIVDIAVPHDENLVKAEKDKQSKYLDLAREVVDMWDVNTAVIVPIVVTANGIIAKSLDQHLKRLSLGSWIKGLIQKAVLLDTARIVRRFLSREP

SEQ ID NO: 12190 - protein, 868 aa, Hecatera dysodea
MRFVRRAFSGTDISPRDYLTRVTERIDFLKQKVYAWASRIRRYKRRVERYTQNRTFQSNERWVYRAWERPDQVVTDTHLPDDDAMCSFWRSIWSVPVSHTEGDWTREVERACDPIPEMGAITISPQDVARAVRPLPNWKSPGPDGLHNFWIKWFTRSHARLASQFQSALESRSLPQFLTTGITHLLHKSGSTAEPKNYRPITCLPTVYKVLTSILRAKINDHIESNSIMSTSQNGCRNGARGTKELLLIDVAISQQVRRSRKDLSTCWIDYKKAYDSVPHTWLMRVLELYKVNTVLRTFLMSCMGQWRTVLHYPGCRQTQANSEPIRIERGIFQGDSLSPLWFCLALNPLSTLLEGSGQGYRLRRGGQVISHLLYMDDLKLFAPNNLQLMKLLKVTETFSSDISMEFGVDKCAVMHVKRGEIMESVGTQLSDSIYLRSLCSTETYKYLGMSEALGINATSVKQSLKERFFGRLNKVLNSLLSGGNKVRAFNGWVMPVLMYSFGILKWTQTELDALDRRVRSLLTANRMHHPRSSVMRLYIPRKCGGRGFLNAKTLHNREVCSLREYFLEADVGMHRDVVAVDKGLTPLSLANENWRKPVVLDTNDRREVWQSKELHGRFYRVLHGPDVDFLASVAWLRFGDLFGETEGFICAITDEVMMTNNYRKYIVKDGTVDICRACHRPGESIRHIISGCSSLANGDYLHRHNLVARIIHQQLALKYNLVESEVPYYRYVPDPVLENGNCTLYWDRSIITDRTIVANKPDIVVIDRLERRAMIVDIAVPHDENLVKAEKDKQSKYLDLAREVVDMWNVNTAVIVPIIVTANGIIAKSLDQHLKRLSLGSWIKGLIQKAVLLDTARIVRRFLSREP

SEQ ID NO: 12191 - protein, 975 aa, Mythimna impura
MPLELRPRLPRLPMHNKNKALVAALDLQLSNYFDDCKDLTDTHSIMYCAAVAACCVAHVKFPNCDVATRPKPAVPAWQCRIERRIGGARALIGKLICFREGNTRPRVMRFVRRAFSGTDISPRDYMSRVTERIDFLKQKMYAWANRIRRYKRRVERYTQNRTFRSNERWVYRAWERPDQGVTDACLPDDDAMSLFWRSIWSVSVSHTEGDWTREVERACDPIPQMGAIDISPQDVARAVSPLPNWKSPGPDGLHNFWIKWFTRSHARLAYQFQSALESGSLPQFLTTGITHLLHKSGSTAEPKNYRPITCLPTVYKVLTSILRSKINSHIDKNLIMSPSQNGCRNGSRGTKELFLIDMTISQQVRRSRKDLSTCWIDYKKAYDSVPHTWLMRVLELYKIDTTLRTFLMSCMRQWSTVLRYPGCRHTQRNSEPVRIERGIFQGDSLSPLWFCLALNPLSTLLENSGLGYRLKRGGQVISHLLYMDDLKLFAPNNLQLMELLKVTETFSSAIRMEFGVDKCAVMHVKRGEVVESVGTQLTDSINLRSLSPTETYKYLGMSEALGINITDMKQSLKERFFGRLKKVLNSLLSGGNKVRAFNGWVMPVLMYSFGVLKWTQTELDALDRRVRTLLTAYRMHHPRSSVMRLYIPRKCGGRGFLNAKTLHNREVCSLREYFVAADVGKHRDVVAVDKGLTPLSLANENWRKPVVLDTNDRREVWQSKELHGRFFRALHGPDVDQLTSVAWLRFGDLFGETEGFVSAIMDEVIMTNNYWRFIVKDGTVDICRACHRPGESIRHIISGCSRLANGEYLHRHNLVARIIHQQLALKYSLVESEVPYYRYEPDPVLDNGHITLYWDRSIITDRTIVANKPDIVMVDRSERRAMIVDISVPHDENLVKAEKDKQIKYIDLAREVVDMWDVDSAIIVPIVVSANGLIDKSLDQHLRRLALGGWIKGLIQKVVLLDTARIVRRFLSLEP

SEQ ID NO: 12192 - protein, 1200 aa, Mythimna impura
MLTRSRAKKSNTHPTSSGSSLSSASQPPGPAPTVSPEIPVAAVASSSSDEYFSPPTTPPPARRRGRGRPPASLGPRGPPASDRVLAAGGSVQRMRWTQSINENVMRSYFGATEGGSNLTAYRGRMLSLFQVLEPAINVSAQRLSDQVRVIQRNRMLDDAVLDRLRLESRSSRVSPASPQAAVQLQSNVSPRPDHVGEDDDDGAISVSNQCNVRLRSALEDAFREYRFTPAELRPRLPRLPMHKKNRALVCALDSLLSNCFDSSEDLTDTHSILYCAAVAACRVARVKFPNSDRVTRPAVPAWQCRIERRIGEARALIGKLICFREGNTRPRVMRFVRRAFSGTDISPRDYLPHITERIDFLKQKVYAWANRIRRYKRRVERYTQNRTFQRNERWVYRAWERPDQGVIDTRLPDDDAMCSFWRSIWSVPVSHTEGDWTREIEQTCDLIPEMGPINISPQDVARAVRPLPNWKSPGPDGLHNFWLKWFQRSHARLASQFQSGLESGSLPQFLTTGITHLLHKSGSTAEPKNYRPITCLPTVYKVLTSILRAKINSHIETNSIMSASQNGCRNGSRGTKELLLIDVAISQQVRRSRRDLSTCWIDYKKAYDSVPHTWLMRVLELYKVDATLRTFLMSCMRQWRTALHYPGCRQIRESSEPIRIERGIFQGDSLSPLWFCLALNPLSTLLEGSGLGYRLRRGGQVISHLLYMDDLKLFASNNLQLMELLKVTETFSSAIRMEFGLDKCAVMHVKRGEIMESVGTQLSDSIYIRSLCSTETYKYLGMSEALGINAADMKQSLRERFFGRLNKVLNSLLSGGNKVRAFNGWVMPVLMYSFGILKWTQTELDALDRRVRSLLTANRMHHPRSSVMRLYIPRKCGGRGFLNAKTLHNREICSLREYFLKTDVGMHRDVVAVDKGLTPLSLVNENWRKPKVMDTNERMAVWQGKELHGRFYRALHGPDVDLLASVSWLRFGDLFGESEGFVFAIMDEVMMTNNYRKYIVKDGTVDICRACHRPGESIRHIISGCSDLANGDYLQRHNLVARIIHQQLALKYNLVESEVPYYRYVPDPVLENGSVTLYWDRSIITDRTIVANKPDIVVIDRLERRTMIVDIAVPHDENLVKAEKDKQTKYLDLAREVVDMWEVDRAVIVPIVVTANGLIAKSLEQHLRRLSLGSWIKGLIQKAVLLDTARIVRRFLSQEP

SEQ ID NO: 12193 - protein, 1200 aa, Mythimna impura
MLTRAAARRARLPPPASSLSSASPPPEPSPTVSAVTPAVAVASSSSDEYFSPPTSPPPARRRRGRRPPSGLGPRGPPASDRVPAPGGSVQRMRWTQSINENVMRAYYGATEGGNNLTAYRVRMLSLFQVLEPAVNVSAQRLSDQVRVIQRNHMLDDTVLDRLRTEMSNHAIAPSSQSVVPVMVPPSYHLSGHVDEEITDMVTHVSTQCNNELRSALECAIREYRNMPLELRPRLPRLPMHNKNKALVAALDLQLSNYFDDCKDLTDTHSIMYCAAVAACRLAHVKFPNCDVATRPKPAVPAWQCRIERRIGGARALIGKLICFREGNTRPRVMRFVRRAFSGTDISPRDYTSRVTERIDFLKQKVYAWANRIRRYKRRVDRYTQNRTFRSNERWVYRAWERPDQGVTDACLPDDDAMSSFWRSIWSVPVSHTEGDWTREVERACDPIPQMGAIDISPQDVARAVRPLPNWKSPGPDGLHNFWIKWFTRSHARLAYQFQSALESGSLPQFLTTGITHLLHKSGSTAEPKNYRPITCLPTVYKVLTSILRSKINSHIDKNLIMSPSQNGCRNGSRGTKELLLIDMTISQQVRRSRKDLSTCWIDYKKAYDSVPHTWLMRVLELYKIDTTLRTFLMSCMRQWSTVLRYPGCRHTQRNSEPVRIERGIFQGDSLSPLWFCLALNPLSTLLENSGLGYRLKRGGQVISHLLYMDDLKLFAPNNLQLMELLKVTETFSSAIRMEFGVDKCAVMHVKRGEVVESVGTQLTDFINLRSLSPTETYKYLGMSEALGINITDMKQSLKERFFGRLKKVFNSLLSGGNKVRAFNGWVMPVLMYSFGVLKWTQTELDALDRKVRTLLTAYRMHHPRSSVMRLYIPRKCGGRGFLNAKTLHNREVCSLREYFLAADVGMHRDVVTVDKGLTPLSLANENWRKPVVLDTNDRREVWQSKELHGRFFRALHGPDVDQLASVAWLRSGDLFGETEGFVCAIMDEVIMTNNYRRFIVKDGTVDICRACHRPGESIRHIISGCSRLANGEYLHRHNLVARIIHQQLALKYSLVESEVPYYRYEPDPVLDNGHITLYWDRSIITDRTIVANKPDIVVVDRSERRAMIVDISVPHDENLVKAEKDKQIKYIDLAREVVDMWDVDSAIIVPIVVSGNGLIAKSLDQHLRRLALGDWIKGLIQKAVLLDTARIVRRFLSLEP

SEQ ID NO: 12194 - protein, 1200 aa, Mythimna impura
MLTRAAARRARLPPPASSLSSASPPPESSPTVSAVTPAVAVASSSSDEYFSPPTSPPPARRRRGRRPPSGLGPRGPPASDRVPAPGGSVQRMRWTQSINENVMRAYYGATEGGNNLTAYRVRMLSLFQVLEPAVNVSAQRLSDQVRVIQRNHMLDDTVLDRLRTEMSNHAIAPSSQPVVPVMVPPSYHLSGHADEEITDMVTHVSTQCNNELRSALECAIREYRNMPLELRPRLPRLPMHNKNKALVAALDLQLSNYFDDCEDLTDTHSIMYCAAVAACRVAHVKFPSCDVSTRPKPAVPAWQCRIERRIGGARALIGKLICFREGNTRPRVMRFVRRAFSGTDISSRDYMSRVTERIDFLKQKVYAWANRIRRYKRRVERYTQNRTFRSNERWVYRAWERSDQGVTDTRLPDDDAMSSFWRSIWSVPVSHTEGDWTREVERACDPIPQMGAIDISPQDVARAVRPLPNWKSPGPDGLHNFWIKWFTRSHARLAYQFQSALESGSLPQFLTTGITHLLHKSGSTAEPKNYRPITCLPTVYKVLTSILRSKINSHINKNLIMSPSQNGCRNGSRGTKELLLIDMTISQQVRRFRKDLSTCWIDYKKAYDSVPHTWLMRVLELYKIDTTLRTFLMSCMRQWSTVLRYPGCRHIQRNSEPVRIERGIFQGDSLSPLWFCLALNPLSTLLENSGLGYRLKRGGQVISHLLYMDDLKLFAPNNLQLMELLKVTETFSSAIRMEFGVDKCAVMHVKRGEVMESVGTQLTDSINLRSLSPTETYKYLGMSEALGINITDMKQSLKERFFGRLKKVFNSLLSGGNKVRAFNGWVMPVLMYSFGVLKWTQTELDALDRRVRTLLTAYRMHHPRSSVMRLYIPRKCGGRGFLNAKTLHNREVCSLREYFLATDVGMHRDVVTVDKGLTPLSLANENWRKPVVLDTNDRREVWQSKELHGRFFRAFHGPDVDQLASVAWLRFGDLFGETEGFVCAIMDEVIMTNNYRRFIVKDGTVDICRACHRPGESIRHIISGCSRLANGEYLHRHNLVARIIHQQLALKYSLVESEVPYYRYEPDPVLDNDHITLYWDRSIITDRTIVANKPDIVVVDRSERRAMIVDISVPHDENLVKAEKDKQIKYIDLAREVVDMWDVDSAIIVPIVVSANGLIAKSLDQHLRRLALGGWIKALIQKAVLLDTARIVRRFLSLEP

SEQ ID NO: 12195 - protein, 1200 aa, Mythimna impura
MLTRAAARRARPPPPASSLSSASPPPESSPTVSAVTPAVAVASSSSDEYFSPPTSPPPARRRRGRRPPSGLGLRGPPVSDRVPAPGGSVQRMRWTQSINENVMRAYYGATEGGNSLTAYRVRMLSLFQVLEPSVNVSAQRLSDQVRVIQRNHMLDDTVLDRLRTEMSNHAIAPSSQSVVPVMVPPSYHLSDHADEAITDMVTHVSTQCNNELRSALECAIREYRNMPLELRPRLPRLPMHNKNKALVAALDLQLSNYFDDCKDLTDTHSIMYCAAVAACRVAHVKFPNCDVATRPKPAVPAWQCRIERRIGGARALIGKLICFREGNTRPRVMRFVRRAFSGTDISPRDYMSRVTERIDFLKQKVYAWANRIRRYKRRVEWYTQNRTFRSNERWVYRAWERPDQGVTDACLPDDDAMSSFWRSIWSVPVSHTEGDWTREVERACDPIPQMGAIDISPQDVARAVRPLPNWKSPGPDGLHNFWIKWFTRSHARLAYQFQSALESGSLPQFLTTGITHLLHKSGSTAEPKNYRPITCLPTVYKVLTSILRSKINSHIDKNLIMSPSQNGCRNGSRGTKELLLIDMAISQQVRRSRKDLSTCWIDYKKAYDSVPHTWLMRVLELYKIDTTLRIFLMSCMRQWSTVLRYPGCRHTQRNSEPVRIERGIFQGDSLSPLWFCLALNPLSTLLENSGLGYRLKRGGQVISHLLYMDDLKLFAPNNLQLMELLKVTETFSSAIRMEFGVDKCAVMHVKRGEVVESVGTQLTDSINLRSLSPTETYKYLGMSEALGINITDMKQSLKERFFGRLKKVLNSLLSGGNKVRAFNGWVMPVLMYSFGVLKWTQTELDALDRRVRTLLTAYRMHHPRSSVMRLYIPRKCGGRGFLNAKTLHNREVCSLREYFLAADVGMHRDVVAVDKGLTPLSLANENWRKPVVLDTNDRREVWQSKELHGRFFRALHGPDVDQLASVAWLRFGDLFGETEGFVCAIMDEVIMTNNYRRFIVKDGTVDICRACHRPGESIRHIISGCSRLANGEYLHRHNLVARIIHQQLALKYSLVESEVPYYRYEPDPVLDNGHITLYWDRSIITDRTIVANKPDIVMVDRSERRAMIVDISVPHDENLVKAEKDKQIKYIDLAREVVDMWDVDSAIIVPIVVSANGLIAKSLDQHLRRLALGGWIKGLIQKVVLLDTARIVRRFLSLEP

SEQ ID NO: 12196 - protein, 975 aa, Mythimna impura
MPLELRPRLPRLPMHNKNKALVAALDLQLSNYFDDCEDLTDTHSIMYCAAVAACRVAHVKFPSCDVSTRPKPAVPAWQCRIERRIGGARALIGKLICFREGNTRPRVMRFVRRAFSGTDISPRDYMSRVTERIDFLKQKVYAWANRIRRYKRRVERYTQNRTFRSNERWVYRAWERPDQGVTDTRLPDDDAMSSFWRSIWSVPVSHTEGDWTREVERACDPIPQMGAIDISPQDVARAVRPLPNWKSPGPDGLHNFWIKWFTRSHARLAYQFQSALESGSLPQFLTTGITHLLHKSGSTAEPKNYRPITCLPTVYKVLTSILRSKINSHIDKNLIMSPSQNGCRNGSRGTKELLLIDMTISQQVRRFRKDLSTCWIDYKKAYDSVPHTWLMRVLELYKIDTTLRTFLMSCMRQWSTVLRYPGCRHIQRNSEPVRIERGIFQGDSLSPLWFCLALNPLSTLLENSGLGYRLKRGGQVISHLLYMDDLKLFAPNNLQLMELLKVTETFSSAIRMEFGVDKCAVMHVKRGEVVESVGTQLTDSINLRSLSPTETYKYLGMSEALGINITDMKQSLKERFFGRLKKVFNSLLSGGNKVRAFNGWVMPVLMYSFGVLKWTQTELDALDRRVRTLLTAYRMHHPRSSVMRLYIPRKCGGRGFLNAKTLHNREVCSLREYFLATDVGMHRDVVTVDKGLTPLSLANENWRKPVVLDTNDRREVWQSKELHGRFFRAFHGPDVDQLASVAWLRFGDLFGETEGFVCAIMDEVIMTNNYRRFIVKDGTVDICRACHRPGESIRHIISGCSRLANGEYLHRHNLVARIVHQQLALKYSLVESEVPYYRYEPDPVLDNGHITLYWDRSIITDRTIVANKPDIVVVDRSERRAMIVDISVPHDENLVKAEKDKQIKYIDLAREVVDMWDVDSAIIVPIVVSANGLIAKSLDQHLRRLALGGWIKALIQKAVLLDTARIVRRFLSLEP

SEQ ID NO: 12197 - protein, 1148 aa, Mythimna impura
MFVILIIIIMRERRPPACLGSRGPPASDRVPATGGCVSRMRWTQSINENVMRAYYGATEGGNNLTAYRVRMLSLFQVLEPAVNVSAQRLSDQVRVIQRNHMLDDTVLDRLRTEMGSHAIASSSQTAVPSQVLASNHLPNRADEESTDMITHVSTQCSNELRSALECAIREYRNMPLELRPRLPRLPMCNKNKALVAALDSQLSNYFDDCEDLTDTHSIMYCAAVAACRVAHVKFPNSDVATRPKPAVPAWQCRIERRIGGARALIGKLICFREGNTRPRVMRFVRRAFSGTDISPRDYMSCVTERIDFLKQKVYAWANRIRRFKRRVERYTQNRTFRSNERWVYRAWEQPDQGVTDTRLPDDDAMSSFWRNIWSVPVSHTEGGWTREVERACEPIPEMGAITISPQDVARAVRPLPNWKSPGPDGLHNFWIKWLQRSHARLASQYQTALESGSLPEFLTTGVTHLLHKSGSTTEPKNYRPITCLPTVYKVLTSILRAKINHHVDNNAIMSASQNGCRNGSRGTKELLLIDMAISQQVRRSRKDLSTCWIDYKKAYDSVPHTWLMRVLELYKIDTTLRTFLMSCMRQWRTVLRYPGCRHIQRNSEPVRIERGIFQGDSLSPLWFCLALNPLSTLLENSGLGYRLKRGGQVISHLLYMDDLKLFAPNNLQLMELLKVTETFSSAIRMEFGVDKCAVMHVKRGEIVESVGTQLSDSINLRSLSPTETYKYLGMSEALGINATDMKQTLRERFFGRLKKVFNSLLSGGNKVRAFNGWVMPVLMYSFGVLKWTQTELDALDRRVRTLLTAYRMHHPRSSVMRLYIPRKCGGRGFLNAKTLHNREVCSLREYFLTADVGMHRDVVAVDKGLTPLSLANESWRKPVVLDTNDRREVWQSKELHGRFFRALHGPDVDQLASVAWLRVGDLFGETEGFVCAIMDEVIMTNNYRRFIVKDGTVDICRACHRPGESIRHIISGCSRLANGEYLHRHNLVARIIHQQLALNYSLVESEVPYYRYVPDPVLDNGDITLYWDRSIITDRTIVANKPDIVVVDRRERRTMIVDISVPHDENLVKAEKDKQIKYIDLAREVVDMWDVDSAIIVPIVVSANGLIAKSLDQHLRRLALGGWIKGLIQKAVLLDTARIVRRFLSLEP

SEQ ID NO: 12198 - protein, 1200 aa, Mythimna impura
MLTRSRAQKLHTHPTSSGSSLSSASQPPGPAPTVSPEIPVAAVASSSSDEYFSPPTTPPPARRRGRGRPPASLGPRGPPASDRVPAAGGSVQRMRWTSSINENVMRSYFGATEGGINLTAYRSRMLSLFQVLEPAVNVSVQRLSDQVRVIQRNRMLDDAVLDRLRLESQSSRVSPATTPAAVQRLPTASPRPVQVGDADDDAAISVSTQCNDRLRGALEDAFREYRSTPPGLRPRLPRLPMHKRNRALVCALDSQLSNCFDSSKDLTDTHSILYCAAVAACRVAHVKFPNCDRATRPAVPAWQCRIEHRIGEARALIGKLICFREGNTRPRVTRFMRRAFSGTDISPRDYLPCVTERIDFLKQKIYAWANRIRRYKRRVERYTRNRTFQSNERWVYRDWERSDQGVTDTRLPDDDAMCSFWRSIWSAPVSHTEGDWIREVERACDLLPEMGAITISPQDVARAVRPLPNWKSPGPDGLHNFWVKWFQRLHARLVSQFQSALESGSLPQFLTTGITHLLHKSGSTAEPKNYRPITCLPTVYKILTSILRAKINSHIETNSIMSASQNGCRNGSRGTKELLLIDIAISQQVRRSRKNLSACWIDYKKAYDSVPHTWLMRVLELYKVDATLRTFLMSCMGQWRTVLHYPGCRQIQENNEPIRIERGIFQGDSLSPLWFCLALNPLSTLLEGSGLGYRLKRGGQVISHLLYMDDLKLFAPNNLQLVELLKVTETFSSAIRMEFGVDKCAVIHVKRGEIMESVGIQLSDSIHLRSLCSTETYKYLGMSESLGINTDDVKQSLKERFFGRLNKVLNSLLSGGNKVRAFNGWVMPVLMYYFGILKWTQTELDALDRRVRTLLTANRMHHPRSSVMRLYIPRKCGGRGFLNAKTLHNREVCSLREYFLKTDVGMHRDVVAVDKGLTPLSLANENWRKPIVLDTNDRREVWQSKELHGRFYRALHGPDVDLLASVSWLRFGDLFGETEGFVFAIMDEVMMTNNYRKYIVKDGTVDICRACHRPGESIRHIISGCSHLANGDYLHRHNLVARIIHQQLALKYNLVESEVPYYRYVPDPVLDNGNITLYWDRSIITDRTIVANKPDIVVIDRLERRTMIVDIAVPHDENLVKAEKDKQTKYLDLAREVVDMWEVDKAIIVPIVVTANGLIAKSLEQHLRRLSLGSWIKGLIQKAVLLDTARIVRRFLSQEP

SEQ ID NO: 12199 - protein, 857 aa, Mythimna impura
MIYVRDYMSRVTERIDFLKQKVYAWANRIRRYKRRVERYTQNRTFRSNERWVYRAWERPDQGVTDTRLPDDDAMSSFWRSIWSVPVSHTEGDWTREVERACDPIPQMGAIDISPQDVARAVRPLPNWKSPGPDGLHNFWIKWFTRSHARLAYQFQSALESGSLPQFLTTGITHLLHKSGSTAEPKNYRPITCLPTVYKVLTSILRSKINSHIDKNLIMSPSQNGCRNGSRGTKELLLIDMTISQQVRRFRKDLSTCWIDYKKAYDSVPHTWLMRVLELYKIDTTLRTFLMSCMRQWSTVLRYPGFRHIQRNSEPVRIERGIFQGDSLSPLWFCLALNPLSTLLENSGLGYRLKRGGQVISHLLYMDDLKLFAPNNLQLMELLKVTETFSSAIRMEFGVDKCAVMHVKRGEVVESVGTQLTDSINLRSLSPTETYKYLGMSEALGINITDMKQSLKERFFGRLKKVFNSLLSGGNKVRAFNGWVMPVLMYSFGVLKWTQTELDALDRRVRTLLTAYRMHHPRSSVMRLYIPRKCGGRGFLNAKTLNNREVCSLREYFLATDVGMHRDVVAVDKGLTPLSLANENWRKPVVLDTNDRREVWQSKELHGRFFRAFHGPDVDQLASVAWLRFGDLFGETEGFVCAIMDEVIMTNNYRRFIVKDGTVDICRACHRPGESIRHIISGCSRLANGEYLHRHNLVARIIHQQLALKYSLVESEVPYYRYEPDPVLDNGHITLYWDRSIITDRTIVANKPDIVVVDRSERRAMIVDISVPHDENLVKAEKDKQIKYIDLAREVVDMWDVDSAIIVPIVVSANGLIAKSLDQHLRRLALGGWIKALIQKAVLLDTARIVRRFLSLEP

SEQ ID NO: 12200 - protein, 1198 aa, Phlogophora meticulosa
MLTRSAARRARPPPPASSLSSASSPPKPSTIVSTVKPAVPVASSSSDEYFSPPTSPPPARRRRGRRPPDGLGPRGPPASDRVPAPGGSVQRMRWTQSINENVMRSYYGATEGGSNLTAYRVRMLSLFQVLEPAVNVSAQRLSDQVRVIQRNHMLDDVVLDRLRTEMQSSRVITSPSHTVVPPQYNIVLSSFADGEGSDKVTNVSTQYNEELRSALEGAIREYRFMLPALRPRLPRLPMHNKNRALVAALDSQLSNYFDNCDDLTDAHSILYCAAVAACRVAHVKFPYDIATRPKPAVPAWQCRIERRIAGARALIGKLVCYREGNTRPRVMRYVRRAFLGTDISPRDYMSRVTERIDFLKQKVYAWASRIRRYKRRVERYTQNRTFQSNERWVYRAWERPVQGVTDTHLPDDDVMCSFWRNIWSVPVSHTEGDWTREVERACDPIPQMGAITISPQDVARAVRPLPNWKSPGPDGLHNFWIKWLQKSHARLASQFQSALETGSLPQFLTTGITHLLHKSGSTAEPKNYRPITCLPTVYKVLTSILRVKINNHIDSNSIMSASQNGCRNGSRGTKELLLIDTAISQQVRRSRKDLSTCWIDYKKAYDSVPHTWLKRVLELYKVDATLRTFLTSCMGQWRTVLRYPGCRQIQRNSEPIRIERGIFQGDSLSPLWFCLALNPLSTLLEDSGLGYRLKRGGQVVSHLLYMDDLKLFAPSDLQLMELLTVTKTFSSAIRMEFGVDKCAVMHVKRGKIVESVGTQLPDFINFRALSPIETYKYLGMSEALGINAADMKQSLKERFFGRLKKVCNSLLSGGNKVRAFNGWVMPVLMYSFGILKWTQTELDALDRRVRTFLTASRMHHPRSSVMRLYIPRKCGGRGFLNAKTLHNREICSLRDYFLETDVGMHRDVVAVDQGLTPLSLAKENWRKPVVLDTNDRKEVWQSKELHGRFFQALHGPDVDQLASVSWLRFGDLFGETEGFVCAIMDEVIMTNNYRRFIVKDGTVDICRACHRPGESIRHIISGCSRLANEEYLHRHNLVARIIHQQLALKYSLVESEVPYYKYVPDPVLENGSVTLYWDRSIITDRTIVANKPDIVVMDRIERRATIIDVTVPHDGNLVKAEKDKQIKYLDLAREVVDMWDVDSAIVVPIVVSANGLIAKSLDQHLRRLALGSWIKGLIQKTVLLDTARIVRRFLSLEP

SEQ ID NO: 12201 - protein, 1197 aa, Xestia xanthographa
MLTRSAAARRARLPPPDSSLSSASPPPEPSPIVSAVTPAVAVASSSSDEYFSPPTTPPPARRRGGHRPPDGLGPRGPPASDRVPAPGGSVQRMRWTQSINENVMRAYYGATEGGNNLTAYRVRMLSLFQVLEPAVNVSAQRLSDQVRVIQRNRMLDDTVLDRLRTEIQSNHVIVTPSQAVVPPQSSIIPCDNDVSNDMVTNVSTQCNVEMRSALEGAIREYRFMQPDLRPRIPRLPMHNRNRALVAVLDSQLSNYFDNCKDLTDVHSILYCAAVAACRVAHVKFPSDRATRPKPAVPAWQYRIERRIGGARALIGKLVCFREGNTRPRVMRFVRQAFSGTDISPRDYMSRVTERIDFLKQKVYAWANRIRRYKRRVDRYTQNRTFQKDERWVYRAWERPDQGVADTHLPDDDAMCSFWRSIWSVPVSHAEGEWTRVIERACDPISEMGAINISPQDVARAVRPLPNWKSPGPDGLHNFWIKWFTRSHARLATLFQSALESGSLPEFLTTGITHLLHKSGSTAEPKNYRPITCLPTVYKVLTSILRTKISKHIDDNSVMSASQNGCRNGSRGTKELLLIDMAISHQVRRSRKDLSTCWIDYKKAYDSVPHTWLMRVLELYKVDATLRTFLMSCMGQWRTVLRYPGCRQIQRNSEPIRIERGIFQGDSLSPLWFCLALNPLSTLLEDSGLGYRLQKDGQVISHLLYMDDLKLFAPNDLRLMELLKVTETFSNAIRMEFGVDKCAVMHVKRGEIVESVGTQLSDSITLRSLSATETYKYLGMSEALGVNVADMKQSLKERFFGRLKKVLNSLLSGGNKVRAFNGWVMPVLMYSFGILKWTQTELDALDTKVRKLLTAYRMHHPRSSVMRLYIPRKCGGRGFLNAKTLHNREICSLREYFLGTDVGMHRDVVTMDKGFTPLSLAKENWRKPPVLDTNDRREVWQSKELHGRFFRALHGPDVDLSASVAWLRSGDLFGETEGFVCAIMDEVMMTNNYRRFIVKDGTVDICRACHRPGESIRHIISGCSRLANGEYLHRHNLVARIIHQQLALKYNLVESEVPYYRYVPDPVLDNGCITLYWDQSIITDRTIVANKPDIVVVDRSERHAMIVDITVPHDENLVKAEKDKQIKYLDLAREVVDMWEVDSAIIVPIVVSAHGLIAKSLDQYLRRLSLGSWIKGLIQKAVLLDTARIVRRFLSLEP

SEQ ID NO: 12202 - protein, 1198 aa, Xestia xanthographa
MLTRSAAARRARLPPPDSSLSSASPPPEPSPIVSAVTPAVAVASSSSDEYFSPPTTPPPARRRGGHRPPDGLGPRGPPASDRVPAPGGSVQRMRWTQSINENVMRAYYGATEGGNNLTAYRVRMLSLFQVLEPAVNVSAQRLSDQVRVIQRNRMLDDTVLDRLRTEIQSSHVIATPSQAVVPPQSSIIPNCDNDVGNDMVTNVSTQCNVEMRSALEGAIREYRFMQPDLRPRIPRLPMHNKNRALVAVLDSQLSNYFDNCEDLTDVHSILYCAAVAACRVAHVKFPSDRATRPKPAVPAWQYRIERRIGGARALIGKLVCFREGNTRPRVMRFVRQAFSGTDISPRDYMSRVTERIDFLKQKVYAWANRIRRYKRRVDRYTQNRTFQKDERWVYRAWERPDQGVADTHLPDDDAMCSFWRSIWSVPVSHAEGEWTRVIERACDPVSEMGAITISPQDVARAVRPLPNWKSPGPDGLHNFWIKWFTRSHARLATLFQSALESGSLPEFLTTGITHLLHKSGSTAEPKNYRPITCLPTVYKVLTSILRTKISKHIDDNSVMSASQNGCRNGSRGTKELLLIDMAISHQVRRSRKDLSTCWIDYKKAYDSVPHTWLMRVLELYKVDATLRTFLMSCMGQWRTVLRYPGCRQIQRNSEPIRIERGIFQGDSLSPLWFCLALNPLSTLLEDSGLGYRLRKDGQVISHLLYMDDLKLFAPNDLQLMELLKVTDTFSSAIRMEFGVDKCAVMHVKRGEIVESVGTQLSDSITLRSLSATETYKYLGMSEALGVNVADMKQSLKERFFGRLKKVFNSLLSGGNKVRAFNGWVMPVLMYSFGILKWTQTELDALDTKVRKLLTAYRMHHPRSSVMRLYIPRKCGGRGFLNAKTLHNREICSLREYFLGTDVGMHRDVVTVDKGLTPLSLAKENWRKPPVLDTNDRREVWQSKELHGRFFRALHGPDVDLPASVAWLRSGDLFGETEGFVCAIMDEVMMTNNYRRFIVKDGTVDICRACHRPGETIRHIISGCSRLANGEYLHRHNLVARIIHQQLALKYNLVESEVPYYRYVPDPVLDNGCITLYWDQSIITDRTIVANKPDIVVVDRSERRAMIVDITVPHDENLVKAEKDKQIKYLDLAREVVDMWEVDSAIIVPIVVSAHGLIAKSLDQYLRRLSLGSWIKGLIQKAVLLDTARIVRRFLSLEP

SEQ ID NO: 12203 - protein, 1200 aa, Cosmia trapezina
MLTRSATRKARLPPPDSSLSSASPPPVPSLTVSAVSTPAAVVASSSSDEYFSPPTTPPPARRRGGRRPPDGLGPRGPPASDRVPASGGSVQRMRWTRAINENVMRSYYGATEGGNNLTAYRVRMHSLFQVLEPALNVSAQRLSDQVRVIQRNHMLDDTVLDRLRNEMQSSRVIAPLSQTIVAPPPPQCNTTQADEGSDGTAANVSTQCNEELRSALEGAIQEYRFVSPELRPRLPRLPMHNKNRALVAALDSQLSNYFDDCEDLTDTHSILYCAAVAACRVAHVKFANDSRATRPKPAVPAWQCRIERRIGGARALIGKLICFREGNTRPRVMRFVRRAFSGTDVSPQDYMSRVTERIDFLRQKVYAWANRIRRYKRRVDRYTQNRTFQSDERWVYRGWERPDQGVTDTRLPDDDAMCSFWRSIWSVPVSHTEGDWAREVRRACDPIPEMGAITICPQDVARAVRPLPNWKSPGPDGLHNFWIKWFLGSHARLAAQYQSALQSGSLPQFLTTGITHLLHKSGSTTEPKNYRPITCLPTVYKVLTSILRAKINEHIDTNSIMSASQNGSRNGSRGTKELLLIDMAISQQVRRSRRDLSTCWIDYKKAYDSVPHTWLMRVLELYKVDATLRTFLMSCMGQWRTVLRYPGCRNIQRNSEPIRIERGIFQGDSLSPLWFCLALNPLSTLLEDSGLGYRLRRGGQVISHLLYMDDLKLFAPSNLQLMELLKVTETFSSAIRMEFGVDKCAVMHVKRGEIVESVGTQLPDSINLRTLSAAETYKYLGMSEALGINVADMKQSLKERFFGRLKKVFNSLLSGGNKVRAFNGWVMPVLMYSFGILKWTQTELDALDRRVRTLLTAYRMHHPRSSVMRLYIPRKCGGRGFLNAKTLHNREICSLREYFLETDVGMHRDVVAVDKGLTPLSLAKENWRKPVVLDANDRMEVWQSKELHGRFFRALHGPDVNLLASVAWLRSGDLFGETEGFVCAIMDEVIMTNNYRRFIVKDGTVDICRACHRPGESIRHIISGCSRLANEEYLHRHNLVARIIHQQLALKYSLVESEVPYYRYVPDPVLENGHITLYWDRSIITDRTIVANKPDIVVVDRTERRAMIVDITVPHDGNLVKAEKDKQIKYIDLAREVVDMWDVDSAVIVPIVVSANGLIAKSLDQHLRRLSLGSWIKGLIQKAVLLDTARIVRRFLSLEP

SEQ ID NO: 12204 - protein, 1205 aa, Cosmia trapezina
MLTRSRAQQLRNTQPTSSGSSLSSASQLPEPAPDVSQVIPAAAVASSSSDEYFSPPTTPPPVRRRGRGRPPASLGPRGPSASDRVPAPGGSVQRMRWTQTVNENVMRAYFGATEGGSNLTAYRGRMLSLFQVLEPAVNVSAQRLSDQVRVIQRNHMLDDVVLDRLRLESRNSRVTSVSPMVAVQLQNLPSASPRPDCVGEEDDSGAISVSSQCNVQLRSALEDAFREYRSAPPGLRPRLPRLPMHKKNKALVGALDSQLSNCFDGSKDLADTHSILYCAAVAACRVAHVKFPNSDRVSRPKPAVPAWQCRIERRIGEARALIGKLICFREGNTRPRVMRFVRRAFSGTDISPRDYFTCVTERIDFLKQKICAWANRIRRYRRRVERYTQNRTFQSDERWVYRAWERPDQGVADTQLPDDDAMCSFWRSIWSVPVSHTEGDWTREVERACDHIPQMGALTISPQDVARAVRPLPNWKSPGPDGLHNFWIKWFQRSHTRLASQFQSALQSGSLPQFLTTGITHLLHKSGSTAEPRNYRPITCLPTVYKVLTSILRAKINKHIDTNSIMSASQNGCGNGSRGTKELLLIDMTINQQVRRSRKDLSTCWIDYKKAYDSVPHTWLMRVLELYKIDATLRTFLMSCMGQWRTVLRYPGCRNIQRNSEPIRIERGIFQGDSLSPLWFCLALNPLSTLLEDSGLGYRLRRGGQVISHLLYMDDLKLFAPNNLQLMELLKVTETFSSAIRMEFGVDKCAVMHVKRGEIVESVRTQLSDSIHLRSLSSLETYKYLGMSEALGINAADMKQSLRERFFDRLNKVLNSLLSGGNKVRAFNGWVMPVLMYSFGILKWTQTELDALDRRVRTLLTANRMHHPRSSVMRLYIPRKCGGRGFLNAKTLHNREVCSLREYFLEADVGMHRDVVSVDKGLTPLSLANENWRKPVVLDTNDRREVWQSKELHGRFYRVLHGPDVDFLASVSWLRFGDLFGETEGFVFAIMDEVMMTNNYRKYIVKDGTVDICRACHRPGESIRHIISGCSRLANGDYLHRHNLVARIIHQQLALKYSLVESEVPYYRYVPDPVLENGNITLYWDRSIITDRTIVANKPDIVVIDRLERRTMIVDIAVPHDENLVKAEKDKQIKYLDLAREVVDMWDVDTAIIVPIVVTANGIIAKSLDQHLSRLSLGGWIKGLIQKAVLLDTARIVRRFLSQQP

SEQ ID NO: 12205 - protein, 1239 aa, Cosmia trapezina
MSVVLDVKLTLSYLLLPRFTHVLLCNYNYKNHTKLHCFIAIYMVAVRFNTRLLPPDSSLSSAPPPPVPSPIESAVTPAMAVASSSSDEYFSPPTSPPPVRRRGGRRPPDGLGPRGPPASDRVPAPGGSVQRMKWTQSINENVMRSYYGATEGGNNLTAYRVRMLSLFQVLEPAVNVSAQRLSDQVRVIQRNHMLDDTVLDRLRSEIQSSHVIAPLSQTVVVPPPPQCNTSHADEGSDDRATNVSTQCNEELRSALEGAIQEYRFISPELRPRLPRLPMHNKNRALVAALDSQLSNYFDDCEDLTDTHSILYCAAVAACRVAHVKFSNDSRATRPKPGVPAWQCRIERRIGGARALIGKLICFREGNTRPRVMRFVRRAFSGTDVSPQDYMSRVTERIDFLKQKVYAWANRIRRYKLRVDRYTQNRTFQSDERWVYRSWERPDQGVADTPLPEDDAMCSFWRSIWSVPVNHTEGDWTGRIERTCDQIPQMGALTISPQDVARAVRPLPNWKSPGPDGLHNFWIKWFQRSHARLASQFQSALQSGSLPQFLTTGITHLLHKSGSTAEPKNYRPITCLPTVYKVLTSILRAKINEHVDTNSIMSASQNGCRNGSRGTKELLLIDMAISQQVRRSRKDLSTCWIDYKKAYDSVPHTWLMRVLELYKVDATLRTFLMSCMGQWRTVLRYPGCRNIQRNSEPIRIERGIFQGDSLSPLWFCLALNPLSTLLEDSGLGYRLRRGGQVISHLLYMDDLKLFAPNNLQLMELLKVTETFSSAIRMEFGVDKCAVMHVKRGEIMESVGTQLSDSINLRALSASETYKYLGMSEALGINVTDMKQSLRERFFGRLRKVFNSLLSGGNKVRAFNGWVMPVLMYSFGILKWTQTELDALDRRVRTLLTAYRMHHPRSSVMRLYIPRKCGGRGFLNAKTLHNREICSLREYFLEADVGMHRDVVAVDKGLTPLSLAKENWRKPVVLDTNDRREVWQSKELHGRFFRVLHEPDVDFLASVAWLRSGDLFGETEGFVCAIMDEVMMTNNYRKYIVKDGTVDICRACHRPGESIRHIISGCSRLANEEYLHRHNLVARIIHQQLALKYSLVESEVQYYRYVPDPVLENGNITLYWDRSIITDRTIVANKPDIVVVDRTERRAMIIDITVPHDGNLVKAEKDKQIKYLDLAREVVDMWDVNSAIIVPIVVSANGLIAKSLDQHLRRLSLGSWIKGLIQKAVLLDTARIVRRFLSLEP

SEQ ID NO: 12206 - protein, 1202 aa, Cosmia trapezina
MLTRSAARRTRLLPPDSSLSSAPAPPVPSPIESAVTPAMAVASSSSDEYFSPPTSPQPVRRWGRRRPPDGLGPRGPPASDRVPAPGGSVQRMKWTQTVNENVMRAYFGATERGSNLTAYRGRMLSLFQVLEPAVNVSAKRLSDQVRVIQRNHMLDDVVLDRLRLESRNSHVTSVSPMVAVQQQNLPSASPRPDCVGEEDDSGAISVSSQCNVQLRSALEDAFREYRSTPPGLRPRLPRLPMHKKNKALVGALDSQLSNCFDGSKDLADTHSILYCAAVAACRVAHVKFPNSNRVPRPKPAVPAWQCRIERRIGEARALIGKLICFREGNTRPRVMRFVRRAFSGTDISPRDYFACVTERIDFLKQKIYAWANRIRRYRRRVERYTQNRTFQSDERWVYRAWERPDQGVADTQLPDDDAMCSFWRSIWSVPVSHTEGDWTGEVERACDHIPQMGALTISPQDVARAVRPLPNWKSPGPDGLHNFWIKLFQRSHARLASQFQSTLQSGSLPQFLTTGITHLLHKSGSTAEPRNYRPITCLPTVYKVLTSILRAKINKHIDTNSIMSASQNGCENGSRGTKELLLIDMTINQQVRRSRKDLSTCWIDYKKAYDSVPHTWLMRVLELYKIDATLRTFLMSCMGQWRTVLRYPGCRNIQRNSEPIRIERGIFQGDSLSPLWFCLALNPLSTLLEDSGLGYRLRRGGQVISHLLYMDDLKLFAPNNLQLMELLKVTETFSSAIRMEFGVDKCAVMHVKRGEIVESVRTQLSDSIHLRSLSSLETYKYLGMSEALGINAAGVKQSLRERFFGRLNKVLNSLLSGGNKVRAFNGWVMPVLMYSFGILKWTQTELDALDRKVRTLLTANRMHHPRSSVMRLYIPRKCGGRGFLNAKTLHNREVCSLREYFLEADVGMHRDVVSVDKGLTPLSLANENWRKPIVLDTNDRREVWQSKELHGRFYRVLHGPDVDFLASVSWLRFGDLFGETEGFVFAIMDEVMMTNNYRKYIVKDGTVDICRACHRPGESIRHIISGCSCLANGDYLHRHNLVARIIHQQLALKYSLVESEVPYYRYVPDPVLENGNITLYWDRSIITDRTIVANKPDIVVIDRLERRKVIVDIAVPHDENLVKAEKDKQIKYLDLAREVVDMWDVDTAIIVPIVVTANGIIAKSLDQHLRRLSLGGWIKGLIQKAVLLDTARIVRRFLSQQP

SEQ ID NO: 12207 - protein, 1204 aa, Cosmia trapezina
MMQTRAKTRIQAHPPSPDSSLSSASQPVRASTVSAVSPVAAVASSSSDEFFSPPSSPTPPRRRGRGRPPAGLGPRGQPAPNRVPAAGGNVSRMRWTQSINENVMRAYYGATEGGINLTAYRGRMLSLFQVLEPAVNVSAQRLSDQVRVIQHNHRLDNATLDRLRSEMQSSSASNPPPSQNVMHVPAEIPLRANQRDEEENARAISADNLCNVEIRSALEDAIREYRFTSPDLRPRLPRLPMNKKNRALVCALDALLPNFIESSADLCDTHSILYCTAVAACRVACVKFPNTDRATRPKPAAPAWQCRIERRINEARVLIGKLICFREGNTRPRVMRFVRRAFSGTNVSPQEYVSRVTERIDFLKQKVYAWANRIRRYRRRVDRYSQNRMFQSDERWVYRAWERPIPTQGVTDVRPPDNETMSAFWRSIWSVPVSHTEGDWMRIVEQACDSIPNMDAVTISPLDVACAVRPLPNWKSPGPDGLHNFWIKWLQRSHACLASQFQSSLETGSLPLLFTTGVTHLLHKSGSTAEPKNYRPITCLPTVYKVLTSILRAKIAHHIYNNSIMSVSQNGCRNGSRGTKELLLIDMTISQQVRRSRKDLSTCWIDYKKAYDSVPHTWLIRVLELYKIDATLRTFLMSCMGQWKTVLLYPGCRRIPGIDEPIRIERGIFQGDSLSPLWFCLALNPLSTLLEDSGLGYRLRRGGQVISHLLYMDDLKLFAPNNLRLMELLKVTENFSSAIRMEFGVDKCAVMHVKREEIMESVGTQLSDSIHLRSLSSTETYKYLGMSEALGINVADMKQSLKERFFGRLKKVFNSLLSGGNKVRAFNGWVMPVLMYSFGVLKWTQTELDALDRRVRTLLTAYRMHHPRSSVMRLYIPRKCGGRGFLNAKTLHNREICSLREYFLEADVGMHRDVVAVDKGLTPLSLAKENWRKPAVLDTNDRREVWQGKELHGRFFRALHGPDVDFLASVSWLRFGDLFGETEGFVCAIMDEVIMTNNYRKYIVKDGTVDICRACHHPGESIRHIVSGCSRLANGEYLHRHNLVARIIHQQLALQYNLVESEVPYYRYVPDPVLENGQATLYWDRSIITDRTIVANKPDIVVIDRRERRAIIVDIAVPHDENLVKAEKDKKIKYLDLAHEVVDMWDVDSAIIVPIIVTVNGLIAQSLDQHLRRLSLRGWIKGLIQKTVLLDTARIVRRFLSLEP

SEQ ID NO: 12208 - protein, 1197 aa, Mamestra brassicae
MLTRSRARHLATHPSPSASSLSSASPPPEPSPTVSAVTPAVAVASSSSDEYFSPPTTPPPARRRRGRRPPDGLGPRGPPASDRVPAPGGSVQRMRWTQSINENVMRSYFGATEGGTNLTAYRGRMLSLFQVLEPAVNVSAQRLSDQVRVIQRNRMLDDSVLDRLRMEMCGHVITPPSQTVAPPQSQISSHADEASNDRVTNVSTQCNEALRSALECAIREYRYIPPELRPRLPRLPMHNKNRALVAALDSQLSNYFDDCEDLTDTHSIMYCAAVAACRVAHVKMTNDRVTRPKPAVPAWQCRIEHRIGGARALIGKLICFREGNTRPRVMLFVRRAFSGTDISPGDYMSRVTERIDFLKQKVYAWANRIRRYRRRVERYTQNRTFRSNERWVYRVWEQPDQGVTDTRLPDDNAMCSFWRNIWSVPVSHTEGDWIREVERACDPLPEMGAITISPQDVARAVRPLPNWKSPGPDGLHNFWIKWPQRSHARLASQYQSALESGSLPKFLTTGVTHLLHKSGSTAEPKNYRPITCLLTVYKVLTSILRAKINNHINSSNIMSVSQNGCRNGSRGTKELLLIDMAISQQVRRSRKDLSTCWIDYKKAYDSVPHTWLRRVLELYKIDTMLRTFLMSCMGQWRTVLRYPGCRNIQRNSEPVRIERGIFQGDSLSPLWFCLALNPLSTLLENSGLGYRLKRGGQVICHLLYMDDLKLFAPSNLQLMELLKVTETFSSAIRMEFGVDKCAVMHVKRGEIMESVGIQLSDSINLRSLSSTETYKYLGMSEALGINVTDMKQSLKERFFGRLKKVFNSLLSGGNKVRASNGWVMPVLMYSFGVLKWTQTELDALDRRVRTLLTAYRMHHPRSSVMRLYIPRKCGGRGFLNAKTLHNREICSLREYFLAVDVGIHRDVVAVDKGLTPLSLANENWRKPAVLDTDDRRAVWQSKELHGRYFRALHGPDVDQLASVAWLRFGDLFGETEGFVCAIMDEVIMTNNYRRFIVKDGTVDICRACHRPGESIRHIVSGCSRLANGEYLHRHNLVARIIHQQLALKYSLVESEVPYYRYAPDPVLDNGNITLYWDRSIITDRTIVANKPDIVVVDRIERRAMIVDITVPHDENLVKAEKDKQIKYIDLAREVVDMWDVDSAIIVPIVVSANGLIATSLDQHLRRLSLGSWIKGLIQKAVLLDTARIVRRFLSLEP

SEQ ID NO: 12209 - protein, 1197 aa, Mamestra brassicae
MLTRSRARHLATHPSPSASSLSSASPPPEPSPTVSAVTPAVAVASSSSDEYFSPPTTPPPARRRRGRRPPDGLGPRGPPASDRVPAPGGSVQRMRWTQSINENVMRSYFGATEGGTNLTAYRGRMLSLFQVLEPAVNVSAQRLSDQVRVIQRNRMLDDSVLDRLRMEMCSHVITPPSQTVSPPQSQISSHADEESNDRVTNVSTQCNEELRSALECAIREYRYILPELRPRLPRLPMHNKNRALVAALDSQLSNYFDDCEDLTDTHSIMYCAAVAACRVAHVKMTNDRVTRPKPAVPAWQCRIERRIGGARALIGKLICFREGNTRPRVMRFVRRAFSGTDISPRDYMSRVTERIDFLKQKVYAWANRIRRYRRRVERYTQNRTFRSNERWVYRVWEQPDQGVTDTRLPDDDAMCSFWRNIWSVPVSHTEGGWIREVERACDPLPEMGAITISPQDVARALRPLPNWKSPGPDGLHNFWIKWLQRSHARLASQYQTALESGSLPEFLTTGVTHLLHKSGSTAEPKNYRPITCLPTVYKVLTSILRAKINNHFNSNNIMSVSQNGCRNGSRGTKELLLIDMAISQQVRRFRKDLSTCWIDYKKAYDSVPHTWLMRVLELYKIDTMLRTFLMSCMGQWRTVLRYPGCRNIQRNSEPVRIERGIFQGDSLSPLWFCLALNPLSTLLENSGLGYRLKRGGQVISHLLYMDDLKLFAPSNLQLMELLKVTETFSSAIRMEFGVDKCAVMHVKRGEIMESVGTQLSDSINLRSLSSTETYKYLGMSEALGINVTDMKQSLRERFFGRLKKVFNSLLSGGNKVRAFNGWVMPVLMHSFGVLKWTQTELDALDRRVRTLLTAYRMHHPRSSVMRLYIPRKCGGRGFLNAKTLHNREICSLREYFLAVDVGMHRDVVAVDKGLTPLSLANENWRKPAVLDTNDRRAVWQSKELHGRYFRALHGSDVDQLASVAWLRFGDLFGETEGFVCAIMDEVIMTNNYRRFIVKDGTVDICRACHRPGESIRHIVSGCSRLANGEYLHRHNLVARIIHQQLALKYSLVESEVPYYRYAPDPVLDNGNITLYWDRSIITDRTIVANKPDIVVVDRIERRAMIVDITVPHDENLVKAEKDKQIKYIDLAREVVDMWDVDSAIIVPIVVSANGLIATSLDQHLRRLSLGSWIKGLIQKAVLLDTARIVRRFLSLEP

SEQ ID NO: 12210 - protein, 1197 aa, Mamestra brassicae
MLTRSRARHLATHPSPSASSLSSASPPPEPSPTVSAVTPAVAVASSSSDEYFSPPTTPPPARRRRGRRPPDGLGPRGPPASDRVPAPGGSVQRMRWTQSINENVMRSYFGATEGGTNLTAYRGRMLSLFQVLEPAVNVSAQRLSDQVRVIQRNRMLDDSVLDRLRMEMCGHVITPPSQTVAPPQSQISSHADEASNDRVTNVSTQCNEELRSTLECAIREYRYIPPELRPRLPRLPMHNKNRALVAALDSQLSNYFDDCEDLTDTHSIMYCAAVAACRVAHVKMTNDRVTRPKPAVPAWQCRIERRIGGARALIGKLICFREGNTRPRVMRFVRRAFSGTDISPRDYMSRVTERIDFLKQKVYAWANRIRRYRRRVERYTQNRTFRSNERWVYRVWEQPDHGVTDTRLPDDDAMCSFWRNIWSVPVSHTEGDWIREVERTCDPLPEMGAITISPQDVARAVRPLPNWKSPGPDGLHNFWIKWLQRSHARLASQYQSALESGSLPKFLTTGVTHLLHKSGSTAEPKNYRPITCLPTVYKVLTSILRAKINNHINSSNIMSVSQNGCRNGSRGTKELLLIDMAISQQVRRSRKDLSTCWIDYKKAYDSVPHTWLRRVLELYKIDTMLRTFLMSCMGQWRTVLRYPGCRNIQRNSEPVRIERGIFQGDSLSPLWFCLALNPLSTLLENSGLGYRLKRGGQVISHLLYMDDLKLFAPSNLQLMELLKVTETFSSAIRMEFGVDKCAVMHVKRGEIMESVGIQLSDSINLRSLSSTETYKYLGMSEALGINVTDMKQSLKERFFGRLKKVFNSLLSGGNKVRAFNGWVMPVLMYSFGVLKWTQTELDALDRRVRTLLTAYRMHHPRSSVMRLYIPRKCGGRGFLNAKTLHNREICSLREYFLAVDVGIHRDVVAVDKGLTPLSLANENWRKPAVLDTDDRRAVWQSKELHGRYFRALHGPDVDQLASVAWLRFGDLFGETEGFVCAIMDEVIMTNNYRRFIVKDGTVDICRACHRPGESIRHIVSGCSRLANGEYLHRHNLVARIIHQQLALKYSLVESEVPYYRYAPDPVLDNGNITLYWDRSIITDRTIVANKPDIVVVDRIERRAMIVDITVPHDENLVKAEKDKQIKYIDLAREVVDMWDVDSAIIVPIVVSANGLIATSLDQHLRRLSLGSWIKGLIQKAVLLDTARIVRRFLSLEP

SEQ ID NO: 12211 - protein, 1096 aa, Mamestra brassicae
MRSYYGATEGGTNLTAYRGRMLSLFQVLEPAVNVSAQRLSDQVRVILRNRMLDDAVLDRLRLESRSGRVSPASPPAAVEIQSSISPRPNNVGEDDDDVAISVSTQCNERLRSALEDAFREYRSTPPELRPRLPRLPMHNKNRALVCALDSQLTNCFDSSEDLADTHSILYCAAAAACRVAHVKFLNSDRATRPAVPAWQCRIERRIGEARALIGKLICFREGNTRRRVMRFVRRAFSGTDTSPRDYLTRVTERIDFLKQKIYAWANRIRRYKRRVERYTQNRTFQSNERWVYRAWERPDQGVTDTRLPDDDVMCSFWRNIWSVPVSHTEGDWIREVERACDPILEMGAITISPQDVARAVRPLPNWKSPGPDGLHNFWIKWFTGSHVRLASQFQSALESGSLPQFLTTGITHLLHKSGSTAEPKNYRPITCLPTVYKVLTSILRAKINHHIESNSIMSASQNGCRNGSRGTKELLLMDIAISQQVRRSRKDLSTCWIDYKKAYDSVPHTWLMRVLELYKVDAVLRTFLMSCMGQWRTVLRYPGCRQIQVNSDPIRIERGIFQGDSLSPLWFCLALNPLSTLLEGSGQGYRLRRGGQVISHLLYMDDLKLFAPNNLQLMELLKVTETFSSAISMEFGVDKCAVMHVKRGEIMESVGTQLSDSIHLRSLSSTETYKYLGMSEALGINANDMKQSLKERFFGRLNKVLNSLLSGGNKVRAFNGWVMPVLMYSFGILKWTQTELDALDRRVRSLLTANRMHHPRSSVMRLYIPRKCGGRGFLNAKTLHNREICSLREFFLEADVGMHRDVVAVDKGLTALSLANENWRKPVILDTNDRREVWQSKELHGRFYRVLHGPDVDFLASVAWLRFGDLFGETEGFVCAIMDEVMMTNNYRKYIVKDGTVDICRACHRPGESIRHIISGCPSLANGDYLHRHNLVARIIHQQLALKYNLVESEVPYYRYVPDPVLENGNCTLYWDRSIITDRTIVANKPDIVVIDRLERRAMIVDIAVPHDENLVKTEKDKQTKYLDLAREVVDMWDVTTAVIVPIVVTANGIIAKSLDQHLKRLSLGSWIKGLIQKAVLLDTARIVRRFLSQGP

SEQ ID NO: 12212 - protein, 1197 aa, Mamestra brassicae
MLTRSRARHLATHPSPSASSLSSASPPPEPSPTVSAVTPAVAVASSSSDEYFSPPTTPPPARRRRGRRPLDGLGPRGPPASDRVPAPGGSVQRMRWTQSINESVMRSYFGATEGGTNLTAYRGRMLSLFQVLEPAVNVSAQRLSDQVRVIQRNRMLDDSVLDRLRMEMCGHVITPPLQTVSPPQSQISSHADEESNDRVTNVSTQCNEELRSALECAIREYRYIPPELRPRLPRLPMHNKNRALVAALDSQLSNYFDDCEDLTDTHSIMYCAAVAACRVAHVKMTNDRVTRPKPAVPAWQCRIERRIGGARALIGKLICFREGNTRPRVMRFVRRAFSGTDISPRDYMSRVTERIDFLKQKVYAWANRIRRYRRRVERYTQNRTFRSNERWVYRVWEQPDQGVTDTRLPDDDAMCSFWRNIWSVPVSHTEGGWIREVERACDPLPEMGAITISPQDVARALRPLPNWKSPGPDGLHNFWIKWLQRSHARLASQYQTALESGSLSEFLTTGVTHLLHKSGSTAEPKNYRPITCLPTVYKVLTSILRAKINNHINSNNIMSVSQNGCRNGSRGTMELLLIDMAISQQVRRFRKDLSTCWIDYKKAYDSVPHTWLMRVLELYKIDTMLRTFLMSCMGHWRTVLRYPGCRNIQRNSEPVRIERGIFQGDSLSPLWFCLALNPLSTLLENSGLGYRLKRGGQVISHLLYMDDLKLFAPSNLQLMELLKVTETFSSAIRMEFGVDKCAVMHVKRGEIMESVGTQLSDSINLSSLSSTETYKYLGMSEALGINVTDMKQSLKERFFGRLKKVFNSLLSGGNKVRAFNGWVMPVLMHSFGVLKWTQTELDALDRRVRTLLTAYRMHHPRSSVMRLYIPRKCGGRGFLNAKTLHNREICSLREYFLAVDVGMHRDVVTVDKGLTPLSLANENWRKPAVLDTNDSRAVWQSKELHGRFFRALHGPDVDQLASVAWLRFGDLFGETEGFVCAIMDEVIMTNNYRRFIVKDGTVDICRACHRPGESIRHIVSGCSRLANGEYLHRHNLVARIIHQQLALKYSLVESEVPYYRYAPDPVLDNGNITLYWDRSIITDRTIVANKPDIVVVDRIERRAMIVDITVPHDENLVKAEKDKQIKYIDLAREVVDMWDVDSAIIVPIVVSANGLIATSLDQHLRRLSLGSWIKGLIQKAVLLDTARIVRRFLSLEP

SEQ ID NO: 12213 - protein, 1161 aa, Noctua fimbriata
MRWTQSINENVMRSYYGATEGGNNLTAYRVRMLSLFQVLEPAVNVSAQRLSDQVRVIQRNRMLDDTVLDRLRTETQSSHVITPSAQAVVLPQSSTIPNRDNDDVSNDMVTNVSTQCNEEMRSALEGAIREYRFMQPDLRPRIPRLPMHNKNRALVAVLDSQLSNYFDKNRALVAVLDSQLSNYFDNCESRTATSALFLLCMGKRGMRGLRSGCMNRYSRIAPSKALTDAHSILYCAAVAACRIAHVKFSDDRATRPKPAVPPWQYRIERRIGGARALIGKLICFREGNTRPRVMRFVRRAFSGTDISPRDYMSRITERIDFLKQKVYAWASRIRRYKRRVDRYTQNRTFLRDERWVYRTWERPDQGVADTRIPDDDAMCSFWRSIWSVPVSHTEGEWTREVERACDLVPEMGAITISPQDVVRAVRPLPNWKSPGPDGLHNFWIKWFTRSHARLAILFQSALESGSLPEFLTTGITHLLHKSGSTAEPKNYRPITCLPTVYKVLTSILRAKINKHIDDNSIMSASQNGCRNGSRGTKELLLIDMAISQQVRRSRSDLSTCWIDYKKAYDSVPHTWLMRVLELYKVDATLRTFLMSCMGQWRTVLRYPGCRQIQRNSEPIRIERGIFQGDSLSPLWFCLALNPLSTLLEDSGLGYRLRRGGQVISHLLYMDDLKLFAPNDLQLMELLKVTETFSSAIRMEFGVDKCAVMHVKRGQIVESVGTQLSDSINLRSLSATETYKYLGMSEALGINVADMKQSLKERFFGRLKKVFNSLLSGGNKVRAFNGWVMPVLMYSFGILKWTQTELDALDRRVRTLLTAYRMHHPRSSVMRLYIPRKCGGRGFLNAKTLHNREICSLREYFLETDVGMHRDVVAVDKGLTPLSLAKENWRKPLVLDTNDRMEVWQSKELHGRFFRALHGPDVDLSASVAWLRSGDLFGETEGFVCAIMDEVMMTNNYRRFIVKDGTVDICRACHRPGESIRHIISGCSRLANGEYLHRHNLVARIIHQQLALKYNLVESEVPYYKYVPDPVLENGSITLYWDQSIITDRTIVANKPDIVVVDRSERRTMIVDITVPHDENLVKAEKDKKIKYLDLAREVVDMWDVDSAIIVPIVVSAHGLIAKSLDQYLRRLSLGSWIKGLIQKAVLLDTARIVRRFLSLEP

SEQ ID NO: 12214 - protein, 1197 aa, Noctua fimbriata
MLTRAAAKRARLSPPDPSLSYASPPPESSPVVSAVTPAVAVASSSSDEYFSPPTTPPPVRRRGGRRPPDGLGPRGPPASDRVPAPGGSVQRMRWTQSINENVMRSYYGATEGGNNLTAYRVRMLSLFQVLEPAVNVSAQRLSDQVRVIQRNRMLDDTVLDRLRTETQSSHVITPSAQAVVLPQSSTIPNRDNDVSNDMVTNVSTQCNEEMRSALEGAIREYRFMQPDLRPRIPRLPMHNKNRALVAVLDSQLSNYFDNCEDLTDAHSILYCAAVAACRIAHVKFSDDRATRPKPAVPPWQYRIERRIGGARALIGKLICFREGNTRPRVMRFVRRAFSGTDISPRDYMSRITERIDFLKQKVYAWASRIRRYKRRVDRYTQNRTFQRDERWVYRTWERPDQGVADTRIPDDDAMCSFWRSIWSVPVSHTEGEWTREVERACDLVPEMGAITISPQDVVRAVRPLPNWKSPGPDGLHNFWIKWFTRSHARLAILFQSALESGSLPEFLTTGITHLLHKSGSTAEPKNYRPITCLPTVYKVLTSILRAKINKHIDDNSIMSASQNGCRNGSRGTKELLLIDMAISQQVRRSRRDLSTCWIDYKKAYDSVPHTWLMRVLELYKVDATLRTFLMSCMGQWRTVLRYPRCWQIQRNSEPIRIERGIFQGDSLSPLWFCLALNPLSTLLEDSGLGYQLRRGGQVISHLLYMDDLKLFAPNDLQLMELLKVTETFSSAIRMEFGVDKCAVMHVKRGEIVESVGTQLSDSINLRSLSTTETYKYLGMSEALGINVADMKQSLKERFFGRLKKVFNSLLSGGNKVRAFNGWVMPVLMYSFGILKWTQTELDALDRRVRTLLTAYRMHHPRSSVMRLYIPRKCGGRGFLNAKTLHNREICSLREYFLETDVGMHRDVVAMDKGLTPLSLAKENWRKPLVLDTNDRMEVWRSIELHGRFFRALHGPDVDLSASVAWLRSGDLFGETEGFVCAIMDEVMMTNNYRRFIVKDGTVDICRACHRPGESIRHIISGCSRLANGEYLHRHNLVARIIHQQLALKYNLVESEVPYYKYVPDPVLENGSITLYWDQSIITDRTIVANKPDIVVVDRSERRTMIVDITVPHDENLVKAEKDKKIKYLDLAREVVDMWDVDSAIIVPIVVSAHGLIAKSLDQYLRRLSLGSWIKGLIQKAVLLDTARIVRRFLSLEP

SEQ ID NO: 12215 - protein, 961 aa, Noctua fimbriata
MHNKNRALVAVLDSQLSNYFDNCEDLTDAHSILYCAAVAACRVAHVKFFDDRATRPKPVVPPWQYRIERRIGGARALIGKLICFREGNTRPRVMRFVRRAFSGTDISPRDYMSRITERIDFLKQKVYAWASRIRRYKRRVDRYTQNRTFQRDERWVYRAWERPDQGVADTRIPDDDAMCSFWRSIWSVPVSHTEGEWTREVERACDLVPEMGAITISPQDVVRAVRPLPNWKSPGPDGLHNFWIKWFTRSHARLAILFQSALESGSLPEFLTIGITHLLHKSGSTAEPKNYRPITCLPTVYKVLTSILRAKINKHIDDNSIMSASQNGCRNGSRGTKELLLIDMAISQQVRRSRRDLSTCWIDYKKAYDSVPHTWLMRVLELYKVDATLRTFLMSCMGQWRTVLRYPGCRQIQRNSEPIRIERGIFQGDSLSPLWFCLALNPLSTLLEDSGLGYRLRRGGQVISHLLYMDDLKLFAPNDLQLMELLKVTETFSSAIRMEFGVDKCAVMHVKRGEIVESVGTQLSDSINLRSLSATETYKYLGMSEALGINVADMKQSLKERFFGRLKKVFNSLLSGGNKVRAFNGWVMPVLMYSFGILKWTQTELDALDRRVRTLLTAYRMHHPRSSVMRLYIPRKCGGRGFLNAKTLHNREICSLREHFLETDVGMHRDVVAVDKGLTPLSLAKENWRKPVVFDTNYRMEVWQSKELHGRFFRALHGPDVDLSASVAWLRSGDLFGETEGFVCAIMDEVVMTNNYRRFIVKDGTVDICRACHRPGESIRHIISGCSRLANGEYLHRHNLVARIIHQQLALKYNLVELEVPYYKYVPDPVLENGSITLYWDQSIITDRTIVANKPDIVVVDRSERRTMIVDITVPHDENLVKAEKDKKIKYLDLAREVVDMWDVDSAIIVPIVVSAHGLIAKSLDQYLRRLSLGSWIKGLIQKAVLLDTARIVRRFLSLEP

SEQ ID NO: 12216 - protein, 1168 aa, Noctua fimbriata
MLTRAAAKRARLSPPDPSLSSASPPPESSPVVSAVTPAVAVASSSSDEYFSPPTTPPPVRRRGGRRPPDGLGPRGPPASDRVPAPGGSVQRMRWTQSINENVMRSYYGATEGGNNLTAYRVRMLSLFQVLEPAVNVSAQRLSDQVRVIQRNRMLDDTVLDRLRTETQRSHVITPSAQAVVLPQSSTIPNRDNDVSNDMVTNVSTQCNEEMRSALEGAIREYRFMQPDLRPRIPRLPMHNKNRALVAVLDSQLSNYFHNCEDLTDAHSILYCAAVAACRVAHVKFSDDRATRPKPAVPPWQYRIERRIGGARALIGKLICFREGNTRPRVMRFVRRAFSGTDISPRDYMSRITERIDFLKQKVYAWASRIRRYKRRVDRYTQNRTFQRDERWVYRTWERPDQGVADTRIPDDDAMCSFWRSIWSVPVSHTEGEWTREVERACDLVPEMGAITISPQDVVRAVRPLPNWKSPGPDGLHNFWIKWFTRSHARLAILFQSALESGSLPEFLTTGITHLLHKSGSTAEPKNYRPITCLPTVYKVLTSILRAKINKHIDDNSIMSASQNGCRNGSRGTKELLLIDMAISQQVRRSRRDLSTCWIDYKKAYDSVPHTWLMRVLELYKVDATLRTFLMSCMGQWRTVLRYPGCRQIQRNSEPIRIERGIFQGDSLSPLWFCLALNPLSTLLEDSGLGYQLRRGGQVISHLLYMDDLKLFAPNDLQLMELLKVTETFSSAIRMEFGVDKCAVMHVKRGEIVESVGTQLSDSINLRSLSATETYKYLGMSEALGINVADMKQSLKERFFGRLKKVFNSLLSGGNKVRAFNGWVMPVLMYSFGILKWTQTELDALDRRVRTLLTAYRMHHPRSSVMRLYIPRKCGGRGFLNAKTLHNREICSLREYFLETDLGMHRDVVAMDKGLTPLSLAKENWRKPLVLDTNDRMEVWQSKELHGRFFRALHGPDVDLSASVAWLRSGDLFGETEGFVCAIMDEVMMTNNYRRFIVKDGTVDICRACHRPGESIRHIISGCSRLANGEYLHRHNLVARIIHQQLALKYNLVESEVPYYKYVPDPVLENGSITLYWDQSIITDRTIVANKPDIVVVDRSERRTMIVDITVPHDENLVKAEKDKKIKYLDLAREVVDMWDVDSAIIVPIVVSAHGLIAKSLDQYLRRLS

SEQ ID NO: 12217 - protein, 1199 aa, Atethmia centrago
MLTRAAAARRTRLPPPDSSLSSASPPPVPSPTVSAVTTPAAVVASSSSDEYFSPPTTPPPVRRRGGRRPPDGLGPRGPPASDRVPAPGGSVQRMRWTRSINENVMRSYYGATEGGNNLTAYRVRMLSLFQVLEPAVNVSAQRLSDQVRVIQRNHMLDDTVLERLRSEIQSSHVIAPPSQTVVVLPQLDTHQADEGSDDRATNVSTQCNVELRSALEDAIREYRFMSPEVRPRLPRLPMHKKNRALVAVLDSQLSNYFDDCEDLTDTHSILYCAAIAVCRVAHVIFPNDSRATRPKPTVPIWQCRIERRIGGARALIGKLICFREGNTRPRVMRFVRRAFSGTDISPQDYISRVTERIDFLKQKVYAWANRIRRYKRRVDRYTQNRTFQSDERWIYRGWEQQDQGVTDTRLPDDDVMCSFWRSIWSVPVSHTEGDWARKVERACDPLPEMGAITICPQDVARAVRPLPNWKSPGPDGLHNFWLKWFLGSHARLAAQYQTALESGSLPQFLTIGVTHLLHKSGSTAEPKNYRPITCLPTVYKVLTSILRAKINKHIDTNSIMSASQNGCRNGFRGTKELLLIDMTISQQVRRFRKDLSTCWIDYKKAYDSVPHTWLMRVLELYKVNATLRTFLMSCMGQWRTVLRYPGCRNIQRNSEPIRIERGIFQGDSLSPLWFCLALNPLSTLLEDSGLGYRLRRGGQVISHLLYMDDLKLFASNNLQLMELLKITETFSSAIRMEFGVDKCAVMHVKRGGIVESVGTQLSDSINLRALSASETYKYLGMSEALGINVTDMKQSLKQRFFDRLKKVFNSLLSGGNKVRAFNGWVMPVLMYSFGILKWTQTELDALDRRVRTLLTAYRMHHPRSSVMRLYIPRKCGGRGFLNAKTLHNREVCSLREYFLEADVGMHRDVVAVDKGLTPLSLAKENWRKLVVLDTNDRREVWQSKELHGRFFRALHEPDVDFQASVAWLRFGDLFGETEGFVCEIMDEVIMTKNYRRFIVKDGTVDMCRACHRPGESIRHIISGCSRLANEEYLHRHNLVARIIHQQLALKYSLVESEVPYYRYVPNPVLDNGNITLYWDRSIITDRTIVANKPDIVVVDRTERRAMIVDITVPHDGNLVKAEKDKQIKYLDLAREVVDMWDVDSAIIVPIVVSANGLIAKSLDQHLRRLTLDGWIKGLIQKAVLLDTARIVRRFLSLEP

SEQ ID NO: 12218 - protein, 1199 aa, Atethmia centrago
MLTRAAAARRARLPPPDSSLSSASPPPVPSPTVSAVTTPAAVVASSSSDEYFSPPTTPPPVRRRGGRRPPDGLGPRGPPASDRVPAPGGSVQRMRWTRSINENVMRSYYGATEGGNNLTAYRVRMLSLFQVLEPAVNVSAQRLSDQVRVIQRNHMLDDTVLERLRSEIQSSHVIAPPSQTVVVLPQLDTHQADEGSDDRATNVSTQCNVELRSALEDAIREYRFMSPEVRPRLPRLPMHKKNRALVAVLDSQLSNYFDDCEDLTDTHSILYCAAVAVCRVAHVIFPNDSRATRPKPTVPIWQCRIERRIGGARALIRKLICFREGNTRPRVMRFVRRAFSGTDISPQDYMSRLTERIDFLKQKVYAWANRIRRYKRRVDRYTQNRTFQSDERWVYRGWEQRDQGVTDTRLPDDDVMCSFWRSIWSVPVSHTEGDWARKVERACDPLPEMGAITICPQDVARAVRPLPNWKSPGPDGLHNFWLKWFLGSHARLAAQYQTALESGSLPQFLTIGVTHLLHKSGSTAEPKNYRPITCLPTVYKVLTSILRAKINKRIDTNSIMSASQNGCRNGSRGTKELLLIDMTISQQVRRFRKDLSTCWIDYKKAYDSVPHTWLMRVLELYKVDATLRTFLMSCMGQWRTVLRYPGCRNIQRTSEPIRIERGIFQGDSLSPLWFCLALNPLSTLLEDSGLGYRLRRGGQVISHLLYMDDLKLFASNNLQLMERLKITETFSSAIRMEFGVDKCAVMHVKRGEIVESVGTQLSDSINLRALSASETYKYLGMSEALGINVTDMKQSLKQRFFDRLKKVFNSLLSGGNKVRAFNGWVMPVLMYSFGILKWTQTELDALDRRVRTLLTAYRMHHPRSSVMRLYIPRKCGGRGFLNAKTLHNHEVCSLREYFLEADVGMHRDVVAVDKGLTPLSLAKENWRKLVVLDTNDRREVWQSKELHGRFFRALHEPDVDFQASVAWLRFGDLFGETEGFVCAIMDEVIMTKNYRRFIVKDGTVDMCRACHRPGESIRHIISGCSRLANEEYLHRHNLVARIIHQQLCLKYSLVESEVPYYRYVPDPVLDNGNITLYWDRSIITDRTIVANKPDIVVVDRTERRAMIVDITVPHDGNLVKAEKDKQIKYLDLAREVVDMWDVDSAIIVPIVVSANGFIAKSLDQHLRRLTLDGWIKGLIQKAVLLDTARIVRRFLSLEP

SEQ ID NO: 12219 - protein, 1198 aa, Atethmia centrago
MLTRSAAVRARLPPPDSSLSSASPPPVPSPTVCAVTTPTAAVASSSSDEYFSPPTTPPPVRRRGGRRPPDGLGSRGPPASDRVPAPGGSVKRMRWTQSVNENVMRSYYGATEGGNNLTAYRVRMLSLFQVLEPAVNVSAQRLSDQVRVIQRNHMLDDTVLDRLRSEMQRSHVIVPPSQTVVHSPQLSTNQADEGSDDRATNVSTQCNVELRSALEDAIREYRLMSPELRPRLPRLPMHKKNRALVAALDSQLSNYFDDCEDLTDTHSILYCAAVAVCRVAHVKFAKDSRTTRPKPTVPAWQCRIESRIGGARALIGKLICFREGNTRPRVMRFVRRAFSGTDIGPQDYMTRVTERIDFLKQKVYAWANRIRRYKRRVERYTQNRTFQSDERWVYRGWERPHQDVTDTRLPDDDVMCSFWRSIWSVPVSHTEGDWARKVERACDPIPEMGAITICPQDVARAVRPLPNWKSPGPDGLHNFWLKWFLRSHARLAAQYQTALESGSLPQFLTTGVTHLLHKSGSTAEPKNYRPITCLPTVYKLLTSILRAKINKHIDTNSIMSASQNGCRNGSRGTKELLLIDMTISQQVRRSRKDLSTCWIDYKKAYDSVPHTWLMRVLELYKVDATLRTFLISCMGQWRTVLRYPGCRNIQRNSEPIRIERGIFQGDSLSPLWFCLALNPLSTLLEDSGLGYRMRRGGQVISHLLYMDDLKLFASNNLQLMELLKITESFSSAIRMEFGVDKCAVMHVKRGKIVESVGTQLSDSINLRTLSASETYKYLRMSEALGINVTDMKQSLKERFFGRLKKVFNSLLSGGNKVRAFNGWVMPVLMYSFGILKWTQTELDALDRRVRTLLTAYRMHHPRSSVMRLYIPRKCGGRGFLNAKTLHNREVCSLREYFLEADVGMHRDVVAVDKGLTPLSLAKENWRKLVVLDTNDRREVWQSKELHGRFFRALHEPDVDFQASVAWLRFSDLFGETEGFVCAIMDEVIMTKNYRRFIVKDGTVDVCRACHRPGESIRHIISGCSRLANEEYLHRHNLVARIIHQQLALKYSLVESEVPYYRYVPDPVLDNGNITLYWDRSIITDRTIVANKPDIVVVDRTERRAMIVDITVPHDGNLVKAEKDKQIKYLDLAREVVDMWDVDSAIIVPIVVSANGLIAKSLDQHLKRLTLDGWIKGLIQKAVLLDTARIVRRFLSLEP

SEQ ID NO: 12220 - protein, 1198 aa, Mesoligia furuncula
MLTRSALRKARLPPPDSSLSSASPPPVPSLTVSAVTTPAAAVASSSSDEYFSPPTTPPPARRRGGRRPPDGLGPRGPPASDRVPAPGGSVQRMRWTQSINENVMRSYYGATEGGNNLTAYRVRMLSLFQVLEPAVNVSAQRLSDQVRVIQRNHMLDDTVLDRLRNEMQSSHVIAPQSQTAVVLPQSNTSHADEGSNDRATNVSTQCNEELRSTLEDAIQEYRFMSPELRPRLPRLPMHNKNRALVAVLDSQLSNYFDGCEDLTDTHSILYCAAVAACRVAHVKFANDSRATRPKPAVPAWQCRIERRIGEARALIGKLTCFREGNTRPRVMRFVRRAFLGTDISPQDYMSCVTERIDFLKQKVYAWANRIRRYKRRVERYTQNRTFQSDQRWVYRNWERPDQSVTDACLPDDDAMCSFWRSIWSVPVSHTESDWTREVERACDPIPEMGAITICPQDVARAVRPLPNWKSPGPDGLHNFWIKWFTRSHARLASQFQTALESGSLPQFLTTGITHLLHKSGSTAEPKNYRPITCLPTVYKVLTSILRVKIDKHINTNSIMSASQNGCRNGSRGTKELLLIDTTISQQVRRFRKDLSTCWIDYKKAYDSVPHTWLMRVLGLYKVDTTLRTFLMSCMGQWRTVLRYPGCRNIQRNSEPIRIERGIFQGDSLSPLWFCLALNPLSTLLEDSGLGYRLRRGGQVISHLLYMDDLKLFAPNNLQLMELLKITETFSSAIRMEFGVDKCAVMHVKRGEIVESVGTQLSDSTNLRTLSASETYKYLGMSEALGINVTDMKQSLKERFFGRLKKVFNSLLSGGNKVRAFNGWVMPVLMYSFGILKWTQTELDALDRKVRTLLTANRMHHPRSSVMRLYIPRKCGGRGFLNAKTLHNREICSLREYFLETDVGMHRDVVAVDKGLTPLSLGKENWRKPVVLDTNDRMEVWQSKELHGRFFRALHGPDVDLLASVAWLRFGDLFGETEGFVCAIMDEVMMTNNYRRFIVKDGTVDICRACHRPGESIRHIISGCSRLANGEYLHRHNLVARIIHQQLALKYSLVESEVPYYRYVPDPVLENGNITLYWDRSIITDRTIIANKPDIVVVDRSERRAMIVDITVPHDENLVKAEKDKQIKYLDLAHEVVDMWDVDSAIIVPIVVTANGLIAKSLAQHLKRLSLGSWIKGLIQKAVLLDTARIVRRFLSLEP

SEQ ID NO: 12221 - protein, 1198 aa, Mesoligia furuncula
MLTRLAARRARLPPPDSSLSSASPLPVPSLTVSAVTTPAVAVASSSSDEYFSPPTTPPPARRRGGRRPPDGLGPRGPPASDRVPAPGGSVQRMRWTRSINENVMRSYYGATEGGNNLTAYRVRMLSLFQVLEPAVNVSAQRLSDQVRVIQRNHMLDDTVLDRLRNEMQSSHVIAPQPQTAVLLPQCNTNHADEGSNDRATNVSTQCNEELRSALEDAIREYRFMSPEHRPRLPRLPMHNKNRALVAALDSQLSNYFDDCEDLTDTHSILYCAAVAVCRVAHVKFANDSRATRPKPAIPAWQCRIERRIGGARALIGKLICFREGNTRPRVMRFVRRAFLGTDISPQDYMSCVTERIDFLKQKVYAWANRIRRYKRRVERYTQNRTFQSDERWVYRSWERPDQSVADTCLPDDEAMCCFWRNIWSVPVSHTEGDWAREVERACDPIPEMGAITICPQDVARAVRPLPNWKSPGPDGLHNFWIKWFLRSHARLASQFQTALESGSLPQFLTTGITHLLHKSGSTTEPKNYRPITCLPTVYKVLTSILRAKIDKHINTNSIMSVSQNGCKNGSRGTKELLLIDMAISQQVRRSRKDLSTCWIDYKKAYDSVPHTWLMRVLELYKIDATLRTFLMSCMGQWRTVLRYPGCRNIQRNSEPIRIERGIFQGDSLSPLWFCLALNPLSTLLEDSGLGYRLRRGGQVISHLLYMDDLKLFAPNNLQLMELLKVTQTFSSAIRMEFGVDKCAVMHVKRGEIVESVGTQLSDSTNLRALSASETYKYLGMSEALGINVTDMKQSLKERFFGRLKKVLNSLLSGGNKVRAFNGWVMPVLMYSFGILKWTQTELDALDRRVRTLLTANRMHHPRSSVMRLYIPRKCGGRGFLNAKTLHNREICSLREYFLETDVGMHRDVVAVDKGLTPLSLAKENWRKPVVLDTNDRMEVWQSKELHGRFFRALHGPDVDLLASVAWLRFGDLFGETEGFVCAIMDEVMMTNNYRRFIVKDGTVDICRACHRPGESIRHIISGCSRLANGEYLHRHNLVARIIHQQLALKYSLVESEVPYYRYVPDPVLENGNISLYWDRSIITDRTIVANKPDIVVVDRSERRAMIVDITVPHDENLVKAEKDKQIKYLDLAREVVDMWDVDSAIIVPIVVTANGLIAKSLDLHLRRLSLGSWIKGLIQKAVLLDTARIVRRFLSLEP

SEQ ID NO: 12222 - protein, 1199 aa, Spilarctia lutea
MLTRARWRAQLSPPDSSLRSALPSPEEAIEVPAGAEASSSSSSDEFFSPPTSPIPVRRQGRGRPPTSLGSRGPLTSNRAPAAGGDVRRMKWTHSINENVMRAYFRATELGTNLTAYRVRLVSLFQELEPAVNVSAQRLSDQVRAIQRCHLLDDAALERIRSDIRNSLTVPSSSHVLNVVTNSTPQVPQNDDISELVDSEIISVSTQYNDRIRSTLEDAIREYRYVNLNNRPRLSRLPIHKRNLALVSALDSLLPKYFSNSEDLSDTHSILYCAAIAVCRVAGVKFAEYTTTTRQENTLPAWQYRIERRIAEARTLIGKLMSFRSGNTRPRVMRFVKRAFLGTTISPQEYMSCVTERIDFLKQKVYAWANRIRRYRKRVDRYNQNRMFQRNEKWVYRKWENLSPCMSDGQVPDENATNSFWHNIWSVPVTHTEGDWYRDVERSCESLLPMEPISIDEEDVSCAVRSLPNWKAPGPDGLHNFWLKWFRSSHACLASQFQTALDSGSLPQFLTTGITHLLYKSGDAMDPKNFRPITCLPTLYKLLTSILRLKITTHINHNSILSISQNGCRSGTRGTKELLIIDMTISQQVRRNRKSLATCWIDYKKAFDSVPHTWLLKVLELYKIDTTLCTFLKVCMGQWRTALRYPGCRQSAMNDVLIKIERGIFQGDSLSPLWFCLALNPLSTLLEGSGLGYRLQKDDRVISHLLYMDDLKLLAPTKLQLTALLKVTENFSNSIKMEFGVDKCAVMYVKKGEIVESEGIELSDSTKLRSLSATETYKYLGFSQSLGIPESDMKQTLRERFFGRLKKVLKSLLSGGNKVRACNGWVMPVLMYSFGVLRWTQTELDAIDRRVRTLLTAFRMHHPRSSVMRLYIPRRLGGRGLLNIKTLHNREVYNLREYFLQTDVGVHRSVVTVDTGLTPLALAKENWRKPVILSTNDRREVWKGKVLHGRFYRALNGPDIDFKASTSWLRYSDLFGETEGFVCAIMDEVIMTNNYRKYILKDGTVDICRACHRPGESIRHIISGCSRLANGEYLHRHNQVARIVHQQLALKYNLVISEVPYYRYVPDPVLENGRATLYWDRSIITDRTIVANKPDIVVIDRLERRAMIVDIAVPHDENLVKVEKEKQIKYLDLSHEIVDMWNVDSVIIVPIVVSAHGLIAKSLDQHLKRLTLGGWIRGLIQKAVLLDTARIVRRFLSLEP

SEQ ID NO: 12223 - protein, 1199 aa, Spilarctia lutea
MLTRARRRAQLSPPDSSLRSALPSPEEAIEVPAGAEASSSSSSDEFFSPPTSPIPVRRQGRGRPPTSLGSRGPLTSNRAPAAGGDVRRMKWTHSINENVMRAYFRATELGTNLTAYRIRLVSLFQELEPAVNVSAQRLSDQVRAIQRCQLLDDAALERIRSDIRNSLTVPSSSHVLNVVTNSTPQVPQNDDISELVDSEIISVSTQYNDRIRSTLEDAIREYRYVNLNNRPRLSRLPIHKRNLALVSALDSLLPKYFSNSEDLSDTHSILYCAAIAVCRVAGVKFAEYTTTTRQENTLPAWQYRIERRIAEARTLIGKLMSFRSGNTRPRVMRFVKRAFLGTTISPQEYMSCVTERIDFLKQKVYAWANRIRRYRKRVDRYNQNRMFQRNEKWVYRKWENLSPCMSDGQVPDENATNSFWHNIWSVPVTHTEGDWYRDVERSCESLLPMEPISIDEEDVSCAVRSLPNWKAPGPDGLHNFWLKWFRSSHACLASQFQTALDSGSLPQFLTTGITHLLYKSGDAMDPKNFRPITCLPTLYKLLTSILRLKITTHINHNSILSISQNGCRSGTRGTKELLIIDMTISQQVRRNRKSLATCWIDYKKAFDSVPHTWLLKVLELYKIDTTLCTFLKVCMGQWRTALRYPGCRQSAMNDVLIKIERGIFQGDSLSPLWFCLALNPLSTLLESSGLGYRLQKDDRVISHLLFMDDLKLLAPTKLQLTALLKVTENFSNSIKMEFGVDKCAVMYVKKGEIVESEGIELSDSTKLRSLSATETYKYLGFSQSLGIPESDMKQTLRERFFSRLKKVLKSLLSGGNKVRACNGWVMPVLMYSFGVLRWTQTELDAIDRRVRTLLTAFRMHHPRSSVMRLYIPRRLGGRGLLNIKTLHNREVYNLREYFLQTDVGMHRSVVTVDTGLTPLALAKENWRKPVVLGTNDRREVWKGKVLHGRFYRALNGPDIDFKASTSWLRYSDLFGETEGFVCAIMDEVIMTNNYRKYILKDGTVDICRACHRPGESIRHIISGCSRLANGEYLHRHNQVARIVHQQLALKYNLVISEVPYYRYVPDPVLENGRATLYWDRSIITDRTIVANKPDIVVIDRLERRAMIVDIAVPHDENLVKVEKEKQIKYLDLSHEIVDMWNVDSVIIVPIVVSAHGLIAKSLDQHLKRLTLGGWIKGLIQKAVLLDTARIVRRFLSLEP

SEQ ID NO: 12224 - protein, 1111 aa, Spilarctia lutea
MKWTHSINENVMRAYFRATELGTNLTAYRVRLVSLFQELEPAVNVSAQRLSDQVRAIQRCHLLDDAALERIRSDIRNSLTVPSSSHVLNVVTNSTPQVPQNDDISELVDSEIISVSTQYNDRIRSTLEDAIREYRYVNLNNRPRLSRLPIHKRNLALVSALDSLLPKYFSNSEDLNDTHSILYCAAIAVCRVAGVKFAEYTTTTRQENTLPAWQYRIERRIAEARTLIGKLMSFRSGNTRPRVMRFVKRAFLGTTISPQEYMSCVTERIDFLKQKVYAWANRIRRYRKRVDWYNQNRMFQRNEKWVYRKWENLSPCMSDGQVPDENATNSFWGNIWSVPVTHTEGDWYRDVERSCESLLPMEPISIDEEDVSCAVRSLPNWKAPGPDGLHNFWLKWFRSSHACLASQFQTALDSGSLPQFLTTGITHLLYKSGDAMDPNNFRPITCLPTLYKLLTSILRLKITTHINHNSILSISQNGCRSGTRGTKELLIIDMTISQQVRRNRKSLATCWIDYKKAFDSVPHTWLLKVLELYKIDTTLCTFLKVCMGQWRTALRYPGCRQSAMNDVLIKIERGIFQGDSLSPLWFCLALNPLSTLLEGSGLGYRLQKDDRVISHLFYMDDLKLLAPTKLQLTALLKVTENFSNSIKMEFGVDKCAVMYVKKGEIVESEGIELSDSTKLRSLSATETYKYLGFSQSLGMPESDMKQTLRERFFSRLKKVLKSLLSGGNKVRACNGWVMPVLMYSFGVLRWTQTELDAIDRRVRTLLTAFRMHHPRSSVMRLYIPRRLGGRGLLNIKTLHNREVYNLREYFLQTDVGVHRSVVTVDTGLTPLALAKENWRKPVVLSTNDRREVWKGKVLHGRFYRALNGPDIDFKASTSWLRYSDLFGETEGFVCAIMDEVIMTNNYRKYILKDGTVDICRACHRPGESIRHIISGCSRLANGEYLHRHNQVARIVHQQLALKYNLVISEVPYYRYVPDPVLENGRATLYWDRSIITDRTIVANKPDIVVIDRLERRAMIVDIAVPHDENLVKVEKEKQIKYLDLSHEIVDMWNVDSVIIVPIVVSAHGLIAKSLDQHLKRLTLGGWIRGLIQKAVLLDTARIVRRFLSLEP

SEQ ID NO: 12225 - protein, 880 aa, Spilarctia lutea
MSFRSGNTRPRVMRFVKRAFLGTTISPQEYMSCVTERIDFLKQKVYAWANRIRRYRKRVDRYNQNRMFQRNEKWVYRKWENLSPCMSDGQVPDENATNSFWRNMWSVPVTHTEGDWYRDVERSCESLLPMEPISIDEEDVSCAVRSLPNWKAPGPDGLHNFWLKWFRSSHACLASQFQTALDSGSLPQFLTTGITHLLYKSGDAMDPKNFRPITCLPTLYKLLTSILRLKITTHINHNSILSISQNGCRSGTRGTKELLIIDMTISQQVRRNRKSLATCWIDYKKAFDSVPHTWLLKVLELYKIDTTLCTFLKVCMGQWRTALRYPGCRQSAMNDVLIKIERGIFQGDSLSPLWFCLALNPLSTLLEGSGLGYRLQKDDRVISHLFYMDDLKLLAPTKLQLTALLKVTENFSNSIKMEFGVDKCAVMYVKKGEIVESEGIELSDSTKLRSLSATETYKYLGFSQSLGMPESDMKQTLRERFFSRLKKVLKSLLSGGNKVRACNGWVMPVLMYSFGVLRWTQTELDAIDRRVRTLLTAFRMHHPRSSVMRLYIPRRLGGRGLLNIKTLHNREVYNLREYFLQTDVGVHRSVVTVDTGLTPLALAKENWRKPVVLSTNDRREVWKGKELHGRFYRALHGPDIDFKTSTSWLRYGDLFGETEGFVCAIMDEVIMTNNYRKYILKDGTVDICRACHRPGESIRHIISGCSRLANGEYLHRHNQVARIVHQQLALKYHLVNSEVPYYRYVPDPVLENGRATLYWDRSIITDRTIVANKPDIVVMDRLERRAIIIDIAVPHDENLVKVEKEKQIKYLDLSHEIVDMWNVDSVIIVPIVVSAHGLIAKSLDQHLKRLTLEGWIKGLIQKAVLLDTARIVRRFLSLEP

SEQ ID NO: 12226 - protein, 868 aa, Spilarctia lutea
MRFVKHAFSGTTISPGQYMSCVTERIDFLKQKVYAWANRIRRYRKRVDRYNQNRMFQRNEKWVYRKWEEPSPCVSDGQFPDDKATNTFWRGIWSVPVTHTEGDWCRDVERSCESIIPMEPLTISKDDVSCAARSLPNWKSPGPDGLHNFWLKWFRSSHACLASQYRAAVDSSSLPQFLTTDITHLLYKSGSAMDPKNFRPITCLRTIYKLLTSILRLKISTHINNNSIISVSQNGCRSGTRGTKELLIMDMTISQQVRRNRKSLATCWIDYKKAYDSVPHTWLLRVLELYKIDTTLCTFLRSCMGQWRTVLRYPGCRQTAVNDVLINIERGIFQGDSLSPLWFCLALNPLSTLLEGSELGYRLRKDDRAISHLLYMDDLKLLAPTKLQLTELLKVTENFSNSIKMGFGVDKCAVMYVKKGLIVESEGLELSDSIKLRSLSATESYKYLGFSQSLGIPELDMKQALRERFFGRLKKVLKSLLSGGNKVRAYNGWVMPVLMYSFGVLRWTQTELDALDRRVRTLLTAFRMHHPRSSVMRLYIPRKFGGRGLLNIKTLHNREIYNLREYFLHTDVGMHRSVVAVDSGLTPLALAKENWRKPVVLSTNDRREVWKGKELHGRFYRALHGPDIDFKTSTSWLRYGDLFGETEGFVCAIMDEVIMTNNYRKYILKDGTVDICRACHRPGESIRHIISGCSRLANGEYLHRHNQVARIVHQQLALKYHLVNSEVPYYRYVPDPVLENGRATLYWDRSIITDRTIVANKPDIVVIDRLERRAIIIDIAVPHDENLVKVEKEKQIKYLDLSHEIVDMWNVDSAIIVPIVVSAHGLIAKSLDQHLKRLTLEGWIKGLIQKAVLLDTARIVRRFLSLGP

SEQ ID NO: 12227 - protein, 1199 aa, Spilarctia lutea
MLTRARRRAQLPPPDSSLRSALPSPEEAIEVPAGAEASSSSSSDEFFSPPTSPIPVRRQGRGRPPTSLGSRGPLTSNRAPAAGGDVRRMKWTHSINENVMRAYFRATELGTNLTAYRVRLVSLFQELEPAVNVSAQRLSDQVRAIQRCHLLDDAALERIRSDIRNSLTVPSSSHVLNVVTNSTPQVPQNDDISELVDSEIISVSTQYNDRIRSTLKDAIREYRYVNLNNRPRLSRLPIHKRNLALVSALDSLLPKYFSNSEDLSDTHSILYCAAIAVCRVAGVKFAEYTTTTRQENTLPAWQYRIERRIAEARTLIGKLMSFRSGNTRPRVMRFVKRAFLGTTISPQEYMSCVTERIDFLKQKVYAWANRIRRYRKRVDRYNQNRMFQRNEKWVYRKWENLSPCMSDGQVPDENATNSFWRKMWSVPVTHTEGDWYRDVERSCESLLPMEPISIDEEDVSCAVRSLPNWKAPGPDGLHNFWLKWFRSSHACLASQFQTALDSGSLPQFLTTGITHLLYKSGDAMDPKNFRPITCLPTLYKLLTSILRLKITTHINHNSILSISQNGCRSGTRGTKELLIIDMTISQQVRRNRKSLATCWIDYKKAFDSVPHTWLLKVLELYKIDTTLCTFLKVCMGQWRTALRYPGCRQSAMNDVLIKIERGIFQGDSLSPLWFCLALNPLSTLLEGSGLGYRLQKDDRVISHLFYMDDLKLLAPTKLQLTALLKVTENFSNSIKMEFGVDKCAVMYVKKGEIVESEGIELSDSTKLRSLSATETYKYLGFSQSLGMPESDMKQTLRERFFSRLKKVLKSLLSGGNKVRACNGWVMPVLMYSFGVLRWTQTELDAIDRRVRTLLTAFRMHHPRSSVMRLYIPRRLGGRGLLNIKTLHNREVYNLREYFLQTDVGVHRSVVTVDTGLTPLALAKENWRKPVVLSTNDRREVWKGKELHGRFYRALHGPDIDFKTSTSWLRYGDLFGETEGFVCAIMDEVIMTNNYRKYILKDGTVDICRACHRPGESIRHIISGCSRLANGEYLHRHNQVARIVHQQLALKYHLVNSEVPYYRYVPDPVLENGRATLYWDRSIITDRTIVANKPDIVVIDRLERRAIIIDIAVPHDENLVKVEKEKQIKYLDLSHEIVDMWNLDSIIIVPIVVSAHGLIAKSLDQHLKRLTLEGWIKGLIQKAVLLGTARIVRRFLSLEP

SEQ ID NO: 12228 - protein, 1198 aa, Xestia c-nigrum
MLTRAAARRARLPPPDPSLSSASPPPEPSPIVSAVTPAVAVASSSSDEYFSPPTTPPPVRRRGGRRPPDGLGPRGPPASDRVPAPGGSVQRMRWTQSNNENVMRAYYGATEGGNNLTAYRVRMLSLFQVLEPAVNVSAQRLSDQVRVIQRNRMLDDTVLDRLRTEMHSSHVIATPPSQAVVPPQSTTITNRDDDVSSDMITNVGTQYSEDMRSALEGAIREYRFMTPELRPRLPRLPMHNKNRMLVAVLDSQLSNYFDNCEDLTDVHSVLYCAAVAACRVARVKFPDDRATRPKPAVPAWQYRIEQRVGGARALIGKLICFREGNTRPRVMRFVRRAFSGTDINPRDYMSRVTERIDFLKQKVYAWASRIRRYKRRVDRYTQNRTFQRDERWVYRAWERPDQGVADTRLPDDDAMCSFWRSIWSVPVSHAEGEWTRVVERACDPVPEMGAITISPQDVACAVRPLPNWKSPGPDGLHNFWIKWFTRSHARLATLFQSALESGSLPEFLTTGITHLLHKSGSTAEPKNYRPITCLPTVYKVLTSILRAKITKHIDENSVMSASQNGCRNGSRGTKELLLIDMAISQQVRRSRKDLSTCWIDYKKAYDSVPHTWLMRVLELYKVDATLRTFLMSCMGQWRTVLRYPGCRQIQRNSEPIRIERGIFQGDSLSPLWFCLALNPLSTLLEDSGLGYQLRKDGQVISHLLYMDDLKLFATNDFQLMELLKVTETFSSAIRMEFGVDKCAVMHVKRGEIVESVGTQLSDSINLRSLSATETYKYLGMSEALGINVADMKQSLKERFFGRLKKVFNSLLSGGNKVRAFNGWVMPVLMYSFGILKWTQTELDALDTKVRKLLTAFRMHHPRSSVMRLYIPRKCGGRGFLNAKTLHNREICSLRDYFLEADVGMHRDVVAMDKGLTPLSLAKENWRKPIILTTDDRRKEWQGKELHGRFYRALHGPDVDFLASVSWLRSGDLFGETEGFVCAIMDEVMMTNNYRRFIVKDGTVDICRACHRPGESIRHIISGCSRLANGEYLHRHNLVARIIHQQLALKYNLVESEVPYYRYVPDPVLVNGSITLYWDQSIITDRTVIANRPDIVVMDRSERRAMIVDIAVPHDENLVKAEKDKQIKYLDLAREVVDMWEVDSAIIVPIVVSAHGLIAKSLDQHLTRLSLGSWIKGLIQKAVLLDTARIVRRFLSLEP

SEQ ID NO: 12229 - protein, 1198 aa, Griposia aprilina
MLARSAARRARPPPPDSSLSSASLPPVSSPTVSAVTTPAAVVASSSSDEYFSPPTTPPPVRRRGGHRPPDGLGPRGPPASDRVPAPGGSVQRMRWTRSINENVMRSYYGATEGGNNLTAYRVRMLSLFQVLEPAVNVSAQRLSDQVRVIQRNHMLDDTVLDRLRNEMQSSHVIAPPSQTVVVLPQSNTSQADEESDDRATNVSTQCNDELRSALEDAIREYRFISPELRPRLPRLPMHNKNRVLVAALDPQLSNYFDDCVDLTDTHSILYCAAVAACRVAHVKFANDSRATRPKPAVPAWQCRIERRIGGARALIGKLICFREGNTRPRVMRFVRRAFAGTNISPQDYMSCVTERIDFLKQKVYAWANRIRRYKRRVERYTQNRTFQRNERWVYRDWERPDQGVADTCLPDDDAMCSFWRNIWSVPVSHTEGDWAREVERACDPIPEMGAISICPQDVTRAVRPLPNWKSPGPDGLHNFWIKWFGRSHARLAAQYQVALESGSLPQFLTTGVTHLLHKSGSTAEPKNYRPITCLPTVYKVLTSILRAKINKHIDTNSIMSPSQNGCRNGSRGTKELLLIDMAISQQVRRSRKDLSTCWIDYKKAYDSVPHTWLVRVLELYKVDATLRTFLKSCMGQWRTVLHYPGCRHIQRNNEPIRIERGIFQGDSLSPLWFCLALNPLSTLLEDSGLGYRLRRGGQVISHLLYMDDLKLFAPNNLQLMELLKVTETFSSAIRMEFGVDKCAVMHVKRGEIVESVGTQLSDSINLRALSAFETYKYLGMSEALGINGTDMKQLLKERFFGRLKKVFNSLLSGGNKVRAFNGWVMPVLMYSFGILKWTQTELDALDRKVRTLLTANRMHHPRSSVMRLYIPRKCGGRGFLNAKTLHNREICSLREYFLEADVGMHRDVVTVDNGLTPLSLAKENWRKPVVLDTNDRMEVWQSKELHGRFFRALHGPDVDQLASVAWLRFGDLFGETEGFVCAIMDELILTNNYRRHIMKDGTVDVCRACHRPGESIRHIISGCSRLANEEYLHRHNLVARIIHQQLALKYSLVESEVPYYRYVPDPVLENGHITLYWDRSIITDRTIVANKPDIVMVDRLERRAMIVDITVPHDGNLVKAEKDKQIKYLDLAREVVDMWDVDSAIIVPIVVTANGLIAKSLDQHLRRLSLGSWIKGLIQKAVLLDTARIVRRFLSLEP

SEQ ID NO: 12230 - protein, 1198 aa, Griposia aprilina
MLTRSAARRARPPPPDSSLSSASLPPVSSPTVSAVTTPAAVVASSSSDEYFSPPTTPPPVRRRGGHRPPDGLGPRGPPASDRVPTPGGSVQRMRWTRSINENVMRSYYGATEGGNNLTVYRVRMLSLFQVLEPAVNVSAQRLSDQVRVIQRNHMLDDTVLDRLRNEMQSSHVIAPPSQTVVVLPQSNTSQADEESDDRATNVSTQCNDELRSALEDAIREYRFISPELRPRLPRLPMHNKNRVLVAALDAQLSNYFDDCVVLTDTHSILYCAAVAACRVAHVKFANDSRATRPKPAVPAWQCRIERRIGGARVLIGKLICFREGNTRPRVMRFVRRAFAGTNISPQDYMSCVTERIDFLKQKVYAWANRIRRYKRRVERYTQNRTFQRDERWVYRGWERPDQGVADTCLPDDDAMCSFWRNIWSVPVSHTEGDWTREVERACDPIPEMGAITICPEDVTRAVRPLPNWKSPGPDGLHNFWIKWFGRSHARLAAQCQVALESSSLPQFLTTGVTHLLHKSGSTAEPKNYRPIACLPTVYKVLTSILRDKINKHIDTNYIMSPSQNGCRNGSRGTKELLLIDMAISQQVRRSRKDLSTCWIDYKKAYDSVPHTWLMRVLELYKVVATLRTFLMSCMGQWRTVLHYPACRNTQRNSEPIRIERGIFQGDSLSPLWFCLALNPLSTLLEDSGLGYRLRRGGQVISHLLYMDDLKLFAPNNSQLMDLLKVTETFSSAIRMEFGVDKCAVMHVKRGEIVESVGTQLSDSINIRALSASETYKYLGMSEALGINGTDMKQSLKERFFGRLKKVCNSLLSGGNKVRAFNGWVMPVLMYSFGIPKWTQTELDALDRKVRTLLTANQMHHPRSSVMRLYIPRKCGGRGFLNAKILHNREICSLREYFLEADVGMHRDVVTVDKGLTPLSLAKENWRKPVVLDTNDRMEVWQSKELHGCFFRALHGPDVDQLASVAWLRFGDLFGETEGFVCAIMDEVMMTNNYRRFIVKDGTVEICRACHRPGESIRHIISGCSRLANEEYLHRHNLVARIIHQQLALKYSLVESEVPYYRYVPDPVLENGHITLYWDRSIITDRTVVANKPDIVMVDRLERRAMIVDITVPHDGNLVKAEKDKQIKYLDLAREVVDMWDVDSAIIVPIVVTANGLIAKSLDQHLRRLSLGSWIKGLIQKAVLLDTARIVRRFLSLEP

SEQ ID NO: 12231 - protein, 962 aa, Griposia aprilina
MHNKNRVLVAALDAQLSNYFDDCVDLTDTHSILYCAAVAACRVAHVKFANDSRATRPKPAVPAWQCRIERRIGEARALIGKLICFREGNTRPRVMRFVRRAFAGTNISPQDYISCVTERIDFLKQKVYAWANRIRRYKRRVERYTQNRTFQRDERWVYRGWERPDQGVADTCLPDDDAMCSFWRNIWSVPVSHTEGDWTREVERACDPIPEMGAITICPQDVTRAVRPLPNWKSPGPDGLHNFWIKWFGRSHARLAAQYQVALESGSLPQFLTTGVTHLLHKSGSTAEPKNYRPIACLPTVYKVLTSILRDKINKHIDTNYIMSPSQNGCRNGSRGTKELLLIDMAISQQVRRSRKDLSTCWIDYKKAYDSVPHTWLMRVLELYKVEATLRTFLMSCMGQWRTVLHYPACRNTQRNSEPIRIERGIFQGDSLSPLWFCLALNPLSTLLEDSGLGYRLRRGGQVISHLLYMDDLKLFAPNNSQLMDLLKVTETFSSAIRMEFGVDKCAVMHVKRGEIVESVGTQLSDSINLRALSASETYKYLGMSEALGINGTDMKQSLKDRFFGRLKKVFNSLLSGGNKVRAFNGWVMPVLMYSFGILKWTQTELDALDRKVRTLLTANRMHHPRSSVMRLYIPRKCGGRGFLNAKTLHNREICSLREYFLEADVGMHRDVVTVDKGLTPLSLAKENWRKPVVLDTNDRMEVWQSKELHGRIFRALHGPDVDQLASVAWLRFGDLFGETEGFVCAIMDEVMMTNNYRRFIVKDGTVDICRACHRPGESIRHIISGCSRLANEEYLHRHNLVARIIHQQLALKYSLVESEVPYYRYVPDPVLENGHITLYWDRSIITDRTIVANKPDIVMVDRLERRAMIVDITVPHDGNLVKAEKDKQIKYLDLAREVVDMWDVDSAIIVPIVVTANGLIAKSLDQHLRRLSLGSWIKGLIQKAVLLDTARIVRRFLSLEP

SEQ ID NO: 12232 - protein, 1075 aa, Griposia aprilina
MLSLFQVLEPAVNVSAQRLSDQVRVIQRNHMLDDTVLDRLRNEMQSSHVIAPPSQTVVVLPQSNTSQADEESDDRATNVSTQCNDELRSALEDAIREYRFISPELRPRLPRLPMHNKNRVLVAALDAQLSNYFDDCVDLTDTHSILYCAAVAACRVAHVKFANDSRATRPKPAVPAWQCRIERRIGEARALIGKLICFREGNTRPRVMRFVRRAFAGTNISPQDYMSCVTERIDFLKQKVYAWANRIRRYKRRVERYTQNRTFQRDERWVYRGWERPDQGVADTCLPDDDAMCSFWRNIWSVPVSHTEGDWTREVERACDPIPEMGAITICPQDVTRAVRPLPNWKSPGPDGLHNFWIKWFGRSHARLAAQYQVALESGSLPQFLTTGVTHLLHKSGSTAEPKNYRPIACLPTVYKVLTSILRDKINKHIDTNYIMSPSQNGCRNGSRGTKELLLIDMAISQQVRRSRKDLSTCWIDYKKAYDSVPHTWLMRVLELYKVEATLRTFLMSCMGQWRTVLHYPACRNTQRNSEPIRIERGIFQGDSLSPLWFCLALNPLSTLLEDSGLGYRLRRGGQVISHLLYMDDLKLFAPNNSQLMDLLKVTETFSSAIRMEFGVDKCAVMHVKRGEIVESVGTQLSDSINLRALSASETYKYLGMSEALGINGTDMKQSLKDRFFGRLKKVFNSLLSGGNKVRAFNGWVMPVLMYSFGILKWSQTELDALDRKVRTLLTANRMHHPRSSVMRLYIPRKCGGRGFLNAKTLHNREICSLREYFLEADVGMHRDVVTVDKGLTPLSLAKENWRKPVVLDTNDRMEVWQSKELHGRFFRALHGPDVDQLASVAWLRFGDLFGETEGFVCAIMDEVMMTNNYRRFIVKDGTVDICRACHRPGESIRHIISGCSRLANEEYLHRHNLVARIIHQQLALKYSLVESEVPYYRYVPDPVLENGHITLYWDRSIITDRTIVANKPDIVMVDRLERRAMIVDITVPHDGNLVKAEKDKQIKYLDLAREVVDMWDVDSAIIVPIVVTANGLIAKSLDQHLRRLSLGSWIKGLIQKAVLLDTARIVRRFLSLEP

SEQ ID NO: 12233 - protein, 1045 aa, Griposia aprilina
MLDDTVLDRLRNEMQSSHVIAPPSQTVVVLPQSNTSQADEESDDRATNVSTQCNDELRSALEDAIREYRFISPELRPRLPRLPMHNKNRVLVAALDAQLSNYFDDCVDLTDTHSILYCAAVAACRVAHVKFANDSRATRPKPAVPAWQCRIERRIGGARALIGKLICFREGNTRPRVMRFVRRAFAGTNISPQDYMSCITERIDFLKQKVYAWANRIRRYKRRVERYTQNRTFQRDERWVYRDWERPDQGVADTCLPDDDAMCSFWRNIWSVPVSHTEGDWAREVERACDPIPEMGAISICPQDVTRAVRPLPNWKSPGPDGLHNFWIKWFGRSHARLAAQYQVALESGSLPQFLTTGVTHLLHKSGSTAEPKNYRPITCLPTVYKVLTSILRAKVNKHIDTNSIMSPSQNGCRNGSRGTKELLLIDMAISQHVRRSRKDLSTCWIDYKKAYDSVPHTWLVRVLELYKVDATLRTFLKSCMGQWRTVLHYPGCRNIQRNNEPIRIERGIFHGDSLSPLWFCLALNPLSTLLEDSGLGYRLRRGGQVISHLLYMDDLKLFAPNNLQLMELLKVTETFSRAIRMEFGVDKCAVMHVKRGEIVESVGTQLSDSINLRALSAFETYKYLGMSEALGINGTDMKQLLKERFFGRLKKVFNSLLSGGNKVRAFNGWVMPVLMYSFGILKWTQTELDALDRKVRTLLTANRMHHPRSSVMRLYIPRKCGGRGFLIAKTLHNREICSLREYFLEADVGMHRDVFTVDKGLTPLSLAKENWRKPVMLDTNDRMEVWQSKELHGRFFRALHGPDVDQLASVAWLRFGDLFGETEGFVCAIMDEVILTNNYRRHIMKDGTVDVCRECHRPGESIRHIISGCSRLANEEYLHRHNLVARIIHQQLALKYSLVESEVPYYRYVPEPVLENGHITLYWDRSIITDRTIVANKPDIVMLDRLERRVMIVDITVPHDGNLVKAEKDKQIKYLDLAREVVDMWDVDSAIIVPIVVTANGLIAKSLDQHLRRLSLGSWIKGLIQKAVLLDTARIVRRFLSLEP

SEQ ID NO: 12234 - protein, 1189 aa, Griposia aprilina
MLTRSAARRARPPPPDSSLSSASLPPVSSPTVSAVTTPAAVVASSSSDEYFSPPTTPPPVRRRGGHRPPDGLGPRGPPASDRVPAPGGSVQRMRWTGSINENVMRSYYGATEGGNNLTAYRVRMLSLFQVLEPAVNVSAQRLSDQVRVIQRNHMLDDTVLDRLRNEMQSSHVIAPPSQTSQADEESDDRATNVSTQCNDELRSALEDAIREYRFISPELRPRLPRLPMHNKNRVLVAALDAQLSNYFDDCVDLTDTHSILYCAAVAACRVAHVKFANDSRATRPKPAVPAWQCRIERRIGEARALIGKLICFREGNTRPRVMRFVRRAFAGTNISPQDYMSCVTERIDFLKQKVYAWANRIRRYKRRVERYTQNRTFQRDERWVYRGWERPDQGVADTCLPDDDAMCSFWRNIWSVPVSHTEGDWTREVERACDPIPEMGAITICPQDVTRAVRPLPNWKSPGPDGLHNFWIKWFGRSHARLAAQYQVALQSGSLPQFLTTGVTHLLHKSGSTAEPKNYRSIACLPTVYKVLTSILRGNINKHIDTNYIMSPSQNGCRNGSRGTKELLLIDMAISQQVRRSRKDLSTCWIDYKKAYDSVPHTWLMRVLELYKVEATLRTFLMSCMGQWRTVLHYPACRNTQRNSEPIRIERGIFQGDSLSPLWFCLALNPLSTLLEDSGLGYRLRRGGQVISHLLYMDDLKLFAPNNSQLMDLLKVTETFSSAIRMEFGVDKCAVMHVKRGEIVESVGTQLSDSINLRALSASETYKYLGMSEALGINGTDMKQSLKERFFGRLKKVFNSLLSGGNKVRAFNGWVMPVLMYSFGILKWTQTELDALDRKVRTLLTANRMHHPRSSVMRLYIPRKCGGRGFLNAKTLHNREICSLREYFLEADVGMHRDVFTVDKGVTPLSLAKENWRKPVVLDTNDRMEVWQSKELYGRFFRALHGPDVDQLASVTWLRFGDLFGETEGFVCAIMDEVMMTNNYRRFIVKDGTVDICRACHRPGESIRHIISGCSRLANEEYLHRHNLVARIIHQQLALKYSLVESEVPYYRYVPDPVLENGHITLYWDRSIITDRTIVANKPDIVMVDRLERRAMIVDITVPHDGNLVKAEKDKQIKYLDLAREVVDMWDVDSAIIVPIVVTANGLIAKSLDQHLRRLSLGSWIKGLIQKAVLLDTARIVRRFLSLEP

SEQ ID NO: 12235 - protein, 1049 aa, Griposia aprilina
MTLHLIGYAWKCRVALLVILPPPQNFVHAPTVVPLRTNQQDEKEDTRAISADNLCNVELRSILEDAIREYRFTSSDLRPRLPRLPMNKKNRALVCALDALLPNLIENSADLCDTHSILYCTAVAACRIARVKFPNTDRTAQLKPAAPAWQCRIERRINEARVLIGKLTCFREGNTRPRVMRFVRQAFSGTNISPREYISCVTERIDFLKQKVYAWANRIRRYRRRVDRYTQNRMFQKDERWVYRAWERSIPTQGVTDVLPLDNDTVSAFWRSIWSVPVSHTEGDWMRVVEQACDSIPEMEAISISPLDVARAVRPLPNWKSPGPDGLHNFWIKWLQRSHACLASQFQSSLETRSLPLFFTTGVTHLLHKSGSTAEPKNYRPITCLPTVYKVLTSILRAKIAEHIKNNSIMSVSQNGCKNGFRGTKELLLIDMAISQQVRRSRKDLSTCWIDYKKAYDSVPHTWLIRVLELYKIDATLRTFLISCMGQWRTILLYPGCQQIQRTDEPIRIERGIFQGDSLSPLWFCLALNPLSTLLEDSGLGYRLRRGDQVISHLLYVDDLKLFAPNNLRLMELLKVTETFSSAIRMEFGVDKCAVMHVKRGGIMESVGTQLSDSIHLRSLSSTETYKYLGMSEALGINAADMKQSLRERFFGRLNKVLNSLLSGGNKVRAFNGWVMPVLMYTFGILKWTQTELDALDRKVRTLLTAYRMHHPRSSVMRLYIPRKCGGRGFLNAKTLHNREICSLREYFLQTDVGMHRDVVAVDKGLTPLSLAKENWRKPAVLDTNDRKEVWQGKELHGRFFRALHEPDVDILASVSWLRFGDLFGETEGFVCAIMDEVIMTNNYRKYIVKDGTVDICRACHRPGESIRHIVSGSSRLANGEYLHRHNLVARIIHQQLASQYNLVESEVPYYRYVPDPVLEKGHTTLYWDRSIITDRTIVANKHDIVVIDRRERRAMIVDIAVPHDENLVKAEKDKKIKYLDLAHEVVDMWGVDSAIIVPIIVSVNGLIAESLDQHLRRLSLRSWVKSLIQRAVLLDTARIVRMFLSLDP

SEQ ID NO: 12236 - protein, 925 aa, Griposia aprilina
MTPDDPNNNNNNNDSRATRPKPAVPAWQCRIERRIGGARALIGKLICFREGNTRPRVMRFVRRAFAGTDVSPQDYISCVTERIDFLKQKVYAWASRIRRYKRRVERYTQNRTFQRDERWVYRDWERPDQGVADTYLPDDDAMCSFWHNIWSVPVSHTEGDWTREVERACEPIPEMGAITICPQDVARAVRPLPNWKSPGPDGLHNFWIKWFLKSHARLAAQFQAALESGSLPQFLTTGVTHLLHKSGSIAEPKNYRPITCLPTVYKVLTSILRAKINKHIDTNSIMSASQNGCRNGSRGTKELLLINMAISQQVRRSRKDLSTCWIDYKKAYDSVPHTWLMRVLELYKVDATLRTFLKSCMGQWRTVLRYPTCRNTQRNSEPIRIERGIFQGDSLSPLWFCLALNPLSTLLEDSGLGYRLRRGGRVISHLLYMDDLKLFAPNNLQLIELLKVTETFSSAIRMEFGLDKCAVMHVKRGEIVESVGTQLSDSMNLRALSASETYKYLGMSEALGVNNTDMKQSLKERFFGRLKKVFNSLLSGGNKVRAFNGWVMPVLMYSFGILKWTQTELDTLDRRVRTLLTANRMHHPRSSVMRLYIPRKCGGRGFLNAKSLHNREICSLREYFLEADVGMHRDVVAVDKGLTPLSLAKENWRKPVVLDTNDRMEVWQSKELHGRFFRALHGPDVDVQASVAWLRFGDLFGETEGFVCAIMDEVMMTNNYRRFIVKDGTVDICRACHRPGESIRHIISGCSRLANEEYLHRHNLVARIIHQQLALKYSFVESEVPYYRYVPDPVLENGTITLYWDRSIITDRTIIANKPDIVLVDRRERRAMIVDITIPHDGNLVKAEKDKQIKYLDLAREVVDMWDVDSAIIVPIVVTANGLIAKSLDQHLRRLSLSSWIKGLIQKAVLLDTARIVRRFLSLEP

SEQ ID NO: 12237 - protein, 1209 aa, Omphaloscelis lunosa
MKTRRMLTRSATRRAHPPPPDSSLSSASPPSVPNPTVNVVTTPAAAVASSSSDEYFSPPTSPTPVRRQGRGRPPAGLGPRGQQAPNRVPAAGGNVSRIRWTQSMNENVMRAYYGATEGGINLTAYRSRMLNLFQVLEPAVNVSAQRLSDQVRVIQHNHRLDNATLDRLRLEMQNSFASNPPPSQNVVQAPAAVPLQANQYEEEEDGRAISADNLCNVELRSALEDAIREYRFTSPDLRPRLPRLPMNKRNRALVCALDALLPNFIESSANLCDTHSILYCTAVAACRIARVKFPNTDRSVRPKPVVPAWQCRIECRINEARVLIGKLICFREGNTRPRVMRFVRRAFSGTSISPREYVSHVTERIDFLKQKVYAWANRIRRYKRRVDRYTQNRMFQNDERWVYRTWERPTPNQGVTDTRLPDSDAMKAFWRSIWSVPVSHTEGEWMRVVEQACDPLPHMEAISITPLDVARAVRPLPNWKSPGPDGLHNFWLKWLQRSHTCLATQFQSSLDTGSLPMFFTTGVTHLFHKSGSTAEPKNYRPITCLPTIYKVLTSILRAKISHHINNNLIMSVSQNGCKNGSRGTKELLLIDMTISQQVRKSRKDLSTCWIDYKKAYDSVPHTWLMRVLELYKIDATLRTFLMSCMRQWRTVLLYPGCRQIRGIDEPIRIERGIFQGDSLSPLWFCLALNPLSTLLEDSGLGYRLRRGGQVISHLLYMDDLKLFAPNNLRLMELLKITETFSSAIRMEFGVDKCAVMHVKRGEIMESVGTQLSDSIHLRSLSSTETYKYLGMSEALGINVTDMKQSLKERFLGRLNKVLNSPLSGGNKVRAFNGWVMPVLMYSFGILKWTQTELDALDRKVRTLLTANRMHHPRSSVMRLYIPRKCGGRGFLNAKTLHNREIYSLREYFLQTNVGMHRDVVAVDKGLTPLSLAKENWRKPAVLDTNDRKEIWQGKELHGRFFRALHGPDVDFLTSVSWLRFGDLFGETEGFVCAIMDEVIMTNNYRKYIDKDGTVDICRACHHPGESIRHIVSGCSCLANGEYLHRHNLVARIIHQQLALQYNLVESEVPYYRYVPDPVLENGHTTLYWDRSIITDRTIVANKPDIVVIDRRERRAMIVDIAVPHDENLVKAEKDKKIKYLDLAHEVVDMWDVDSAIIVPIIVTVNGLIAKSLDQHLRRLSLRGWIKGLIQKAVLLDTARIVRRFLSLEP

SEQ ID NO: 12238 - protein, 1198 aa, Omphaloscelis lunosa
MLTRSAARRARLPPPDSPLSSASSPPVLSPTVNAVMTPAAAVASSSSDEYFSPPTTPPPARRRGRRRPPDGLGPRGPPASDRVPAPGGSVQRMRWTRSINENVMRSYYGATEGGNNLTAYRVRMLSLFQVLEPAVNVSAQRLSDQVRVIQRNHMLDDTVLDRLRSEMQSSHVIAPPVRSVIVPSQIITSQADERIDDRATNVSTQCNEELRSALEGAIHEYRFMSPELRPRLPRLPMHNKNRALVAALDSQLSNYFDDCEDLTDTHSILYCAAVAVCRVAHVKFSNDSRATRPKPAVPAWQCRIERRICGARTLIGKLICFREGNTRPRVMRFVRRAFLGTDISPQDYMTRVTERIDFLKQKVYAWANRIRRYKRRVERYTQNRTFQSDERWVYRAWERPNQGVTDTHLPDEDAMCSFWRSIWSVPVSHTEGDWTREVERACDSIPEMGAITICPQDVARAVRPLPNWKSPGPDGLHNFWIKWFVRSHARLAAQYQTALESGSLPQFLTTGVTHLLHKSGSTAEPKNYRPITCLPTVYKVLTSVLRAKINKHIDTNSIMSASQNGCRNGSRGTKELLLIDMAISQQVRRSRKDLSTCWIDYKKAYDSVPHTWLMRVLELYKVDITLRTFLMSCMGQWRTVLRYPGCRNIQRNSEPIRIERGIFQGDSLSPLWFCLALNPLSTLLEDSGLGYRLRRGGQVISHLLYMDDLKLFAPNNLQLMELLKVTETFSSAIRMEFGVDKCAVMHVKRGKIMESVGTQLSDSINLRALSASETYKYLGMSEALGINVTDMKQSLKERFFGRLKKVLNSLLSGGNKVRAFNGWVMPVLMYSFGILKWSQTELDALDRRVRTLLTAYRMHHPRSSVMRLYIPRKCGGRGFLNAKTLHNREICSLREYFLEADVGMHRDVVVVDKGLTPLSLAKENWRKPVVLDTKNRMEIWQSKELHGRYFRALHGPDVDLPASVAWLRCGDLFGETEGFVCAIMDEVMMTNNYRRFIVKDGTVDICRACHRPGESIRHIISGCSRLANEEYLHRHNLVARIIHQQLALKYSLVESEVPYYRYVPDPVLENGNITLYWDRSIITDRTIVANKPDIVVVDRGERSAMIIDITVPHDENLVKAEKDKQIKYLDLAREVVDMWDVDSAIIVPIVVTANGLIAKSLDQHLRRLSLGSWIKGLVQKAVLLDTARIVRRFLSLEP

SEQ ID NO: 12239 - protein, 1200 aa, Sesamia nonagrioides
MLTRSAARRARPPSPDSLLGSASPPPVSSPTVSAVTTPAAAVALSSSDEYFSPPTTPPPVRRRGGRRPPDRLGPRGPSASDRVPAPGGSVQRMRWTQSINENVMRSYYGATEGGNNLTAYRVRMLSLFQVLEPAVNVSAQRLSDQVRVIQRNHMLDDVVLDRLRLESRNSHVTPASSLVAVQLNSVSPRPNHVDEEDDDRAISVSPQCNEKLRSALEDAFREYRSIPLELRPRLPRLPMHKKNKALVCALDSQLSNYLKDSKDLNDTHSILYCGAVAICRVAHVKFPDNDRATRPKSAVPAWQCRIERRIGETRALIGKLISFREGNTRPRVMRFVRRAFSGTDTSTRDYLFRVTEHIDFFKQKIYAWANRIRRYRRRVERYSQNRNFQSDERRVYRAWERSDQGVTDTCLPDDDATCSFWRNIWSVPVSHTEGSWTRVVERACDPVPEMGAITICPQDVARAVRPLPNWKSPGPDGLHNFWIKWFSGSHARLASQFQTALESGSLPQFLTTGVTHLLHKSGSTAVPKHYRPITCLPTVYKVLTSILKSKINTHIDSNSIMSASQNGCRSGSRSTKELLLIDMAISQQVRRCRKDLSTCWIDYKKAYDSVPHTWLMRVLELYKVDATLRTFLMTCMRTWRTVLRYPGCRNIQRNSEPIRIERGIFQGVSLSPLWFCLALNPLSTLLEDSGLGYRLRRGGQVISHLLYMDDLKLFARTDSQLKELLKITETFSSSIRMEFGVDKCAVMHIKRGEIMESVGTQLTSSINLRALSASETYKYLGMSEALGINVTDMKQSLKERFFGRLKKVLNSLLSGGNKVRAFNGWVMPVLMYSFGILKWTQTELDALDRRVRTLLTVNRLHHPRSSVMRLYIPRKCGGRGFLNAKTLHNREICSLREYFLTTDVGMHRDVVAVDKGLTPLSLAKENWRKPVVLDTNDRMEVWKSKELHGRFFKALHGPDVDLQASVAWLRFGDLFGETEGFVCAITDEVMMTNNYRRFIVKDGTVDICRACHRPGESIRHIISGCSRLANGEYLHRHNLVARIIHQQLALKYNLVESEVPYYRYTPDTVLENDHITLYWDRSIITDRTIIANKPDIVLVDRSERRAMIVDITIPHDENLVKAEKDKQIKYLDLAHEVVDMWEVDSAIIVPIVVTANGLIAKSLDQHLRRLSLGSWIKGLIQKAVLLDTARIVRKFLSLEP

SEQ ID NO: 12240 - protein, 1197 aa, Sesamia nonagrioides
MLTRSAARRARPPSPDSLLSSASPPPASSATVSAVTTLAAAVASSSSDEYFSPPTTPPPARRRGGRRPPDRLGPRGPSASDRVPAPGGSVQRMRWTQSINENVMRSYYGATEGGNNLTAYRVRMLSLFQVLEPAVNVSAQRLSDQVRVIQRNHMLDDTVLDRLRNEMQSSRIIAHQSQTAEIPPQPTNYADEGSNDRATNVSTQCNEELINALEAAIREYRFTPAELRPRLPRLPMHNRNRALMAALDAQLSDYFDTCEDLTDTHSILYCAAVAACRVAHVKFPSDSRATRPKPVVPAWQHRIERRIGGARALIGKLICFREGNTRPRVMRFVRRAFAGTNISPQNYMARVTERIDFLKQKVYAWANRIRRYKRRVERYTQNRTFQSNERWVYRDWERPEQGVTDTCLPDDDAMCSFWRSIWSVPVSHTEGDWARDVERACDPIPEMGAITICPQDVACAVRPLPNWKSPGPDGLHNFWIKWFPRSHARLASQFQTALVSGSLPQFLTTGITHLLHKSGSTAEPKNYRPITCLPTVYKVLTSILKTKINKHIDSNSIMSASQNGCKSGSRGTKELLLIDMAISQQVRRSRKDLSTCWIDYRKAYDSVPHTWLMRVLELYKVDATLRTFLMSCMKTWRTVLRYPGCRNIQRNSEPIRIERGIFQGDSLSPLWFCLALNPLSTLLEDSGLGYRLRRGGQVISHLLYMDDLKLFAPNNSQLRELLKITETFSSSIRMEFGVDKCAVMHVKRGEIMESVGTQLTDSINLRALSASETYKYLGMSEALGINVTDMKQSLKERFFGRLKKVLNSLLSGGNKVRAFNGWVMPVLMYSFGILKWTQTELDALDQRVRTLLTANRLHHPRSSVMRLYIPRKCGGRGFLNAKTLHNREVCSLRDYFLVNDVGMHRDVVAADKGLTPLSLAKENWRKPVVLDTNDRMEVWKSKELHGRFFRALHGPDVDLQASVAWLRFGDLFGETEGFVFAIMDEVMMTNNYRRFIVKDGTVDICRACHRPGESIRHIISGCSRLANGEYLHRHNLVARIIHQQLALKYNLVESEVPYYRYTPDPVLENGYITLYWDRSIITDRTIVANKPDIVMVDRSERRAMIVDITIPHDKNLVKAEKDKQIKYLDLAYEVVDMWEVHSAIIVPIVVTANGLIAKSLDQHLRRLSLGSWIKGLIQKAVLLDTARIVRKFLSLEP

SEQ ID NO: 12241 - protein, 1197 aa, Sesamia nonagrioides
MLTRSAARRARPPSPDSLLSSASPPPASSTTVSAVTTPAAAVALSSSDEYFSPPTTPPPARRRGGRRPPDRLGPRGPSASDRVPAPGGSVQRMRWTQSINENVMRSYYGATEGGNNLTAYRVRMLSLFQVLEPAVNVSAQRLSDQVRVIQRNHMLDDTVLDRLRNEMQSSRIIAHQSQTAEIPPQPTNYADEGSNDRATNVSTQCNEELINALEAAIREYRFTPAEQRPRLPRLPMHNRNRALMAALDAQLSDYFDTCEDLTDTHSILYCAAVAACRVAHVKFPSDSRATRPKPVVPAWQRRIERRIGGARALIGKLICFREGNTRPRVMRFVRRAFAGTNISPQNCMARVTERIDFLKQKVYAWANRIRRYKRRVERYTQNRTFQSNERWVYRDWERPEQGVTDTCLPDDDAMCSFWRSIWSVPVSHTEGDWARDVERACDPIPEMGAITICPQDVACAVRPLPNWKSPGPDGLHNFWIKWFPRSHARLASQFQTALVSGSLPQFLTTGITHLLHKSGSTAEPKNYRPITCLPTVYKVLTSILKTKINKHIDSNSIMSASQNGCKSGSRGTKELLLIDMAISQQVRRSRKDLSTCWIDYRKAYDSVPHTWLMRVLELYKVDATLRTFLMSCMKTWRTVLRYPGCRNIQRNSEPIRIERGIFQGDSLSPLWFCLALNPLSTLLEDSGLGYRLRRGGQVISHLLYMDDLKLFAPNNSQLRELLKITETFSSSIRMEFGVDKCAVMHVKRGEIMESVGTQLSDSINLRALSASETYKYLGMSEALGINVTDMKQSLKERFFGRLKKVLNSLLSGGNKVRAFNGWVMPVLMYSFGILKWTQTELDALDQRVRTLLTANRLHHPRSSVMRLYIPRKCGGRGFLNAKTLHNREVCSLRDYFLVTDVGMHRDVVAADKGLTPLSLAKENWRKPVVLDTNDRMEVWKSKELHGRFFRALHGPDVDFQASVAWLRFGDLFGETEGFVFAIMDEVMMTNNYRRFIVKDGTVDICRACHRPGESIRHIISGCSRLANGEYLHRHNLVARIIHQQLALKYNLVESEVPYYRYTPDPVLENGYITLYWDRSIITDRTIVANKPDIVMVDRSERRAMIVDITIPHDENLVKAEKDKQIKYLDLAHEVVDMWEVDSAIIVPIVVTANGLIAKSLDQHLRRLSLGSWIKGLIQKAVLLDTARIVRKFLSLEP

SEQ ID NO: 12242 - protein, 1105 aa, Sesamia nonagrioides
MRWTQSINENVMRSYYGATEGGTNLTAYRVRMLSLFQVLEPAVNVSAQRLSDQVRVIQRNHMLDDTVLDRLRNEMQSSRVIAHQSQSAEIPPQPTNYADEGSNDRATNVSTQCNEELRNALEAAIREYRSISAELRPRLPRLPMHNRNRALMAALDAQLSNYFDTCEDLTDTHSILYCAAVAACRVAHIKFPSDSRATRPKPVVPAWQHRIERRIGGARALIGKLICFREGNTRPRVMRFVRRAFSGTNTSPQNYMARVTDRIDFLKQKVYAWANRIRRYKRRVERYTQNRTFQSNERRVYRDWERPEQGVTDTCLPDDDAMCSFWRSIWSVPVSHTEGDWARDVERACDPIPEMGAITICPQDVAHAVRPLPNWKSPGPDGLHNFWIKWFPRSHARLASQFQTALVSGSLPQFLTTGITHLLHKSGSTAEPKNYRPITCLPTVYKVLTSILKTKINKHIDSNSILSASQNGCRSGSRGTKELLLIDMAISQQVRRSRKDLSTCWIDYKKAYDSVPHTWLMRVLELYKVDATLRTFLMTCMRTWRTVLRYPGCRNIQRNSEPIRIERGIFQGDSLSPLWFCLALNPLSTLLEDSGLGYRLRRGGQVISHLLYMDDLKLFAPNNSQLNELLKITEIFSSSIRMEFGVDKCAIMHVKRGEIMEPVGTQLTSSTNLRALSASETYKYLGMSEALGINVTDMKQSLKERFFGRLKKVLNSLLSGGNKVRAFNGWVMPVLMYSFGILKWTQTELDALDQRVRTLLTANRLHHPRSSVMRLYIPRKCGGRGFLNAKTLHNHEICSLRDYFLETDVGMHRDVVAADKGLTPLSLAKENWRKPVVLDTNDRMEVWKSKELHGRFFRALHGPDVDFQASVAWLRFGDLFGETEGFVFAIMDEVMMTNNYRRFIVKDGTVDICRACHRPGESIRHIISGCSRLANGEYLHRHNLVARIIHQQLALKYKLVESEVPYYRYMPDPVLENGHITLYWDRSIITDRTIIANKPDIVLVDRSERRTMIVDITIPHDENLVKAEKDKQTKYLDLAHEVVDMWEVDSAIIVPIVVTANGLIAKSLDQHLRRLSLGSWIKGLIRKAVLLDTARIVRKFLSLEP

SEQ ID NO: 12243 - protein, 1197 aa, Sesamia nonagrioides
MLTRSAARRARPPSPDSLLGSASSPPVSSATASAVTTPAAAVASSSSDEYFSPPTTPPPARRRGGRRPPDRLGPRGPSASDRVPAPGGSVQRMRWTQSINENVMRSYYGATEGGNNLTAYRVRMLSLFQVLEPAVNVSAQRLSDQVRVIQRNHMLDDTVLDRLRNEMQSSRIIAHQSQTAEIPPQPTNYADEGSNDRATNVSTQCNEELINALEAAIWEYRFTPAELRPRLPRLPMHNRNRALMAALDAQLSDYFDTCEDLTDTHSILYCAAVAACRVAHVKFPSDSRATRPKPVVPAWQHRIERRIGGARALIGKLICFREGNTRPRVMRFVRRAFAGTNISPQNYMARVTERIDFLKQKVYAWANRIRRYKRRVERYTQNRTFQSNERWVYRDWERPEQGVTDTCLPDDDAMCSFWRSIWSVPVSHTEGDWARDVERACDPIPEMGAITICPQDVACAVRPLPNWKSPGPDGLHNFWIKWFPRSHARLASQFQTALVSGSLPQFLTTGITHLLHKSGSTAEPKNYRPITCLPTVYKVLTSILKTKINKHIDSNSIMSASQNGCKSGSRGTKELLLIDMAISQQVRRSRKDLSTCWIDYRKAYDSVPHTWLMRVLELYKVDATLRTFLMSCMRTWKTVLRYPGCRNIQRNSEPIRIERGIFQGDSLSPLWFCLALNPLSTLLEDSGLGYRLRRGGQVISHLLYMDDLKLFAPNNSQLRELLKITETFSSSIRMEFGVDKCAVMHVKRGEIVESVGTQLTDSINLRALSASETYKYLGMSEALGINVTDMKQSLKERFFGRLKKVLNSLLSGGNKVRAFNGWVMPVLMYSFGILKWTQTELDALDQRVRTLLTANRLHHPRSSVMRLYIPRKCGGRGFLNAKTLHNREVCSLRDYFLVTDVGMHRDVVAADKGLTPLSLAKENWRKPVVLDTNDRMEVWKSKELHGRFFRALHGPDVDLKASVAWLRFGDLFGETEGFVCAIMDEVMMTNNYRRFIVKDGTVDICRACHRPGESIRHIISGCSRLANGEYLHRHNLVARIIHQQLALKYNLVESEVPYYRYTPDPVLENGYITLYWDRSIITDRTIVANKPDIVMVDRSERRAMIVDITIPHDENLVKAEKDKQIKYLDLAHEVVDMWEVDSAIIVPIVVTANGLIAKSLDQHLRRLSLGSWIKGLIQKAVLLDTARIVRKFLSLEP

SEQ ID NO: 12244 - protein, 1197 aa, Sesamia nonagrioides
MLTRSAARRARPPSPDSLPSSASPPPASSTTVSAVTTPAATVASSSSDEYFSPPTTPPPVRRRGGRRPPDCLGPRGPSASDRVPAPGGSVQRMRWTQSINENVMRSYYGATEGGTNLTAYRVRMLSLFQVLEPAVNVSAQRLSDQVRVIQRNHMLDDTVLDRLRNEMQSSRIIAHQSQSAEIPPQPTNYADEGSNDRATNVSTQCNEELRNALEAAIREYRSISAELRPRLPRLPMHNRNRALMGALDAQLSNYFDTCEDLTDTHSILYCAAVAACRVAHVKFPSDSRATRPKPVVPAWQHRIERRIGGARALIGKLICFREGNTRPRVMRFVRRAFAGTNISPQNYMARVTERIDFLKQKVYAWANRIRRYKRRVERYTQNRTFQSNERWVYRDWERPEHGVADTCLPDDDAMCSFWRSIWSVPVSHTEGDWARDVERACDPIPEMGAITICPQDVARAVRPLPNWKSPGPDGLHNFWIKWFPRSHASLASQFQTALVSGSLPQFLTTGITHLLHKSGSTAEPKNYRPITCLPTVYKVLTSILKAKINNHIDSNSIMSVSQNGCRSGSRGTKELLLIDMAISQQVRRSRKDLSTCWIDYKKAYDSVPHTWLMRVLELYKVDTTLRTFLMTCMGQWRTVLRYPGCRNIQRNSEPIRIERGIFQGDSLSPLWFCLALNPLSTLLEDSGLGYRLRRGGQVISHLLYMDDLKLFAPNNLQLKELLKITETFSSAIRMEFGVDKCAVMHIKRGEIVESVGTQLTSSINLRALSASETYNYLGMSEALGINVTDMKQSLKERFFGRLKKVLNSLLSGGNKVHAFNGWVMPVLMYSFGILKWTQTELDALDQRVRTLLTANRLHHPRSSVMRLYIPRKCGGRGFLNAKTLHNREICSLREYFLETDVGMHRDVVGVDKGLTPLSLAKENWRKPVVLDTNDRMEVWKSKELHGRFFRALHGPDVDLQASVAWLRFGDLFGETEGFVCAIMDEVMMTNNYRRFIVKDGTVDICRACHRPGESIRHIISGCSRLANGEYLHRHNLVARIIHQQLALKYNLVESEVPYYRYMPDPVLENGHITLYWDRSIITERTIFANKPDIVMVDRSERRAMIVDITIPHDENLVKAEKDKQIKYLDLAHEVVDMWEVDSAIIVPIVVTANGLIAKSLDQHLRRLSLGSWIKGLIQKAVLLDTARIVRKFLSLEP

SEQ ID NO: 12245 - protein, 1201 aa, Sesamia nonagrioides
MLTRSAARKRARPPSPDSLLSSASPPPVSSPTVSVVTTPAAAVASSSSDEYFSPPTTPPPVRRRGGRRPPDRLGPRGPSASDRVPAPGGSVQRMRWTQSINENVMRSYYGATEGGNNLTAYRVRMLSLFQVLEPAVNVSAQRLSDQVRVIQRNHMLDDVVLDRLRLESRNSHVTPASSLVAVQLNSVSPRPNRVDEEDDDRAISVSPQCIEKLRSALEDAFCEYRSTPPELRPRLPRLPMHKKNKALVCALDSQLSYYLKDSKDLTDTHSILYCGAVAICRVAHVKFPDSDRATRPKSAVPAWQCRIERRIGETRALISKLTSFREGNTRPRVMRFVRRAFSGTDTSTRDYLFRVTERIDFFKQKIYAWANRIRRYKRRVERYSQNRNFQSDERRVYRAWERSDQGVTDTCLPDDDAMCSFWRNIWSVPVSHTEGSWTRVVERACDPVPEMGAITICPQDVARAVRPLPNWKSPGPDGLHNFWIKWFSGSHARLASQFQTALESGSLPQFLTTGVTHLLHKSGSTAEPKNYRPITCLPTVYKVLTSILKSKINTHIDSNSIMSASQNGCRSGSRGTKELLLIDMAISQQVRRSRKDLSTCWIDYKKAYDSVPHTWLMRVLELYKVDATLRTFLMTCMRTWRTVLRYPGCRNIQRNSEPIRIERGIFQGDSLSPLWFCLALNPLSTLLEDSGLGYRLRRGGQVISHLLYMDDLKLFAHTDSQLKELLKITETFSSSIRMEFGVDKCAVMHVKRGEIMESVGTQLTSSINLRALSASETYKYLGMSEALGINVTDMKQSLKERFFGRLKKVLNSLLSGGNKVRAFNGWVMPVLMYSFGILKWTQTELDALDQRVRTLLTANRLHHPRSSVMRLYIPRKCGGRGFLNAKTLHNREVCSLREYFLETDVGMHRDVVAADKGLTPLSLAKENWRKPVVLDTNDRLEVWKSKELHGRFFRALHGPDVDFRASVAWLRFGDLFGETEGFVFAIMDEVMMTNNYRRFIVKDGTVDICRACHRPGESIRHIISGCSRLANGEYLHRHNLVARIIHQQLALKYNLVESEVPYYRYMPDPVLENGHITLYWDRSIITDRTIVANKPDIVLVDRSERRAMIVDITIPHDENLVKAEKDKQIKYLDLAHEVVDMWEVDSAIIVPIVVTANGLIAKSLDQHLRRLSLGSWIKGLIQKAVLLDTARIVRKFLSLEP

SEQ ID NO: 12246 - protein, 1197 aa, Sesamia nonagrioides
MLTRSAARRARPPSPDSLPSSASPPPASSTTVSAVTTPAATVASSSSDEYFSPPTTPPPVRRRGGRRPPDCSGPRGPSASDRVPAPGGSVQRMRWTQSINENVMRSYYGATEGGTNLTAYRVRMLSLFQVLEPAVNVSAQRLSDQVRVIQRNHMLDDTVLDRLRNEMQSSRIIAHQSQSAEIPPQPTNYADEGSNDRATNVSTQCNEELRNALEAAIREYRSISAELRPRLPRLPMHNRNRALMGALDAQLSNYFDTCEDLTDTHSILYCAAVAACRVAHVKFPSDSRATRPKPVVPAWQHRIERRIGGARALIGKLICFREGNTRPRVMRFVRRAFAGTNISPQNYMARVTERIDFLKQKVYAWANRIRRYKRRVERYTQNRTFQSNERWVYRDWERPEQGVADTCLPDDDAMCSFWRSIWSVPVSHTEGDWARDVERACDPIPEMGAITICPQDVARAVRPLPNWKSPGPDGLHNFWIKWFPRSHASLASQFQTALVSGSLPQFLTTGITHLLHKSGSTAEPKNYRPITCLPTVYKVLTSILKAKINNHIDSNSIMSVSQNGCRSGSRGTKELLLIDMAISQQVHRSRKDLSTCWIDYKKAYDSVPHTWLMRVLELYKVDTTLRTFLMTCMGQWRTVLRYPGCRNIQRNSEPIRIERGIFQGDSLSPLWFCLALNPLSTLLEDSGLGYRLRRGGQVISHLLYMDDLKLFAPNNLQLKELLKITETFSSAIRMEFGVDKCAVMHIKRGEIVESVGTQLTSSINLRALSASETYKYLGMSEALGINVTDMKQSLKERFFGRLKKVLNSLLSGGNKVRAFNGWVMPVLMYSFGILKWTQTELDALDQRVRTLLTANRLHHPRSSVMRLYIPRKCGGRGFLNAKTLHNREICSLREYFLETDVGMHRDVVAVDKGLTPLSLAKENWRKPVVLDTNDRMEVWKSKELHGRFFRALHGPDVDLQASVAWLRFGDLFGETEGFVCAIMDEVMMTNNYRRFIVKDGTVDICRACHRPGESIRHIISGCSRLANGEYLHRHNLVARIIHQQLALKYNLVESEVPYYRYMPDPVLENGHITLYWDRSIITDRTIVANKPDIVMVDRSERRAMIVDITIPHDENLVKAEKDKQIKYLDLAHEVVDMWEVDSAIIVPIVVTANGLIAKSLDQHLRRLSLGSWIKGLIQKAVLLDTARIVRKFLSLEP

SEQ ID NO: 12247 - protein, 1213 aa, Sesamia nonagrioides
MSPHKNCNNENKIMLTRSAARKRARPPSPDSLLSSASPPPVSSPTVSAVTTPAAAVASSSSDEYFSPPTTPPPVCRRGGRRPPDRLGPRGPSASDRVPAPGGSEQRMRWTQSINENVMHSYYGATEGGNNLTAYRVRMLSLFQVLEPAVNVSAQRLSDQVRVIQRNMLDDVVLDRLRLESRISHVTPASSLVAVQLNSVSPRPNHVDEEDDDRAISVSPQCNEKLRSALEDAFREYRSIPPELRPRLPRLPMHKKNKALVYALDSQLSNYLKDSKDLNDTHSILYCGAVAICRVAHVKFPDNDRATRPKSAVPAWQCRIERRIGETRALIGKLISFREGNTRPRVMRFVRRAFSGTDTSTGDYLFRVRERTDFFKQKIYAWANRIRRYRRRVERYSQNRNFHSDERRVYRAWERSDQGVTDTCLPDDDATCSFWRNIWSVPVSHTEGSWTRVVERACDPVPEMGAITICPQDVARAVRPLPNWKSPGPDGLHNFGIKWFSGSHARLASQFQTALESGSLPQFLTTGVTHLLHKSGSTAEPKNYRPITCLPTVYKVLTSILKSKINTHIDSNSIMSASKNGCRSGSRGTKELLLIDMGISQQVRRSRKDLSTCWIDYKKAYDSVPHTWLMRVLELYKVDATLRTFLMTCMRTLRTVLRYPGCRNIQRNSEPIRIERGIFQGDSLSPLWFCLALNPLSTLLEDSGLGYRLRRGGQVISHLLYMDDLKLFARTDSQLKELLKITETFSSSIRMEFGVDKCAVMHVKRGEIMESVGTQLTSSINLRALSASETYKYLGMSEALGINVTDMKQSLKERFFGRLKKVLNSLLSGGNKVRAFNGWVMPVLMYSFGILKWTQTELDALDRRVRTLLTANRLHHPWSSVMRLYIPRKYGGRGFLNAMTLHNREICSLREYFLSTDVGMHRDVVAVDKGLTPLSLAKENWRKPVVLDTNDRMEVWKSKELHGRFFKALHGPDVDLQASVAWLRFGDLFGETEGFVCAVTDEVMMTNNYRRFIVKDGTVDICRACHRPGESIRHIISGCSRLANGEYLHRHNLVARIIHQQLALKYNLVESEVLYYRYTPDPVLENDHITLYWDRSIITDRTIIANKPDIVLVDRSERRAMIVDITIPHDENLVKAEKDKQIKYLDLAHEVVDMWEVDSAIIVPIVVTANGLIAKSLDQHLRRLSLGSWIKGLIQKAVLLDTARIVRKFLCLEP

SEQ ID NO: 12248 - protein, 868 aa, Sesamia nonagrioides
MRFVRRAFSGTNTSPQNYMARITERIDFLKQKVYAWANRIRRYKRRVERYTQNRTFQSNQRWVYRDWERPEQGVADTCLPDDDAMCSFWRSIWSVPVSHTEGEWARDVERACDPIPEMGAITICPQDIARAVRPLPNWKSPGPDGLHNFWIKWFPRSLASLASQFQTALVSGSLPQFLTTGITHLLHKSGSTAEPKNYRPITCLPTVYKVLTSILKAKINNHIDSNSIMSVSQNGCRSGSRGTKELLLIDMAISQQVRRSRKDLSTCWIDYKKAYDSVPHTWLMRVLELYKVDTTLRTFLMTCMGQWRTVLRYPGCRNIQRNSEPIRIERGIFQGDSLSPLWFCLALNPLSTLLEDSGLGYRLRRGGQVISHLLYMDDLKLFAPNNLQLKELLKITETFSSAIRMEFGVDKCAVMDIKRGEIVESVGTQLTSSINLRALSASETYKYLGMSEALGINVTDMKQSLKERFFGRLKKVLNSLLSGGNKVRAFNGWVMPVLMYSFGILKWTQTELDALDQRVRTLLTANRLHHPRSSVMRLYIPRKCGGRGFLNGKTLHNREICSLREYFLETDVGMHRDVVAVDKGLTPLSLAKENWRKPVVLDTNDRMEVWKSKELHGRFFRALHGPDIDLQASVAWLRFGDLFGETEGFVCAIMDEVMMTNNYRRFIVKDGTVDICRACHRPGESIRHIISGCSRLANGEYLHRHNLVARIIHQQLALKYNLVESEVPYYRYMPDPVLENGHITLYWDRSIITDRTIVANKPDIVMVDRSERRAMIVDITIPHDENLVKAEKDKQIKYLDLAHEVVDMWEVDSAIIVPIVVTANGLIAKSLDQHLRRLSLGSWIKGLIQKAVLLDTARIVRKFLSLEP

SEQ ID NO: 12249 - protein, 1197 aa, Sesamia nonagrioides
MLTRSAARPARPPSPDSLLGSASSPPVSSATASAVTTPAAAVASSSSDEYFSPPTMPPPARRRGGRRPPDRLGPRGPSASDRVPAPGGSVQRMRWTQSINENVMRSYYGATEGGNNLTAYRVRMLSLFQVLEPAVNVSAQRLSDQVRVIQRNHMLDDTVLDRLRNEMQSSRIIAHQSQTAEIPPQPTNYADEGSNDRATNVSTQCNEKLINALEAAIREYRFTPAELRPRLPRLPMHNRNRALMAALDAQLSDYFDTCEDLTDTHSILYCAAVAACRVARVKFPSDSRATRPKPVVPAWQHRIERRIGGARALIGKLICFREGNTRPRVMRFVRRAFAGTNISPQNYMARVTERIDFLKQKVYAWANRIRRYKRRVERYTQNRTFQSNERWVYRDWERPEQGVTDMCLPDDDAMCSFWRSIWSVPVSHTEGDWARDVERACDPIPEMGAITICPQDVACAVRPLPNWKSPGSDGLHNFWIKWFPRSHARLASQFQTALVSGSLPQFLTTGITHLLHKSGSTAEPKNYRPITCLPTVYKVLTSVLKTKINKHIDSNSIMSASQNGCKSGARGTKELLLIDMAISQQVRRSRKDLSPCWIDYRKAYDSVPHTWLMQVLELYKVDATLRTFLMSCMRTWRTVLRYPGCRNIQRNSEPIRIERGIFQGDSLSPLWFCLALNPLSTLLEDSGLGYRLRRGGQVISHLLYMDDLKLFAPNNSQLRELLKITETFSSSIRMEFGVDKCAVMHVKRGEIMESVGTQLTISINLRALSASETYKYLGMSEALGINVTDMKQSLKERFFGRLKKVLNSLLSGGNKVRAFNGWVMPVLIYSFGILKWTQTELDALDQRVRTLLTANRLHHPRSSVMRLYIPRKCGGRGFLNAKTLHNREVCSLRDYFLVTDVGMHRDVVAADKGLTPLSLAKENWRKPVVLDTNDRMEVWKSKELHGRFFRALHGPDVDFQASVAWLRCGDLFGETEGFVFAIMDEVMMTNNYRRFIVKDGTVDICRACHRPGESIRHIISGCSRLANGEYLHRHNLVARIIHQQLAFKYKLVESEVPYYRYTPDPVLENGYITLYWDRSIITDRTIVANKPDIVMVDRSERRAMIVDITIPHDENLVKAEKDKQIKYLDLAHEVVDMWEVDSAIIVPIVVTANGLIAKSLDKHLRRLSLGSWIKGLIQKAVLLDTARIVRKFLSLEP

SEQ ID NO: 12250 - protein, 1041 aa, Apamea monoglypha
MCILHVHNKHFFSLFSKGNMKQPSRLPTYIQPPINNNNNNKSISISIQCNEELRNALEGAIREYRFMSPELRPRLPRLPMHNKNRALVAVLDAQLSSHFDACEDLTDTHSILYCAAVAACRVAHVKFDSDSRATRPKPAIPAWQCRIERRIGGARALIGKLICFREGNTRPRVMRFVRRAFLGTDISSQDYLSRVTERIDFLKQKVYAWANRIRRYKRRVERYTQNRTFQSDERWVYRGWERPDQSVADTCLPDDDAMCSFWRSIWSAPVSHTEGDWTGKIERACELIPEMGAITICPQDVARAVRPLPNWKSPGPDGLHNFWIKWFQRSHAPLAAQFQSALESGLLPQFITTGITHLLHKSGSTADPKNYRPITCLPSIYKVLTSILRAKINKHIDSNSIMSVSQNGCRNGSRGTKELLLIDMAISQQVRRSRKDLSTCWIDYKKAYDSVPHTWLMRVLELYKVDTTLRTFLMTCMGQWRTVLRYPGCRNIQRNSEPIRIERGIFQGDSLSPLWFCLALNPLSTLLDDSGLGYRLRRGGQVISHLLYMDDLKLFAPNNLQLMKLLKITETFSSAIRMEFGVDKCAVMHVKRGEIVESVGTQLSDFTNLRALSAAETYKYLGMSEALGINVTDMKQSLKERFFGRLKKVFNSLLSGGNKVRAFNSWVMPVLMYSFGILKWTQTELEALDRRVRTLLTANRMHHPRSSVMRLYIPRKCGGRGFLNAKTLHNREICSLREYFLETDVGMHRDVVAVDKGLTPLSLAKENWRKPVVLDTNDRMEVWQSKELHGRFYRALHGPDVDLLASVAWLRFGDLFGETEGFVCAIMDEVMMTNNYRRYIVKDGTVDICRACHRPGESIRHIISGCSRLANGEYLHRHNLVARIIHQQLALKYSLVESEVPYYRYVPDPVLENGNITLYWDRSIITDRTIVANKPDIVVVDRSERRAMIVDITVPHDENLVKAEKDKQIKYLDLAREVVDMWDVDSAIIVPIVVSANGLIAKSLDQHLRRLSLGSWIKGLIQKAVLLDTARIVRRFLSLEP

SEQ ID NO: 12251 - protein, 1194 aa, Furcula furcula
MLTRSKAHLRPPDSSPHSASQPPGPSRDGSLAAVASSESDEYFSPPTSPPPVRRRRGRPPRELGLLEQPAPNRVLAPGGVVRRMRWTLSINENVMRAYYKATEGGTNLTAYRDRMLSLFQALEPAVNVSAQRLSDQVRAIQRGHMLDDAVLDRLRSEVQGSRVVPCIPSSQAVAQAVNTAPAPRPAANSGDDRDDMTTDVSTNVSSQLRSTLEDVVREYRTMPQGLRPRLPRLPMHKRNRALVCALDSLLSSYFDSSEDLADAHALLYCAAITACRVARVKFPDAATRPKPAVPAWQCRIERRIGEARVLIGKLTCFREGNMRPSVMRFVRRAFSGTGIDPREYLSRVTERIDFLKQKICAWANRIRRYRARVDRYSQSNMFQRDQRWVYRSWERPSQIVGEVQRPDDDAMIRFWRNIWSVPVTHSEGDWIGDVEEVCEPLPEMGPITIGPQDVADAVRPLPNWKAPGPDGLHNFWLKCIRSSHICLASLFQSAVESGSLPEFMTTGITHLLHKTDSTTNPKNYRPITCLPTVYKTLTSILRAKINRHVEDNSIMSSSQNGCRSGARGTKELLLIDMAICQQARRNRKDLSTCWIDYKKAFDSVPHTWLMRVLELYKVNTTLRTFLASCMRQWRTVLLYPGSRQTLGNGDPIRIERGIFQGDSLSPLWFCLALNPLSTLLRSSGLGCRLRRGGQVISHLLYMDDLKLFAPTELRLMGLLKVTETFSNSIRMEFGVDKCAVMHVKRGRMVESRSVQLSDSTDLRTLSETETYKYLGMSQALNINETAMKQSLRERFLGRLRKVLKSLLSGGNKVRAYNGWVMPVLMYSFGILRWTQTELDTLDRTVRTLLTTYRMHHPRSSVMRLYIPRKCGGRGFLNAKALHNREICNLREYFLHCSGEMHTDVVAVDNGLTPLSLAKGNWRKPVVLTTGDREAVWQSKELHGRFYRALHGPDVDFTASVAWLRFGDLFGETEGFVCAIMDEVVMTNNYRRYILRDGTIDICRACRRPGESLRHIISGCSRLANGEYLHRHNQVARIIHQQLALKYRLVTSEVPYYRYAPEPVLEDGHITLYWDRSIITDRTIVANKPDIVLIDRTERRAMIVDITVPHDENLVKAEKDKQCKYLDLAHEVVDMWDIDDAIIVPIVVSAHGLMAKSLDKHLKRLSLDGWIKGQIQKAVLLETARIVRKFLSLEP

SEQ ID NO: 12252 - protein, 1202 aa, Spodoptera exigua
MLTRAAARRARPPPPASSLSSASPPPESSPTVSDVTPAVAAASSSSDEYYSPPTTPPPTRRRGGRRPPARLGPRGPPASDRVPAVGGSVQRMRWTQSINENVMRAYYGATEGGNNLTAYRVRMLSLFQVLEPAVNVSAQRLSDQVRVIQRNRMLDDTVLDRLQTEMGSRASASSSRTVVPATLPLTSHGIVSAVADEESTDTVAHVSTQCIDELRSALEYAIREYRYISPELRPRLPRLPMHNKNKALVAALDSQLSNYLDDCEDLGDTHSIMYCAAVAACRVAHVKFPTNDVTTRPKPAVPAWQRRIECRIAGARALIGKLICFREGNTRPRVMRSVRRAFSGTDISPRDYMSRVTERIDFLKQKVYAWANRIRRYRRRVERYTQNRTFRSNERWVYRTWERPDHGVTDRRLPDDDAMCSFWRSIWSVPVSHTEGDWIRDVERACDPIPQMGTINISPQDVARAVRPLPNWKSPGPDGLHNFWIKWFTRAHARLASQFQSAVESGSLPKFLTTGVTHLLHKSGSTAEPKNYRPITCLPTVYKVLTSILRSKINSHIDKNKIMSTAQNGCKNGSRGTKELLLIDMAISQQVRRARKDLSTCWIDYKKAYDSIPHTWLMRVLELYKIDTILRTFLMSCMRQWSTVLRYPGCRHTQRNSEPVRIERGIFQGDSLSPLWFCLALNPLSTLLENSGLGYRLKRGGQVISHLLYMDDLKLFAPNKLQLMELLKLTETFSSAIRMEFGVDKCAIMHVKRGEVVESVGTQLTDSINLRSLSPTETYKYLGMSEALGINVTDMKQSLKERFFGRLKKVFNSFLSGGNKERAFNGWVMPVLMYSFGVLKWSQTELDALDRQVRTMLTAYRMHHPRSSVMRLYIPRKCGGRGFLNAKTLHNREVCSLREYFLAADVDMHRDVVAVDKGLTPLSLAIENWRKPVVLDTNARREVWQSKELHGRFFRALHGPDVDQVASVAWLRFGDLFGETEGFVCAIMDEVIMTNNYRRFIVKDGTVDICRACHRPGESIRHIISGCSRLANGEYLHRHNLVARIIHQQLALKYSLVESEVPYYRYEPDPVLDNGHITLYWDRSIITDRTIVANKPDIVVVDRKERRAMIVDIAVPHDENLVKAEKDKLIKYIDLAREVVDMWEVDSAIIVPIVVSANGLIAKSLDQHLRRLSLGGWIKGLIQKVVLLDTARIVRRFLSLEP

SEQ ID NO: 12253 - protein, 868 aa, Arctia plantaginis
MRFVKQAFLGTTIGPQQYMSCVTERIDFLKQKIYAWANRLRRYKKRIDRYNQNRMFQRNEKWVYRKWEEPDPCVSHGHLPDENVTHTFWRNIWSVPVTHIEGDWLRDVRRPCESITPMEPVIIDKDDVSCAVRSLPNWKSPGLDGLHNFWLKWFRSSHACLASQFQAALNSGSLPQFLTTGITHLLYKSGSVMDPKNFRPITCLPTMYKLLTSILRLKITLHINNNSIMSVSQNGCRSGSRGTKDFLIIDRAISQQVRRNRKSLATCWIDYKKAYDSVPHTWLLRVLELYKIDTTLCTFLMSCMGQWRTVLRYPGCRQTTVIDAPIKIERGIFQGDSLSPLWFCLALNPLSTLLEGSGLGYRLQKDDQVISHLLYMDDLKLLAPTKLQLSALLKVTENFSNSIKMEFGVDKCAVMYVKKGEIVESEGIELSDSTKLRSLSATETYKYLGISQSLGIPESDMKQTLQERFFGRLKKVLKSLLSGGNKVRACNGWVMPILMYSFGILKWTQTELDALDRRVRTLLTAFRMHHPRSSVMRLYIPRKLGGRGLLNIKTLHNREICNLREYFLHTDVGMHRNVVAVDIGFTPLALAKENWRKPVVFSTNDRREVWKGKELHGRFYRALNGSDIDFKASTTWLRYGDLFGETEGFVCAIMDEVIMTNNYRKYILKDGTVDICRACHRPGESIRHIISGCSRLANGEYLHRHNQVARIVHQQLALKYHLVNLEVPYYRYVPDPVLENGRATLYWDRSIITDRTIVANKPDIVVIDRLERRAIIVDIAVPHDENLVKVEKEKQIKYLDLSHEIVDMWNVDSVIIVPIVVSAHGLIAKSLDQHLKRLTLDGWIKGLIQKAVLLDTARIVRRFLSLQS

SEQ ID NO: 12254 - protein, 964 aa, Amphipyra berbera
MHRKNRALMCALDSLLSSYFDNSENLEDTHSILYCAAVAACRVAHAKFDNNDKATRPKPAVPAWQCRIERRINEARALIGKLICFREGNTRPRVMRFVRRAFSGTDINPRDYMSRVTERIDFLKQKVYAWANRIRRYKRRVERYTQNRMFHSDERWVYRTWERPDHDVSDARPPDNDVMNTFWRNIWSMPVTHTEGDWMQEVQRACEPIKEMGDITIVPQDVTSAVRPMANWKSPGPDGLHNFRIKWLRSSHARLASQFQSSLESGSLPEFLTTGVTHLLHKSGSTAEPKNYRPITCLPTVYKLLKSILRAKINSHILYNSIMSVSQNGCKNGSRGTKELLLIDMAISQQVRRSRKDLSTCWIDYKKAYDSVPHTWLMRVLELYKVNTTLCAFLTSCMGQWRTVLHYPGCRQIQGRGEPIRIERGIFQGDSLSPLWFCLALNPLSTLLEGSGLGYRLRRGGQVISHLLYMDDLKLFAPNNLQLMKLLKVTETFSNSIRMEFGVDKCAVMHVKRGGYMESVGTQLSDSIHLRSLSSTETYKYLGMSEALGINETDMKQSLRERFYGRLKKVLKSLLSGGNKVRAFNGWVMPVLMYSFGILKWTQTELDALDRRVRTLLTAYRMHHPRSSVMRLYIPRKCGGRGFLNAKTLHNREVCSLREYFLQADVGMHRDVVAVDKGFTPLSLAKENWRKPVVLDTNGRREVWQSKELHGRFYRALHGPDVDFLASVAWLRFGDLFGETEGFVCAIMDEVMMTNNYRKYIVKDGTVDICRACHCPGESIRHIISGCSRLANGEYLHRHNLVARIIHQQLALKYNLVDAEVPYYKYVPDPVLENGHITLYWDRSIITDRTIVANKPDIVVIDRTERLTMIVDITVPHDENLVKAEKDKEIKYQDLAHEVVDMWEVDSAVIVIVPIVVTANGLIAKSLDHHLTRLSLGSWFKGLIQKAVLLDTARIVRKFLSLRP

SEQ ID NO: 12255 - protein, 1203 aa, Amphipyra berbera
MLTRARARKQTAHPRSPDSSLRSASQPPESSPPVSAVTPAAAVASSSSDEYYSPPSSPPPVRRRGGARPPDCLGPRGQPATNRVPAAGGNVSRMRWTQSINENVMRAYYGATEGGINLTAYRERMLFLFQVLEPAINVSAQRLSDQVRVVQRNRRLDDTVLERLRSEARNSQTVTFPVQAAVQMQPLAVPPRPIHVDGEGDGEAINVSNQCSEELRSALDDAILEFRTTPPEIRPRLPRLPMHGKNRALMCALDSLLSNYFDGSEDLADTHSILYCAAIAACRVAHVKFTENERATRPKPAVPAWQSRIERRIGGARVLIGKLICFREGNNRPRVMRFVRRAFSGTDISPRDYMSRVTERIDFLKQKVYAWANRIRRYKRRVERYIQNRIFQSDQRRVYRAWERPDFGGGDVRLPDDDALSSFWRSIWSVPIAHTEDGWMRDIEQACEPIAEMEPITITPQDVADAARPLPNWKSPGPDGLHNFWLKWLRSSHARLASQFQSSLESGSLPQFLTTGVTHLLYKSGSTAEPKNYRPITCLPTVYKLLTSILRVKITTHIDNNCIMSASQNGCRKGSRGTKELLLIDMAISQQVRRSQKDLSTCWIDYKKAYDSVPHSWLMRVLELYKINTTLRTFLMSCMRHWRTVLRYPGCRRIRGSGEQIRIERGIFQGDSLSPLWFCLALNPLSTLLEGTGLGYQLRRGGQVISHLLYMDDLKLFAPTDLQLMELLKVTENFSNSIRMEFGVDKCAVMHVKRGRIAESEGIQLPNSVQLRSLSPTETYKYLGMSEALGISETDMRQSLRERFFGRLNKLLKSLLSGGNKVRAFNGWVMPVLMYSFGTLKWTQADLDALDRRVRALLTAHRMHHPRSSVMRLYIPRKCGGRGFLNAKTLHNREVYSLREYFLQAEGVIHRDVVAVDKGFTPLALARENWRKPAVLSTSDREVVWQSKELHGRYYRALHGPDVDFSASVSWLRSGNLFGETEGFVCAIMDEVMMTNNYRKYIVKDGTVDICRACHRPGESIRHIVSGCSRLANGEYLHRHNLVARIIHQQLALKYNLVESEVPYYRYVPDPVLENGHATLYWDRSIITDRTIVANKPDIVVIDRSERRTMIVDITVPHDENLVKAEKDKQIKYLDLAHEVVGMWDVDSAVIVPIVVTANGIIAKSLDIHLMRLSLGGWIKGLIQRAVLLDTARIVRRFLSLEP

SEQ ID NO: 12256 - protein, 954 aa, Amphipyra berbera
MCVLDSLLSSYFDNSENLEDTHSILYCAAVAACRVAHAKFDNNDRATRPKPAVPAWQCRIERRINEARALIGKLICFREGNIRPRVMRFVRRAFSGTDINPRDYLSRVTERIDFLKQKVYAWANRIRRYKRRVERYTQNRMFHSDERWVYRTWERPDHDVSDTHLPDNDVMNTFWRSIWSMPVTHTEGDWMQEVQRACEPIEEMGDITIVPQDVTSAVRPMANWKSPGPDGLHNFWLKWLRSSHARLASQFQSSLESGSLPEFLTTGITHLLHKSGSTAEPKNYRPITCLPTVYKLLTSILRAKINSHIINNSIMSVSQNGCKNGSRGTKELLLIDMAISQQVRRSRKDLSTCWIDYKKAYDSVPHTWLMRVLELYKVNTTLCAFLTSCMGQWRTVLHYPGCRQIQGRGEPIRIERGIFQGDSLSPLWFCLALNPLSTLLEGSGLGYRLRRGGQVISHLLYMDDLKLFAPNNLQLMKLLKVTETFSNSIRMEFGVDKCAVMHVKRGGIMESVGTQLSDSIHLRPLSSTETYKYLGMSEALGINETDMKQSLRERFYGRLKKVLKSLLSGGNKVRAFNGWVMPVLMYSFGILKWTQTELDALDRRVRTLLTAYRMHHPRSSVMRLYIPRKCGGRGFLNAKTLHNREVCSLREYFLQADVGMHRDVVAVDKGFTPLSLAKENWRKPVVLDTNGRREVWQSKELHGRFYRALYGPDVDFLASVAWLRFGDLFGETEGFVCAIMDEVMMTNNYRKYIVKDGTVDICRACHCPGESIRHIISGCSRLANGEYLHRHNLVARIIHQQLALKYNLVDAEVPYYKYVPDPVLENGHITLYWDRSIITDRTIVANKPDIVVIDRSERLTMIVDITVPHDENLVKAEKDKEIKYQDLAHEVVDMWEVDSAVIVPIVVTANGLIAKSLDQHLMRLSLGSWVKGLIQKAVLLDTARIVRKFLSLRP

SEQ ID NO: 12257 - protein, 962 aa, Amphipyra berbera
MHRKNRALMCALDSLLSSYFDNSENLEDTHSILYCAAVAACRVAHAKFDNSDKATRPKRAVPAWQCRIERRINEARALIGKLICFREGNTRPRVIRFVRRAFSGTDINPRDYMSRVTERIDFLKQKVYAWANRIRRYKRRVERYTQNRMFHSDERWVYRTWERPDHDVNDTHPPDNDVMNTFWRNIWSMPVTHTEGDWMQEVQRACEPIEEMGDITIVPQDVTSAVRPMANWKSPGPDGLHNFWIKWLRSSHARLASQFQSSLESGSLPEFLTTGVTHLLHKSGSTAEPKNYRPITCLPTVYKLLTSILRAKINSHIINNSIMSVSQNGCKNGSRGTKELLLIDMAISQQVRRSRKDLSTCWIDYKKAYDSVPHTWLMRVLELYKVNTTLCAFLTSCMGQWRTVLHYPGCRQIQGRGEPIRIERGIFQGDSLSPLWFCLALNPLSTLLEGSGLGYRLRRGGQVISHLLYMDDLKLFAPNNLQLMKLLKVTETFSNSIRMEFGVDKCAVMHVKRGGIMESVGTQLSDSIHLRSLSSTETYKYLGMSEALGINETDMKQSLRERFYGRLKKVLKSLLSGGNKVRAFNGWVMPVLMYSFGILKWTQTELDALDRRVRTLLTAYRMHHPRSSVMRLYIPRKCGGRGFLNAKTLHNREVCSLREYFLQADVGMHRDVVAVDKGFTPLSLAKENWRKPVVLDTNGRREVWQSKELHGRFYRALHGPDVDFLASVAWLRFGDLFGETEGFVCAIMDEVILTNNYRKYIVKDGTVDICRACHCPGESIRHIISGCSRLANGEYLHRHNLVARIIHQQLALKYNLVDAEVPYYKYVPDPVLENGHITLYWDRSIITDRTIVANKPDIVVIDRSERLAMIVDITVPHDENLVKAEKDKEIKYQDLAHEVVDMWEVDSAVIVPIVVTANGLIAKSLDQHLTRLALGSWIKGLMQKAVLLDTARIVRKFLSLRP

SEQ ID NO: 12258 - protein, 1110 aa, Amphipyra berbera
MRWTQSINENVMRAYYGATEGGINLTAYRERMLFLFQVLEPAINVSAQRLSDQVRVVQRNRRLDDTVLERLRSEARNSQTVTFPVQAVVQMQPLAVPPRPIHVDGEGDGEAINVSNQCSEELRSALDDAILEFRTTPPEIRPRLPRLPMHGKNRALMCALDSLLSNYFDGSEDLADTHSILYCAAIAACRVAHVKFTENERATRPKPAVPAWQSRIERRIGGARVLIGKLICFREGNNRPRVMRFVRRAFSGTDISPRDYMSRVTERIDFLKQKVYAWANRIRRYKRRVERYTQNRIFQSDQRRVYRAWERPDFGGGDVRLPDDDALSSFWRSIWSVPIAHTEDGWMRDIEQACEPIAEMEPITITPQDVADAARPLPNWKSPGPDGLHNFWLKWLRSSHARLASQFQSSLESGSLPQFLTTGVTHLLYKSGGTAEPKNYRPITCLPTVYKLLTSILRVKITTHIDNNCIMSASQNGCRKGSRGTKELLLIDMAISQQVRRSQKDLSTCWIDYKKAYDSVPHSWLMRVLELYKINTTLRTFLMSCMRHWRTVLRYPGCRRIRGSGEQIRIERGIFQGDSLSPLWFCLALNPLSTLLEGTGLGYQLRRGGQVISHLLYMDDLKLFAPTDLQLMELLKVTENFSNSIRMEFGVDKCAVMHVKRGRIAESEGIQLPNSVQLRSLSPTETYKYLGMSEALGISETDMRQSLRERFFGRLNKLLKSFLSGGNKVRAFNGWVMPVLMYSFGTLKWTQADLDALDRRVRALLTAHRMHHPRSSVMRLYIPRKCGGRGFLNAKTLHNREVYSLREYFLQAEGVMHRDVVAVDKGFTPLALARENWRKPAVLSTNDREVVWQSKELHGRYYRALHGPDVDFSASVSWLRSGNLFGETEGFVCAIMDEVMMTNNYRKYIVKDGTVDICRACHRPGESIRHIVSGCSCLANGEYLHRHNLVARIIHQQLALKYNLVESEVPYYRYVPDPVLENGHATLYWDRSIITDRTIVANKPDIVVIDRSERRTMIVDITVPHDENLVKAEKDKQIKYLDLAHEVVGMWDVDSAVIVPIVVTANGIIAKSLDIHLMRLSLGGWIKGLIQRAVLLDTARIVRRFLSLEP

SEQ ID NO: 12259 - protein, 1202 aa, Amphipyra berbera
MLTRSRTRTTEQRSARPPPPDSPLSSASQPPELGLPVTPAAAASSSSSDEYFSPPTSPRPVRRQGRGRPPNSLGPRGPPAPSRVLAAGGYVQRMKWTQSINENVMRAYYGSTEGGTNLTAYRVRMLTLFQELEPAINVSAQRLSDQVRVIQRNHRLDDAALDRLRLEVQNSRAIPVPLQTAVHQLINVAPPRSDRVDGDEDDGAVTVSSQYNDRLRSALEDAIRECRANPESRPRLPRLPMHNKNRALVCALDSLLASYFESSEDLGDTHSILYCAAVAACRVANVKFNNSERATRPKLAVPAWQCRIERRIDETRALIGKLICFREGNTRPRVMRFVRRAFSGTGISPREYTSRATERIDFLKQKVCAWASRIRRYKRRVERYTQNRMFQCDQRWVYRAWERPDQSVSGGRLPDDDAMSSFWRSIWSVPVIHTEGDWMRDIERTCESIEEMGEIVISPQDVAGAVRPLPNWKSPGPDGLHNFWIKWLRSSHARLASQFQSSLESGSLPQFLTTGVTHLLHKSGSTAEPKNYRPITCLPTVYKLLTSILRSKINTHIGNNSVLSSSQNGCRNGSRGTKELLLIDTAISQQVRRSQKSLSTCWIDYKKAYDSVPHTWLMRVLELYKINTTLRTFLRSCMGQWRTVLRYPGCQPIRGSGEPIRIERGIFQGDSLSPLWFCLALNPLSTLLEGSGLGYPLRRGGQVVSHLLYMDDLKLFAPTKLQLVDLLKVTETFSNSIRMEFGVDKCAVMHVRRGRIMESEGLQLSDSIHLSPLSANDTYKYLGMSEGLGISEADMKQSLRERFFGRLKKVLKSLLSGGNKVRAFNGWVMPVLMYSFGILKWTQTELDALDRRVRTLLTANRMHHPRSSVMRLYIPRKCGGRGLLNAKTLHNREVCSLREFFLHADAGMHRDVVAVDKGLTPLSLARENWRKPVVLSTNDRREIWQSKELHGRFYRALHGPDVDFLASVSWLRFGDLFGETEGFVCAIMDEVIMTNNYRKYIVKDGTVDICRACHCPGESLRHIISGCSRLANGEYLHRHNQVARIIHQQLALKYNLVESEVPYYRYVPDPVLENGRITLYWDRSIITDRTIVANKPDIVVIDRSERRTMIVDVTIPHDGNLVKAEKDKQIKYLDLAHEVVNMWDVESATIVPIVVTANGLMAKSLDKHLMRLSLGGWIKGLIQKAVLLDTARIVRRFLSLEP

SEQ ID NO: 12260 - protein, 1207 aa, Amphipyra berbera
MLTRSRAKALSETTRPRSSAPSLSSASQPPDSSIVSDVTPAAAVASSSSDEFFSPPTSPLPPPARRRGRGRPPASIGPRGPPASDRVPAPGGSVQRMRWTLTMNENCMRAYFGATEGGTNLTAYRGRMLSLFQVLEPTVNVSAQRLSDQVRVIQRDHRLTDAALDRLRSEVQSNRIISLQSQTAAQPQTPTVVPPLPIHADEESDDRVTNVSTQCNEQLRSALELAIREYRFTPPNIRPRIPRLPMHRKNRALMCALDSLLSSYFDNSENLEDTHSILYCAAVAACRVAHAKFDNNDRATRPKPAVPAWQCRIERRINEARALIGKLICFREGNTRPRVMRFVRRAFSGTDINPRDYLSRVTERIDFLKQKVYAWANRIRRYKRRVERYTQNRMFHSDERWVYRTWERPDHDVSDTHLPDNDVMNTFWRNIWSMPVTHTEGDWMQEVQRACEPIEEMGDITIVPQDVTSAVRPMANWKSPGPDGLHNFWLKWLRSSHARLASQFQSSLESGSLPEFLTTGVTHLLHKSGSTAEPKNYRPITCLPTVYKLLTSILRAKINSHIINNSIMSVSQNGCKNGSRGTKELLLIDMAISQQVRRSRKDLSTCWIDYKKAYDSVPHTWLMRVLELYKVNTTLCAFLTSCMGQWRTVLHYPGCRQIQGRGEPIRIERGIFQGDSLSPLWFCLALNPLSTLLEGSGLGYRLRRGGQVISHLLYMDDLKLFAPNNLQLMKLLKVTETFSNSIRMEFGVDKCAVMHVKRGGIMESVGTQLSDSIHLRSLSSTETYKYLGMSEALGINETDMKQSLRERFYGRLKKVLKSLLSGGNKVRAFNGWVMPVLMYSFGILKWTQTELDALDRRVRTLLTAYRMHHPRSSVMRLYNPRKCGGRGFLNAKTLHNREVCSLREYFLQADVGMHRDVVAVDKGFTPLSLAKENWRKPVVLDTNCRREVWQSKELHGRFYRALHGPDVDFLASVAWLRFGDLFGETEGFVCAIMDEVMMTNNYRKYIVKDGTVDICRACHCPGESIRHIISGCSRLANGEYLHRHNLVARIIHQQLALKYNLVDAEVPYYKYVPDPVLENGHITLYWDRSIITDRTIVANKPDIVVIDRTERLTMIVDITVPHDENLVKAEKDKEIKYQDLAHEVVDMWEVDSAVIVPIVVTANGLIAKSLDHHLTRLSLGSWVKGLIQKAVLLDTARIVRKFLSLRP

SEQ ID NO: 12261 - protein, 1197 aa, Noctua janthe
MLTRSATRRARLSPPDPSLSSASPPPESSPIVSAVTPAVAVASSSSDEYFSPPTTPPPVRRRGGRRPPDGLGPRGPPASDRIPAPGGSVPRMRWTQSINANVMRAYYGATEGGNNLTAYRVRMLSLFQVLEPAVNVSAQRLSDQVRVIQRNGMLDDTVLDRLRTEMQSSHVIATPPQTVVPPQSTIIPTHDNNVSNDMVTNVSTQCNEEMRCALEGAIREYWFMQPDLRPRVPRLPMHNKNKVLVAVLDSQLSNYFDNCENLTDAHSVLYCAAVAACRVAHVKFSDDRATRPNPAVPSWQYRIERRIGEARALIGKLICFREGNTRPRVMRFVRRAFSGTDISTRDYMSRVTERIDFLKQKVYAWANRIRRYKRRVDRYTQNRTFQRDERWVYRAWERPDQGVADTHLPDDDAMCSFWRSIWSVPVSHTEGEWTREVERACDLVPEMGAITISPQDVVRAVRPLPNWKSPGPDGLHNFWIKWFTRSHARLAILFQSALESGSLPEFLTTGITHLLHKSGSTAEPKNYRPIACLPTVYKVLTSILRAKINKHIDDNSVMSASQNGCRNGSRGTKELLLIDMAISQQVRRSRRDLSTCWIDYKKAYDSVPHTWLMRVLELYKVDSTLRIFLMSCMGQWRTVLRYPGCRQIQRNSEPIRIERGIFQGDSLSPLWFCLALNPLSTLLEDSGLGYRLRRGGQVISHLLYMDDLKLFAPNDLQLMELLKVTETFSSAIRMEFGVDKCAVMHVKRGEIVESVGTQLSDSINLRSLSATETYKYLGMSEALGINVADMKQSLKERFFGRLKKVFNSLLSGGNKVRAFNGWVMPVLMYSFGILKWTQTELDALDRRVRTLLTTYRMHHPRSSVMRLYIPRRCGGRGFLNAKTLHNREIYSLREYFLETDVGMHRDVVAVDKGLTPLSLAKENWRKPVVLDTNDRMEVWQSKELHGRFFRALHGPDVDLPASVAWLRSGDLFGETEGFVCAIMDEVMMTNNYRRFIVKDGTVDICRACHRPGESIRHIISGCSRLANGEYLHRHNLVARIIHQQLALKYNLVESEVPYYKYVPDPVLENGNITLYWDRSIVTDRTIVANKPDIVVVDRSERRAMIVDITVPHDENLVKVEKDKQIKYLDLAHEVVDMWDVDSAIIVPIVVSAHGLIAKSLDQYLRRLSLGSWIKGLIQKAVLLDTARIVRRFLSLEP

SEQ ID NO: 12262 - protein, 1197 aa, Noctua janthe
MLTRSATRRARLSPPDPSLSSASPPPESSPIVSAVTPAVAVASSSSDEYFSPPTTPPPVRRRGGRRPPDGLGPRGPPASDRVPAPGGSVPRMRWTQSINANVMRAYYGATEGGNNLTAYRVRMLSLFQVLEPAVNVSAQRLSDQVRVIQRNGMLDDTVLDRLRTEMQSSHVIATPPQTVVPPQSTIIPTHDNNVSNDMVTNVSTQCNEEMRCALEGAIREYRFMQPDLRPRVPRLPMHNKNKVLVAVLDSQLSNYFDNCENLTDAHSVLYCAAVAACRVAHVKFSDDRATRPNPAVPSWQYRIERRIGEARALIVKLICFREGNTRPRVMRFVRRAFSGTDISARDYMSRVTERIDFLKQKVYAWANRIRRYKRRVDRYTQNRTFQRDERWVYRAWERPDQGVADTHLPDDDAMCSFWRSIWSVPVSHTEGEWTREVERACDLVPEMGAITISPQDVVRAVRPLPNWKSPGPDGLHNFWIKWFTRSHARLAILFQSALESGSLPEFLTTGITHLLHKSGSTAEPKNYRPIACLPTVYKVLTSILRAKINKHIDDNSVMSASQNGCRNGSRGTKELLLIDMAISQQVRRSRRDLSTCWIDYKKAYDSVPHTWLMRVLELYKVDSTLRIFLMSCMGQWRTVLRYPGCRQIQRNSEPIRIERGIFQGDSLSPLWFCLALNPLSTLLEDSGLGYRLRRGGQVISHLLYMDDLKLFAPNDLQLMELLKVTETFSSAIRMEFGVDKCAVMHVKRGEIVESVGTQLSDSINLRSLSATETYKYLGMSEALGINVADIKQSLKERFFGRLKKVFNSLLSGGNKVRAFNGWVMPVLMYSFGILKWTQTELDALDRRVRTLLTTYRMHHPRSSVMRLYIPRRCGGRGFLNAKTLHNREICSLREYFLETDVGMHRDVVAVDKGLTPLSLAKENWRKPVVLDTNDRMEVWQSKELHGRFFRALHGPDVDLPASVAWLRSGDLFGETEGFVCAIMDEVMMTNNYRRFIVKDGTVDICRACHRPGESIRHIISGCSRLANGEYLHRHNLVARIIHQQLALKYNLVESEVPYYKYVPDPVLKNGNITLYWDRSIVTDRTIVANKPDIVVVDRSERRAMIVDITVPHDGNLVKAEKDKQIKYLDLAHEVVDMWDVDSAIIVPIVVSAHGLIAKSFDQYLRRLSLGSWIKGLIQKAVLLDTARIVRRFLSLEP

SEQ ID NO: 12263 - protein, 1197 aa, Noctua janthe
MLTRSATRRARLSPPDPSLSSASPPPESSPIVSAVTPAVAVASSSSDEYFSPPTTPPPVRRRGGRRPPDGLGPRGPPASDRVPAPGGSVPRMRWTQSINANVMRAYYGATEGGNNLTAYRVRMLSLFQVLEPAVNVSAQRLSDQVRVIQRNGMLDDTVLDRLRTEMQSSHVIATPPQTVVPPQSTIIPTHDNNVSNDMVTNVSTQCNEEMRCALEGAIREYRFMQPDLRPRVPRLPMHNKNKVLVAVLDSQLSNYFDNCENLTDAHSVLYCAAVAACRVAHVKFSDDRATRPKPAVPSWQYRIERRIGEARALIGKLICFREGNTRPRVMRFVRRAFSGTDISARDYMSRVTERIDFLKQKVYAWANRIRRYKRRVDRYTQNRTFQRDERWAYRAWERPDQGVADTHLPDDDAMCSFWRSIWSVPVSHTEGEWTREVERACDPVPEMGAITISPQDVVRAVRPLPNWKSPGPDGLHNFWIKWFTRSHARLAILFQSALESGSLPEFLTTGITHLLHKSGSTAEPKNYRPIACLPTVYKVLTSILRAKINKHIDDNSVMSASQNGCRNGSRGTKELLLIDMAISQQVRRSRRDLSTCWIDYKKAYDSVPHTWLMRVLELYKVDSTLRIFLMSCMRQWRTVLRYPGCRQIQRNSEPIRIERGIFQGDSLSPLWFCLALNPLSTLLEDSGLGYRLRRGGQVISHLLYMDDLKLFAPNDLQLMELLKVTETFSSAIRMEFGVDKCAVMHVKRGEIVESVGTQLSDSINLRSLSATETYKYLGMSEALGINVADMKQSLKERFFGRLKKVFNSLLSGGNKVRAFNGWVMPVLMYSFGILKWTQTELDALDRRVRTLLTTYRMHHPRSSVMRLYIPRRCGGRGFLNAKTLHNREIYSLREYFLETDVGMHRDVVAMDKGLTPLSLAKENWRKPVVLDTNDRMEIWQSKELHGRFFRALHGPDVDLPASVAWLRSGDLFGETEGFVCAIMDEVMMTNNYRRFIVKDGTVDICRACHRPGESIRHIISGCSRLANGEYLHRHNLVARIIHQQLALKYNLVESEVPYYKYVPDPVLENGNITLYWDRSIVTDRTIVANKPDIVVVDRSERRAMIVDITVPHDGNLVKAEKDKQIKYLDLAHEVVDMWDVDSAIIVPIVVSAHGLIAKSLDQYLRRLSLGSWIKGLIQKAVLLDTARIVRRFLSLEP

SEQ ID NO: 12264 - protein, 1197 aa, Noctua janthe
MLTRSATRRARLSPPDPSLSSASPPPESSPIVSAVTPAVAVASSSSDEYFSPPTTPPPVRRRGGRRPPDGLGPRGPPASDRVPAPGGSVPRMRWTQSINANVMRAYYGATEGGNNLTAYRVRMLSLFQVLEPAVNVSAQRLSDQVRVIQRNGMLDDTVLDRLRTEMQSSHVIATPPQTVVPPQSTIIPTHDNNVSNDMVTNVSTQCNEEMRCALEGAIREYRFMQPDLRPRVPRLPMHNKNKVLVAVLDSQLSNYFDNCENLTDAHSVLYCAAVAACRVAHVKFSDDRATRPNSAVPSWQYRIERRIGEARALIGKLICFREGNTRPRVMRFVRRAFSGTDISARDYMSRVTERIDFLKQKVYAWANRIRRYKRRVDRYTQNRTFQRDERWVYRAWERPDQGVADTHLPDDDAMCSFWRSIWSVPVSHTEGEWTREVERACDLVPEMGAITISPQDVVRAVRPLPNWKSPGPDGLHNFWIKWFTRSHARLAILFQSALESGSLPEFLTTGITHLLHKSGSTAEPKNYRPIACLPTVYKVLTSILRAKINKHIDDNSVMSASQNGCRNGSRGTKELLLIDMAISQQVRRSRRDLSTCWIDYKKAYDSVPHTWLMRVLELYKVDSTLRIFLMSCMGQWRTVLRYPGCRQIQRNSEPIRIERGIFQGDSLSPLWFCLALNPLSTLLEDSGLGYRLRRGGQVISHLLYMDDLKLFAPNDLQLMELLKVTETFSSAIRMEFGVDKCAVMHVKRGEIVESVGTQLSDSINLRSLSATETYKYLGMSEALGINVADMKQSLKERFFGRLKKVFNSLLSGGNKVRAFNGWVMPVLMYSFGILKWTQTELDALDKRVRTLLTTYRMHHPRSSVMRLYIPRRCGGRGFLNAKTLHNREICSLREYFLETDVGMHRDVVAVDKGLTPLSLAKENWRKPVVLDTNDRMEVWQSKELHGRFFRALHGPDVDLPASVAWLRSGDLFGETEGFVCAIMDEVMMTNNYRRFIVKDGTVDICRACHRPGESIRHIISGCSRLANGEYLHRHNLVARIIHQQLALKYNLVESEVPYYKYVPDPVLENGNITLYWDRSIVTDRTIVANKPDIVVVDRSERRAMIVDITVPHDGNLVKAEKDKQIKYLDLAHEVVDMWDVDSAIIVPIVVSAHGLIAKSLDQYLRRLSLGSWIKGLIQKAVLLDTARIVRRFLSLEP

SEQ ID NO: 12265 - protein, 1200 aa, Mythimna ferrago
MLTRSRARSQIAQPTSSGSSLSSASQPPGPAPAVSPEIPAAAVASSSSDEYFSPPTTPPPARRRGRGRPPACLGLRGPPASDRVPAAGGSVQRMRWTESINENVMRSYFGATEGGTNLTAYRGRMLSLFQVLEPAVNVSAQRLSDQVRVIQRNRMLDDAVLDRLRLESRNGRVTPISPPAAVQRQPSVSPRPDHVGEDDDDGAISVSTQCNARLRSALEDAFREYRSIPPELRPRLPRLPMHRKNRALVCALDSQLSNCFDSSKDLTDTHSILYCAAAAACRLAHVKIPNSDRATRPAKPAWQCRIERRIGEARALIGKLICFREGNTRPRVMRFVRRAFSGTDISPRDYLPRITERIDFLRQKVYAWANRIRRYKRRVERYTQNRAFQSNERWVYRAWERPDQSVIDTRLPDDDAMYSFWRSIWSVPVSHTEGDWTREVERECELIPEMGAITISPQDVARAVRPLPNWKSPGPDGLHNFWLKWFKSSHARLASQFQSALESGSLPQFLTTGITHLLHKSGSTAEPKNYRPITCLPTVYKVLTSILRAKINSHIETNSIMSASQNGCRNGSRGTKELLLIDVAISQQVRRSRRDLSTCWIDYKKAYDSVPHTWLMRVLELYKIDVTLRAFLMSCMGQRRTVLHYPGCRRVSENSEPLRIERGIFQGDSLSPLWFCLALNPLSTLLEGSGLGYRLRREGQVISHLLYMDDLKLFASNNLQLMELLKVTETFSSAIRMEFGLDKCAVMHVKRGEIMESVGTQLSDSIHLRSLSSTETYKYLGMSEALGINAADVKQSLRERFFGRLNKVLKSLLSGGNKVRAFNGWVMPVLMYSFGILKWTQTELDALDRRVRTLLTANRMHHPRSSVMRLYIPRKCGGRGFLNAKTLHNREVCSLREYFLETDVGMHRDVVAVDKGLTPLSLANENWRKPIVMDTNERKEVWKGKELHGRFYRALHGPDVDLLASVCWLRFGDLFGETEGFVFAIMDEVMMTNNYRKYIVKDGTVDICRACHRPGESIRHIISGCSHLANGDYLHRHNLVARIIHQQLALKYNLVESEVPYYRYVPDPVLENGSVTLYWDRSIITDRTIVANKPDIVVIDRLERRTMIVDIAVPHDENLVKAEKDKQTKYLDLAREVVDMWEVDRAIIVPIVVTANGLIAKSLDQHLRRLSLGSWVKGLIQKAVLLDTARIVRRFLTQEP

SEQ ID NO: 12266 - protein, 1198 aa, Mythimna ferrago
MLTRAAARRARLPAPASSLSSASPPPEPSPTVSAVTPAVAAASSSSDEYYSPPTTPPPTRRRGGRRPPACLGSRGPPASERVPATGGCVSRMRWTQSINENVTRAYFGATEGGNNLTAYRVRMLSLFQVLEPAVNVSAQRLSDQVRVIQRNHMLDDTVLDRLRTEMGSHAVTSSSQTVVPPQVSNHLSINADEEITDMVTYVSTQCNNELRSALECAIREYRNIPPELRPRIPRLPMCNKNRALVAALDSQLSNYFDDCEDLTDTHSIMYCAAVAACRVAHVKFPNTDVATRPKPAVPAWQCRIERRIGRARALIGKLICFREGNTRPRVMRFVRRAFSGTDISPRDYMSRVTERIDFLKQKVYAWANRIRRYKRRVERYIQNSTFRSNERWVYRTWERPDQGVTDTHLPDDDAMCSFWRNIWSVPVSHTEGGWTREVERACESITEMGAITISPQDVARAVRPLPNWKSPGPDGLHNFWIKWLQRSHARLASQYQTALESGSLPEFLTTGVTHLLHKSGSTAEPKKYRPITCLPTVYKVLTSILRAKINNHVDNNAIMSASQNGCRNGSRGTKELLLIDMAISQQVRRSRKDLSTCWIDYKKAYDSVPHTWLMRVLELYKVDATLCTFLMSCMRQWRTVLRYPGCRNIQRNSEPVRIERGIFQGDSLSPLWFCLALNPLSTLLENSGLGYRLKRGGQVISHLLYMDDLKLFAPNNLQLMELLKVTETFSSAIRMEFGVDKCAVMHIKRGEIVESVGTQLSDSIHLRSLSPTETYKYLGMSEALGINATDMKQSLKERFFGRLKKVLNSLLSGGNKVRAFNGWVMPVLMYAFGVLKWTQTELDALDRKVRTLLTAYRMHHPRSSVMRLYIPRKCGGRGFLNAKTLHNREVCSLREYFLAADVGMHRDVVAVDKGLTPLSLANENWRKPVVIDTNVRKEVWQSKELHGRFFRALHGPDVDQLASVAWLRVGDLFGETEGFVCAIMDEVIMTNNYRRFIVKDGTVDICRACHRPGESIRHIISGCSRLANGEYLHRHNLVARIIHQQLALKYSLVESEVPYYRYVPDPVLDSGDITLYWDRSIITDRTIVANKPDIVVVDRSERRAMIVDISVPHDENLVKAEKDKQIKYIDLAREVVDMWEVDSAIIVPIVVSANGLIAKSLDQHLRRLSLGDWIKGLIQKTVLLDTARIVRRFLSLEP

SEQ ID NO: 12267 - protein, 1200 aa, Mythimna ferrago
MLTRAAARRARPPPPASSLSSASPPSEPSLTESAVTPAVAAASSSSDEYYSPPMTPPPTRRRGGRRPPACLGPRGPPASDRVPAAGGSVPRMRWTQSTNENVMRAYYGRTEGGNNLTAYRVRMLSLFQVLEPAVNVSAQRLSDQVRVIQRNHMLDDTVLDRLRTEMSDRVITAPSQPVVPVVAPPPSHISFHTDEVSTDTVTNVSTQCNNELRSALECAIREYRNMPLEFRPRLPRLPMRNKNKALVAALDSQLSNYFDDCEDLTDTHSIMYCAAVAACRVAHVKFPNSDVATRPKPAVPAWHCRIERRIGGARALIGKPICFREGNTRPRVMRFVRRAFSGTDINPRDYMSRVTERIDFLKQKVYAWANRIRRYKRRVERYTQNSTFRSNERWVYRAWERPDQGVTDTRLPDDDAMCLFWRNIWSVPVSHTEGGWTREVERACESITEMGAITISPQDVARAVRPLPNWKSPGPDGLHNFWIKWLQRSHARLASQYQAALESGSLPEFLTTGVTHLLHKSGSTAEPKNYRPITCLPTAYKVLTSILRAKINHHVDNNAIMSASQNGCRNGSRGTKELLLIDMAISQQVRRSRKDLSTCWIDYKKAYDSVPHTWLMRVLELYKVDATLRTFLMSCMRQWRTVLRYPGCRNIQRNSEPVRIERGIFQGDSLSPLWFCLALNPLSTLLENSGLGYRLKRGGQAISHLLYMDDLKLFAPNNLQLMELLKVTETFSSAIRMEFGVDKCAVMHIKRGEIVESVGIQLSDSIHLRSLSPTETYKYLGMSEALGINATDMKQSLKERFFGRLKKVLNSLLSGGNKVRAFNGWVMPVLMYAFGVLKWTQTELDALDRKVRTLLTAYRMHHPRSSVMRLYIPRKCGGRGFLNAKTLHNREVCSLREYFLAANGGMHRAVVAVDKGLTPLSLANENWRKPVVLDTNVRKEVWQSKELHGRFFRALHGPDVDQLASVAWLRVGDLFGETEGFVCAIMDEVIMTNNYRRFIVKDGTVDICRACHRPGESIRHIISGCSRLANGEYLHRHNLVARIIHQQLALKYSLVESEVPYYRYVPDPVLDSGDITLYWDRSIITDRTIVANKPDIVVVDRRERRAMIVDISVPHDENLVKAEKDKQIKYIDLAREVVDMWNVDSAIIVPIVVSANGLIAKSLDQHLRRLSLGDWIKGLIQKAVLLDTARIVRRFLSLEP

SEQ ID NO: 12268 - protein, 975 aa, Mythimna ferrago
MPLEFRPRLPRLPMRNKNKALVAALDSQLSNYFDDCEDLTDTHSIMYCAAVAACRVAHVKFPNSDVATRPKPAVPAWQCRIERRIGGARALIGKLICFREGNTRPRVMRFVRRAFSGTDINPRDYMSRVTERIDFLKQKVYAWANRIRRYKRRVERYTQNSTFRSNERWVYRAWERPDQGVTDTRLPDDDAMCLFWRNIWSVPVSHTEGGWTREVERACESITEMGAITISPQDVARAVRPLPNWKSPGPDGLQNFWIKWLQRSHARLASQYQAALESGSLPEFLTTGVTHLLHKSGSTAEPKNYRPITCLPTVYKVLTSILRAKINHHVDNNAIMSASQNGCRNGSRGTKELLLIDMAISQQVRRSRKDLSTCWIDYKKAYDSVPHTWLMRVLELYKVDATLRTFLMSCMRQWRTVLRYPGCRNIQRNSEPVRIERGIFQGDSLSPLWFCLALNPLSTLLENSGLGYRLKRGGQAISHLLYMDDLKLFAPNNLQLMELLKVTETFSSAIRMEFGVDKCAVMHIKRGEIVESVGIQLSDSIHLRSLSPTETYKYLGMSEALGINATDMKQSLKERFFGRLKKVLNSLLSGGNKVRAFNGWVMPVLMYAFGVLKWTQTELDALDRRVRTLLTAYRMHHPRSSVMRLYIPRKCGGRGFLNAKTLHNREVCSLREYFLAADGGMHRAVVAVDKGLTPLSLANENWRKPVVLDTNVRKEVWQSKELHGRFFRALHGPDVDQLASVAWLRVGDLFGETEGFVCAIMDEVIMTNNYRRFIVKDGTVDICRACHRPGESIRHIISGCSRLANGEYLHRHNLVARIIHQQLALKYSLVESEVPYYRYVPDPVLDSGDITLYWDRSIITDRTIVANKPDIVVVDRRERRAMIVDISVPHDENLVKAEKDKQIKYIDLAREVVDMWNVDSAIIVPIVVSANGLIAKSLDQHLRRLSLSGWIKGLIQKAVLLDTARIVRRFLSLEP

SEQ ID NO: 12269 - protein, 1048 aa, Mythimna ferrago
MLDETVLDRLRTEMSDRVITPPSQPVVPVVVPPSSYISFDTNEVNSDTVTNVSNQCNSELRSALEFAIREYRNMPSELRPRIPRLPMCNKNRALVAALDSQLSSYFDDCEDLTDTHSIMYCAAVAACRVAHVKFPNSDVATRPKPAVPAWQCRIERRIGGARALIGKLICFREGNTRPRVMRFVRRAFSGTDISPRDYMSRVTERIDFLKQKVYAWANRIRRYKRRVERYTQNRTFRSNERWVYRAWERPDQGVTDVRLPDDDAMSSFWRSIWSVPVSHTEGDWIRGIERACDPIPQMGAIDISPQDVARAVRPLPNWKSPGPDGLHNFWIKWFTRSHARLAYQFQSALESGSLPQFLTTGIPHLLHKSGSTAEPKNYRPITCLPTVYKVLTSILRSKINSHIDENSIMSHSQNGCRNRSRGTKELLLVDMTISQQVRRSRKDLSTCWIDYKKAYDSVPHTWLMRVLELYKIDTTLRTFLMSCMRQWSTVLRYPGCRNIQRNSEPVKIERGIFQGDSLSPLWFCLALNPLSTLLENSGLGYRLKRGGQVISHLLYMDDLKLFAPNNLQLMELLKVTETFSSAIRMEFGVDKCAVMHVKRGEVVESVSTRLTDSINLRSLSPTETYKYLGMSEALGISITNMKQSLKERFFGRLKKVFNSLLSGGNKVRAFNGWVMPVLMYSFGVLKWTQTELDALDRRVRTLLTAYRMHHPRSSVMRLYIPRKCGGRGFLNAKTLHNREVCSLREYFLAADVGMHRDVVAVDKGLTPLSLANENWRKPIVLDTNDRREVWQSKELHGRFFRALHGPDVDQLASVAWLRFGDLFGETEGFVCAIMDEVIMTNNYRRFIVKDGTVDICRACQRPGESIRHIISGCSRLANGEYLHRHNLVARIIHQQLALKYSLVESEVPYYRYEPDPVLDNGHITLYWDRPIITDRTIVANKPDIVVVDRSERRAMIVDISVPHDENLVKAEKDKQIKYIDLAREVVDMWEVDSAIIVPIIVSANGLIAKSLDQQLRRLSLGDWIKGLIQKAVLLDTARIVRRFLSLEP

SEQ ID NO: 12270 - protein, 1091 aa, Eilema sororculum
MAVRSSPRQLVDNNNNNNTLFQALEPSINVSAQRLSDQVRVIQRNRMLNETVLETLRLECLRNICVTPAPVPVPASTVELNDDTCVAPDDTPIPVSIQYNEEIKEALECALREYRSMPVHVRPRLPRLPIHRRNIALVSALDSLLPRYLENSENLGDTHSILYCTAVAACRMAGAKFPIKDPAIRPKSAIPAWQCRIERRVTEARVLIGKLICFRSGNTRPRVMRYVTRAFAGTDISPQDYTSRVTERIDFLKQKVYAWANRIRRYKKRVDRYTVNRMFQRDQRWVYRSWERTEESVDDVRRPDAEVTNAFWRSIWSVPVSHTEGDWMHEVKRACETIPEMEEINIDAIDVDCAVRSLSNWKSPGPDGLHNFWLKWLRSSHVVLASQFQSAVESGTLPAFMTTGVTHLLHKTGSTLEPNNYRPITCLPTVYKLLTSILRAKINNHINNNSIMCASQNGCRNGARGTKELLLIDMAISQQARRNRKDLTACWIDYKKAFDSVPHTWLLRVLELYKVNTTLCTFLRSCMGQWRTVLFYPGCRQALGGGVPITIERGIFQGDSLSPLWFCLALNPLSTLLVNSGLGYRLRREGQMVSHLFYMDDLKLFAHTNPQLITLLKITETFSNSIKMAFGVDKCAVIHVKRGRVVESEGIQLSDSTNLRSLLVTETYKYLGMSQALCINEVDMKQMLQERFFGRLKKVLNSLLSGGNKVRACNSWVMPLLMYSFGILKWTQTELDTIDRKVRTQLTAFRMHHPRSSVMRLYIPRKCGGRGFLNAKTLHNREVCNLRDYFLKSNVDMHRDVVNVDTGLTPLGLAKENWRRPTIVSTDSRREVWQSKELHGRFYRALHRPEVDLLASVSWLRFSDLFGETEGFVCAIADEVIKTNNYRKYIMRDGTIDICRACHQPGESLRHFTSGCSRLANGEYLHRHNQVARIIHQRLALKYNLVEFEVPYYRYVPEPVLENTHITLYWDRSIITDRTVVANKPDIVVIDRSERRALIVDVTIPHDENLVKAEKDKQVKYLDLAHEVVDMWNVDSAIIVPIVVSVNGLIAKSLDQHLKRLGLDGWVKGQMQKAVLLDTARIVRKFLSLEP

SEQ ID NO: 12271 - protein, 1194 aa, Eilema sororculum
MLTRAQASRNRSAPTTSPDSSLSSAAQPPAVEPAASSSSSSDEFFSPPTSPTPVRRPGRGRPPTCLGPRRPPASNRAPATGGDVHRMRWTITINENVMRAYFAATEGGTNLSAYRTRMLPLFQALEPSINVSAQRLSDQVRVIQRNRMLNETVLETLRLECLRNICVTPAPAPAPAPASTVEINDDTCVAPDDTPIPVSIQYNEEIKEALECALREYRSMPVHVRPRLPRLPIHRRNIALVSALDSLLPRYLENSENLGDTHSILYCTAVAACRMAGAKFPNKDPAIRLKSAIPAWQCRIERRVAEARVLIGKLICFRSGNTRPRVMRYVTRAFAGTDISPQDYTSRVTERIDFLKQKVYAWANRIRRYKKRVDRYTVNRMFQRDQRWVYRSWERTEESVDDVRRPDAETTNAFWRSIWSVPVNHTEGDWMREVERACETIPEMEKINIDAIDVDCAVRSLSNWKSPGPDGLHNFWLKWLRSSHVVLASQFQSAVESGTLPAFMTTGVTHLLHKTGSTLEPNNYRPITCLPTVYKLLTSILRAKINNHINNNSIMCASQNGCRNGARGTKELLLIDMAISQQARRNRKDLTACWIDYKKAFDSVPHTWLLRVLELYKVNTTLCTFLRSCMGQWRTVLFYPGCRQALGSGEPITIERGIFQGDSLSPLWFCLALNPLSTLLVNSGLGYRLRREGQLVSHLFYMDDLKLFAHTNPQLIALLKVTETFSNSIKMAFGVDKCAVIHVKRGRVVESEGIQLSDSTNLRSLLVTETYKYLGMSQALCINEVDMKQMLQERFFGRLKKVLNSLLSGGNKVRACNSWVMPLLMYSFGILKWTQTELDTIDRKVRTQLTAFRMHHPRSSVMRLYIPRKCGGRGFLNAKTLHNREVCNLRDYFLKSNVDMHRDVVNVDTGLTPLGLAKENWRRPTIVGTDSRREVWQSKELHGRFYRALHRPEVDLLASVSWLRFSDLFGETEGFVCAIADEVIKTNNYRKYIMRDGTIDICRACHQPGESLRHITSGCSRLANGEYLHRHNQVARIIHQRLALKYNLVEVEVPYYRYVPEPVLENSHITLYWDRSIITDRTVVANKPDIVVIDRSERRALIVDVTIPHDENLVKAEKDKQVKYLDLAHEVVDMWNVDSAIIVPIVVSVNGLIAKSLDQHLKRLGLDGWVKGQMQKAVLLDTARIVRKFLSLEP

SEQ ID NO: 12272 - protein, 1045 aa, Eilema sororculum
MLNETVLETLRLECLRNICVTPAPAPAPASTAEINDDTYVAPDDTPIPVSIQYNEEIKEALECALREYRSMPVHVRPRLPRLPIHRRNIALVSALDSLLPRYLENSENLGDTHSILYCTAVAACRMAGAKFPIKDPGIRPKFTIPAWQCRIERRVAEARVLISKLICFRSGNTRPRVMRYVTRAFAGTDISPQDYTSRVTERIDFLKQKVCAWANRIRRYRKRVDRYTVNRMFQRDQRWVYRSWERTDESVDDVRRPDAEATNAFWRSIWSVPVSHTEGDWMREVERACETIPEMEEIYIDATDVDCAVRSLSNWKSPGPDGLHNFWLKWLRSSHVVLASQFQSAIESGTLPAFMTTGVTHLLHKTGSTLEPNNYRPITCLPTVYKLLTSILRAKINNHINNNSIMCASQNGCRNGARGTKELLLIDMAISQQVRRNRKDLTVCWIDYKKAFDSVPHTWLLRVLELYKVNTTLCTFLRSCMRQWRTVLFYPGCRQALGGGVPITIERGIFQGDSLSPLWFCLALNPLSALLVNSGLGYRLRREGQVVSHLFYMDDLKLFAHTNPQLIALLKVTETFSNSIKMAFGVDKCAVIHVKRGRVVESEGIQLSDPTNLRSLLVTETYKYLGMSQALCINEVDMKQLLQERFFGRLKKVLNSLLSGGNKVRACNSWVMPLLMYSFGILKWTQTELDTIDRKVRTQLTAFRMHLPRSSVMRLYIPRKCGGRGFLNAKTLHNREVCNLRDYFLKSNVDMHRDVVNVDTGLTPLGLAKENWRRPTIVSTDSRREVWQSKELHGRFYRALHRPEVDLLASVAWLRFSDLFGETEGFVCAIADEVIKTNNYRKYIMRDGTIDICRACHQPGESLRHITSGCSRLANGEYLHRHNQVARIIHQRLALKYNLVEVEVPYYRYVPEPVLENSHITLYWDRSIITDRTVIANKPDIVVIDRSERRALIVDVTIPHDENLVKAEKDKQVKYLDLAHEVVDMWNVDSAIIVPIVVSVNGLIAKSLDQHLKRLGLDGWVKGQMQKAVLLDTARIVRKFLSLEP

SEQ ID NO: 12273 - protein, 1046 aa, Eilema depressum
MLNETVLETLRQECLRNICVTPAPAPASTPAPVQTHQLVEETGDDTLIPVSIQYNEQIKEALECALREYRSMPMNDRPRLPRLPLHRRNIALVSALDSLLPSYLDNSENLGDTHSILYCTAVAACRMAGVKFPIKDPAIRPKSAIPAWQCRIERRVAEARVLIGKLICFRSGNTRPRVMRYVTRAFAGTDISPQEYTSRITERIDFLKQKVCAWANRIRRYRKRVDRFTVNCMFRRDQRWVYRGWEQTGESVDDVRRPEAAATNAFWRSIWSVPVSHTEGDWMCEVEGACESIPEMEDITIDAIDVDCAVRPLSNWKSPGPDGLHNFWLKWLRSSHALLASQFQSAVESGMLPAFMTTGVTHLLHKTGSTLEPNNYRPITCLPTVYKLLTSILRVKINNHINNNSIMCASQNGCRNGARGTKELLLIDMAISQQARRRNKDLAACWIDYKKAFDSVPHTWLLRVLELYKVNATLCTFLRSCMRQWRTVLFYPGCRQALGDGEPITIERGIFQGDSLSPLWFCLALNPLSTLLVNSGLGYRLRREGQMVSHLLYMDDLKLFAHTNPQLMALLKITENFSNSIKMGFGVEKCAVIHVKRGRVVESQGIQLSDSTSLRSLLVTETYKYLGMSQALCINEAGMKQMLQERFFGRLKKVLNSLLSGGNKVRACNSWVMPLLMYSFGILKWTQTELDTIDRRVRTQLTAFRMHHPRSSVMRLYIPRKCGGRGFLNAKTLHNREVCNLRDYFLKSNVDMHRDVVSVDTGLTPLGLAKENWRRPIVVGTDSRREVWQSKELHGRFYRALHRPEVDLLASVSWLRFGDLFGETEGFVCAIADEVIKTNNYRKYIMRDGTIDICRACHQPGESLRHITSGCSRLANGEYLHRHNQVARIIHQRLALKYNLVELEVPYYRYVPEPVLENSHITLYWDRSIITDRTVVANKPDIVVIDRSERRALIVDVTIPHDENLVKAEKDKQVKYLDLAHEIVDMWNVDSAIIVPIVVTVNGLIAKSLDQHLKRLGLDGWVKGQMQKAVLLDTARIVRKFLSLEP

SEQ ID NO: 12274 - protein, 1204 aa, Agrochola circellaris
MLTRSRARRLIDTHPTPSDSSLSSTSQLPDPAPDVSPVIPAAAAASSSSDEYFSPPTSPPPARRGRGRPPASLGLRGPPASDRVPAPGGSVRRMRWTQTVNENVMRAYFGATEGGSNLTAYRGRMLSLFQVLEPTVNVSAQRLSDQVRVIQRNHMLDDAVLDRLRLESRNNRVTPASPLVAVQLQNSLSATPRPDHVGEEVDDGVISVSSQCNARLRNALEDAFREYRSTPPGLRPRLPRLPMHKKNKALVCTLDSLLSNYFDGSNDLADTHSILYCAAVAACRVAHVKFPSSDRAPRPKPAVPAWQCRIERRIGEARVLIGKLICFREGNTRPRVMRFVKRAFSGTDTSSRDYLTRVTERIDFLKQKICAWANRIRRYRRRVERYTQNRTFQSDERWVYRAWERLDQGVIDTRLPDDDAMCSFWRSIWSAPVNHTEGDWTGKIERACERIPEMGAITISPQDVACAVRPLPNWKSPGPDGLHNFWIKWLQRSHARLASQFQSALESGSLPQFLTTGITHLLHKSGSTAEPKNYRPITCLPTVYKVFTSILRTKINKHIDTNSIMSASQNGCKNGSRGTKELLLIDMAINQQVRRSRRDLSTCWIDYKKAYDSVPHTWLMRVLELYKVDATLRTFLISCMGQWRTVLRYPGCRQIQRNSEPIRIERGIFQGDSLSPLWFCLALNPLSTLLEDSGLGYRLRRGGQVISHLLYMDDLKLFAPNNLQLVELLKVTETFSSAIRMEFGVDKCAVMHVKRGGIVESGGTQLPDSIHLRSLSSIETYKYLGMSEALGINTADMKQSLKERFFDRLNKVLNSLLSGGNKVRAFNGWVMPVLMYSFGILKWTQTELDALDRRVRTLLTVNRMHHPRSSVMRLYIPRKCGGRGFLNAKTLHNREVCSLREYFLETDVGMHRDVVSVDKGLTPLSLANENWRKPIVLDTNDRREVWQSKELHGRFYRALHGPDVDLLASVAWLRFGDLFGETEGFVFAIMDEVMMTNNYRKYIVKDGTVDICRACHRPGESIRHIISGCSRLANGDYLHRHNLVARIIHQQLALKYNLVESEVPYYKYVPDPVLENGNITLYWDRSIITDRTIVANKPDIVVIDRLERRTMIIDIAVPHDENLVKAEKDKQIKYLDLAREVVDMWDVDTAVIVPIVVTANGVIAKSLDQHLRRLSLGSWIKGLIQKAVLLDTARIVRRFLSQEP

SEQ ID NO: 12275 - protein, 1201 aa, Hydraecia micacea
MLTRSAAARRARIPPPDSSLSSASPPAPLVSSPTVSAVMTPAAAVASSSSDEYFSPPTTPPPARRRGGRRPPDGLGPRGPPASDRVPAPGGSVQRMRWTRSINENVMRSYYGATEGGSNLTAYRVRMLSLFQVLEPAVNVSAQRLSDQVRVIQRNHMLDDTVLDRLRNEIQSSHAIAPQSQTAVILPQSNTSHADEGSNDRATNVSTQCNEELRSALEDAIQEYRFMSPELRPRLPRLPMHNKNRALVAVLNSQLSKYFDDCEDLTDTHSILYCAAVAACRVAHVKFTNDSRATRPKPAVPAWQCRIERRIGGARALIGKLICFREGNTRPRVMRFVRRAFLGTDISPQDYTSCVTERIDFLKQKVYAWANRIRRYKRRVERYTQNRTFQSDERWVYRDWERPDQSVADTCLPDDDAMCSFWRSIWSVPVSHTEGDWARDIERACDPIPEMEAITICPQDVARAVRPLPNWKSLGPDGLHNFWIKWFSRSHARLASQFQTALESGSLPQFLTTGITHLLHKSGSTAEPKNYRPITCLPTVYKVLTSILRAKINKHIDTNFIMSASQNGCRNGSRGTKELLLIDMTISQQVRRFRKDLSTCWIDYKKAYDSVPHTWLMRVLELYKVDTTLRTFLMSCMGQWRTVLRYPGCRNIQRNSEPIRIERGIFQGDSLSPLWFCLALNPLSTLLEDSGLGYRLRRGGQVISHLLYMDDLKLFAPNNLQLMELLKVTQTFSNAIRMEFGVDKCAVMHVKRGEIVESVGNQLSDSTNLRALSASETYKYLGMSEALGINVTDMKKSLKERFFGRLKKVLNSLLSGGNKVRAFNGWVMPVLMYSFGILKWTQTELDALDRRVRTLLTANRMHHPRSSVMRLYIPRKCGGRGFLNSKTLHNREICSLREYFLETDVGMHRDVVMVDKGLTPLSLAKENWRKPVVLDTNDRMEVWQSKELHGRFFRALHGPDVDLLASVAWLRFGDLFGETEGFVCAIMDEVMMTNNYRRFIVKDGTVDICRACHRPGESIRHIISGCSRLANGEYLHRHNLVARIIHQQLALKYSLVESEVPYYRYVPDPVLENGNITLYWDRSIITDRTIVANKPDIVVVDRSERRAMIVDITVPHDENLVKAEKDKQIKYLDLAREVVDMWDVDSAIIVPIVVTANGLIAKSLDQHLRRLSLASWIKGLIQKAVLLDTARIVRRFLSLEP

SEQ ID NO: 12276 - protein, 1163 aa, Hydraecia micacea
MTPAAAVASSSSDEYFSPPTTPPPARRRGGRRPPDGLGPRGPPASDRVPAPGGSVQRMRWTRSINENVMRSYYGATEGGSNLTAYRVRMLSLFQVLEPAVNVSAQRLSDQVRVIQRNHMLDDTVLDRLRNEIQSSHAIAPQSQTAVILPQSNTSHADEGSNDRATNVSTQCNEELSSALEDAIQEYRFMSPELRPRLPRLPMHNKNRALVAVLNSQLSKYFDDCEDLTDTHSILYCAAVAACRVAHVKFTNDSRATRPKPAVPAWQCRIERRIGGARALIGKLICFREGNTRPRVMRFVRRAFLGTDISPQDYTSCVTERIDFLKQKVYAWANRIRRYKRRVERYTQNRTFQSDERWVYRDWERPDQSVADTCLPDDDAMCSFWRSIWSVPVSHTEGDWARDVERACDPIPEMEAITICPQDVARAVRPLPNWKSPGPDGLHNFWIKWFSRSHARLASQFQTALESGSLPQFLTTGITHLLHKSGSTAEPKNYRPITCLPTVYKVLTSILRAKINKHIDTNFIMSASQNGCRNGSRGTKELLLIDMTISQQVRRFRKDLSTCWIDYKKAYDSVPHTWLMRVLELYKVDTTLRTFLMSCMGQWRTVLRYPGCRNIQRNSEPIRIERGIFQGDSLSPLWFCLALNPLSTLLEDSGLGYRLRRGGQVISHLLYMDDLKLFAPNNLQLMELLKVTQTFSNAIRMEFGVDKCAVMHVKRGEIVESVGNQLSDSTNLRALSASETYKYLGMSEALGINVTDMKQSLKERFFGRLKKVLNSLLSGGNKVRAFNGWVMPVLMYSFGILKWTQTELDALDRRVRTLLTANRMHHPRSSVMRLYIPRKCGGRGFLNSKTLHNREICSLREYFLETDVGMHRDVVMVDKGLTPLSLAKENWRKPVVLDTNDRMEVWQSKELHGRFFRALHGPDVDLLASVAWLRFGDLFGETEGFVCAIMDEVMMTNNYRRFIVKDGTVDICRACHRPGESIRHIISGCSRLANGEYLHRHNLVARIIHQQLALKYSLVESEVPYYRYVPDPVLENGNITLYWDRSIITDRTIVANKPDIVVVDRSERRAMIVDITVPHDENLVKAEKDKQIKYLDLAREVVDMWDVDSAIIVPIVVTANGLIAKSLDQHLRRLSLASWIKGLIQKAVLLDTARIVRRFLSLEP

SEQ ID NO: 12277 - protein, 1204 aa, Hydraecia micacea
MLTRSRARRLPNITHPTSSGSSLSSASHLPEPAPDVSPVSPAAAVASSSSDEYFSPPTTPPPVCRRGRGRPPASLGLRGPPASERVPAPGGSVQRMRWTQTVNENVMRAYFGATEGGSNLTAYRGRMLSLFQVLEPAVNVSAQRLSDQVRVIQRNHMLDNVVLDRLRLESRNSHVTPASSLVAVQLQPSVPLRPDCVDVEDDDEAISVSSQCNARLRSALEDAFREYRSIPPGLRPRLPRLPMHKKNKALVCALDSQLSNCFNDSKDLADTHSILYCAAVAACRVAHVKFPNSDRAPRPKPAVPAWQCRIECRIGEARALIGKLICFREGNTRPRVMRFVRRAFSGTDISSRDYLSRVTERIDFLKQKICAWANRIRRYRRRVERYTQNRRFQSDERWVYRAWERPDQVVTDTRLPDDDAMCSFWRNIWSVPVSHTEGDWTGKIEQACDLIPEMEALIISPQDVARAVRPLPNWKSPGPDGLHNFWIKWFKRSHDRLASQFQSALESGSLPQFLTTGITHLLYKSGSTADPKNYRPITCLPTVYKVLTSILRAKINKHIDTNSIMSVSQNGCKNGSRGTKELLLIDVTINQQVRRSRKDLSTCWIDYKKAYDSVPHTWLMRVLELYKVDTTLCTILMSCMGQWRTVLRYPGCRNIQRNSEPIRIERGIFQGDSLSPLWFCLALNPLSTLLEDSGLGYRLRRGGQVISHLLYMDDLKLFAPNNLQLMELLKITKTFSSAIRMEFGVDKFAVMHVKRGEIVESVGNQLSDSTNLRALSASDTYKYLGMSEALGINVTDMKQSLKERFFGRLKKVFNSLLSGGNKVRAFNDWVMPVLMYSFGILKWTQTELDALDRKVRTLLTANRMHHPRSSVMRLYIPRKCGGRGFLNAKTLHNREICSLREYFLETDVGMHRDVVVVDNGLTPLSLGKENWRKPVVLDTNDRMEVWQSKELHGRFFRALHGPDVDLLASVAWLRFGDLFGETEGFVCAIMDEVMMTNNYRRFIVKDGTVDICRACHRPGESIRHIISGCSRLANGEYLHRHNLVARIIHQQLALKYSLVESEVPYYRYVPDPVLENGNITLYWDRSIITDRTIVANKPDIVVMDRLERRAMIVDITVPHDENLVKAEKDKQIKYLDLAREVVDMWDVDSAIIVPIVVTANGLIAKSLDQHLRRLSLASWIKGLIQKAVLLDTARIVRRFLSLEP

SEQ ID NO: 12278 - protein, 1045 aa, Hydraecia micacea
MLDDTVLDRLRNEIQSSHAIAPQSQTAVILPQSNTSHADEGSNDRATNVSTQCNEELRSALEDAIQEYRSMSPELRPRLPRLPMHNKNRALVAVLNSQLSKYFDDCEDLTDTHSILYCAAVAACRVAHVKFTNDSRATRPKPAVPAWQCRIERRIGGARALIGKLICFREGNTRPRVMRFVRRAFLGTDISPQAYTSCVTERIDFLKQKVYAWANRIRRYKRRVERYAQNRTFQSDERWVYRDWERPDQSVADTCLPDDDAMCSFWRSIWSVPVSHTEGDWARDIERVCDPIPEMEAITICPQDVARAVRPLPNWKSPGPDGLHNFWIKWFSRSHARLASQFQTALESGSLPQFLTTGITHLLHKSGSTAEPKNYRPITCLPTVYKVLTSILRAKINKHIDTNFIMSASQNGCRNGSRGTKELLLIDMTISQQVRRFRKDLSTCWIDYKKAYDSVPHTWLMRVLELYKVDTTLRTFLMSCMGQWRTVLRYPGCRNIQRNSEPIRIERGIFQGDSLSPLWFCLALNPLSTLLEDSGLGYRLRRGGQVISHLLYMDDLKLFAPNNLQLMELLKVTQTFSNAIRMEFGVDKCAVMHVKRGEIVESVGNQLSDSTNLRALSASETYKYLGMSEALGINVTDMKQSLKERFFGRLKKVLNSLLSGGNKVRAFNGWVMPVLMYSFGILKWTQTELDALDRRVRTLLTANRMHHPRSSVMRLYIPRKCGGRGFLNSKTLHNREICSLREYFLETDVGMHRDVVMVDKGLTPLSLAKENWRKPVVLDTNDRMEVWQSKELHGRFFRALHGPDVDLLASVAWLRFGDLFGETEGFVCAIMDEVMMTNNYRRFIVKDGTVDICRACHRPGESIRHIISGCSRLANGEYLHRHNLVARIIHQQLALKYSLVESEVPYYRYVPDPVLENGNITLYWDRSIITDRTIIANKPDIVVVDRSERRAMIVDITVPHDENLVKAEKDKQIKYLDLAREVVDMWDVDSAIIVPIVVTANGLIAKSLDQHLRRLSLGSWIKGLIQKAVLLDTARIVRRFLSLEP

SEQ ID NO: 12279 - protein, 1198 aa, Eupsilia transversa
MLTRSRARQNTHPTSSGSSLSSASQLPEPGTDVSPVIPAAAAASSSSDEYFSPPSTPPPVRRRGRGRPPASLGPRGPPASDRVPAPGGSVQRMRWTQTINENVMRAYFGATEGGSNLTAYRRRMLSLFQVLEPAVNVSAQRLSDQVRVIQRNHMLDDSVLDRLRIEMQSSHVIAPPSRTVVAPLQSNSDRADVGSDDRATNVSTQCNEELRSALEDAIREYRFMSPELRPRLPRLPMHNKNRALVAVLDSQLSNYFDDCENLTDTHSILYCAAVAACRVAHVKFTNDSGATRPKSVVPAWQCRIERRIGEARTLIGKLFCFREGNTRPRVMRFVRRAFSGTDISPEDYMARVTERIDFLKQKVYAWANRIRRYKRRVDRYTQNRTFQSDERWVYRAWEQPDQGVTDTHLPDDNAMCSFWRSIWSVPVSHTEGDWTREVERACDPIPEMGAITICPQDVARAVRPLPNWKSPGPDGLHNFWIKWFQRSHARLAAQYQAALESGSLPQFLTTGVTHLLHKSGSTAEPKNYRPITCLPTVYKVLTSILRAKINKHIDTNSIMSVAQNGCKNGSRGTKELLLIDMAISQQVRRSRKDLSICWIDYKKAYDSVPHTWLMRVLELYKVDATLRTFLMACMGQWRTVLRYPGCRNIQRNSEPIRIERGIFQGDSLSPLWFCLALNPLSTLLEDSGLGYRLRRGGQVISHLLYMDDLKLFAPNNLQLMELLKVTETFSSAIRMEFGVDKCAVMHVKRGKIVESVGAQLSDSINLRALSATETYKYLGMSEALGINVTDMKQSLKERFFGRLKKVFNSLLSGGNKVRAFNGWVMPVLMYSFGILKWTQTELDALDRRVRTLLTAYRMHHPRSSVMRLYIPRRCGGRGFLNAKTLHNREICSLREYFLETDVGMHRDVVAVDKGLTPLSLAKENWRNPVVLDINDRSEVWQSKELHGRFFRALHGPDVDLLASVAWLRFGDLFGETEGFVCAIMDEVIMTNNYRRFIVKDGTVDICRACHRPGESIRHIISGCSRLANEEYLHRHNLVARIIHQQLALKYSLVESEVPYYRYVPDPVLENGNITLYWDRSIITDRTIVANKPDIVVVDRIERRTMIIDITVPHDGNLVKAEKDKQIKYLDLAREVVDMWDVDSAIVVPIVVTANGLIAKSLDQHLRRLSLGSWIKGLIQKAVLLDTARIVRRFLSLEP

SEQ ID NO: 12280 - protein, 1204 aa, Amphipyra tragopoginis
MMTRSRAKAQSTQPPPSASSLSSASQPPEPASTVSDVTPAAAVASSSSDEYFSPATSPPPARRRGRGRPPASLGPRGPPASDRVPAPGGSVQRMRWTQSMNENCMRAYFGATEGGTNLTAYRGRMLSLFQALEPAVNVSAQRLSDQVRVIQRDRRLDDAALDRLRSEVQSSRIGALQSQTAVQSQVPLEVVPRSIPADEEGDDRVTNVSTQCNESLRSALELAIREYRSTPPDLRPRLPRLPMNKKNKALMCALDSLLSSYFDGSEDLTDTHSILYCAAVAACRVAHVKVDNNDRATRPKLAVPAWQCRIERRIGEARALIGKLICFREGNTRPRVMRFVRRAFSGTDTNPRDYMSRVTERIDFLKQKVYAWANRIRRYRRRVERYTQNRMFQRDQRWVYRAWERSDQGVGDAHLPDDDAMNSFWRSIWSVPVSHTEGGWIRDVERVCEPILDMGAISISPQDVASAVRPLPNWKSPGPDGLHNFWLKWLRSSHARLASQFQSSLETGTLPQFLTTGVTHLLHKSGSTAEPKNYRPITCLPTVYKLLTSILRGRISSHIENNSIMSASQNGCRNGSRGTKELLLIDMAISQQVRRSRKDLSTCWIDYKKAYDSVPHTWLMRVLELYKINATLRTFLMSCMGQWRTVLHYPGCRQIQGNGELIRIERGIFQGDSLSPLWFCLALNPLSTLLEGSGLGYRLRRGGQVISHLLYMDDLKLFAPNNLQLLELLKVTETFSNSIRMEFGVDKCAVMHVKRGRIMESVGTQLSDSIQLRSLSSTETYKYLGMSEALGINEADMKQSLRERFFGRLIKVLKSLLSGGNKVRAFNGWVMPVLMYSFGMLRWTQTELDALDRRVRTLLTAYRMHHPRSSVMRLYIPRKCGGRGFLNAKTLHNREVCSLREYFSQADVGMHRDVVAVDKGLTPLSLAKENWRKPVVLDTNGRREVWRSKELHGRFYRALYGPDVDFLASVAWLRFGDLFGETEGFVCAIMDEVMMTNNYRKYIVKDGTVDICRACHCPGESIRHIVSGCSRLANGEYLHRHNLVARIIHQQLALKYDLVDSEVPYYRYVPDPVLENGHVTLYWDRSIITDRTIVANKPDIVVIDRSERRAMIVDITVPHDENLVKAENEKKIKYLDLAHEVVDMWDIDSAVIVPIVVTANGLIAKSLDQHLMRLSLGSWIKGLIQKAVLLDTARIVRKFLSLEP

SEQ ID NO: 12281 - protein, 1204 aa, Amphipyra tragopoginis
MLTRSRAKALSTHLPPSASSLSSASQPPEPASIVSVVTPAAAVASSSSDEYFSPATTPPPARRRGRGRPPACLGPRGPPASDRVPAPGGSVQRMRWTQSMNENCMRAYFGATEGGTNLTAYRGRMLSLFQALEPAVNVSAQRLSDQVRVIQRGHMLDDTVLDRLRSEVQSSPVISPSSQVLGQQQNFAAAFPRPNHAGEEDDDRATNVSTQYNEELRSALEDAMREYRYTRSDLRPRIPRLPMNRKNRALVCALDSLLSNYFDGSEDLGDTHSILYCAAVATCRVAHVKFIDNERATRPKNAVPAWQCRIERRIAEARALIGKLICFREGNIRPRVMRFVRRAFSGTDVSPREYMSRVTERIDFLKQKVCAWANRIRRYRRRVDRYTQNRLFQSDERWVYRTWERPDQRVSDTHLPDNDVMNAFWRNIWSVPVTHIEGDWMQEVQRACEPIQEMGDIIISPQDVASAVRPMSNWKSPGPDGLHNFWLKWLRSSHARLASQFQSSLESGSLPQFLTTGVTHLLHKSGSTAEPKNYRPITCLPTVYKVLTSILRAKINNHIDNNSIMSASQNGCRNGSRGTKELLLIDMAISQQVRRSRKDLSTCWIDYKKAYDSVPHTWLMRVLELYKVNTTLCAFLTSCMGQWRTVLHYPGCRQIQRMGEPIRIERGIFQGDSLSPLWFCLALNPLSTLLEGSGLGYRLRRGGQVISHLLYMDDLKLFAPNNLQLLELLKVTETFSNSIRMEFGVDKCAVMHVKRGRIMESVGTQLSDSIHLRSLSSTETYKYLGMSEALGVNETGMKQSLKERFFGRLKKVFNSLLSGGNKVRAFNGWVMPVLMYSFGILKWTQTELDALDRRVRSLLTANRMHHPRSSVMRLYIPRKCGGRGFLNAKTLHNREVCSLREYFSQADVGMHRDVVAVDKGFTPLSLAKENWRKPVVLDTNDRREVWRSKELHGRFYRALHGPDVDFLASVAWLRFGDLFGETEGFVCAIMDEVMMTNNYRKYVVKDGTVDICRACHCPGESIRHIVSGCSRLANGEYLHRHNLVARIIHQQLALKYNLVDSEVPYYRYVPDPVLENGHVTLYWDRSIITDRTIVANKPDIVVIDRSERLTMIVDITVPHDENLVKAEKDKEIKYQDLAHEVVAMWDVDSAIVVPIVVTANGLIAKSLDQHLKRLSLGGWIKGLIQKAVLLDTARIVRKFLSLRP

SEQ ID NO: 12282 - protein, 885 aa, Amphipyra tragopoginis
MSWTHFQRIGLLPHYIAKGGRREGRPLPCSGTTWAHNNNNNKAAFLKQKVYAWANRIRRYRRRVDRYTQNRIFQSDQRWVYRTWERPDQGVSDAHLPDNDVMNAFWRNIWSVPVTHTEGDWMQEVQRACEPIQEMGVVTIGPQDVASAVRPMPNWKSPGPDGLHNFWIKWLRSSHARLASQFQSSLESGSLPSFLTTGVTHLLFKSGSTAEPKNYRPITCLPTVYKLLTSILRAKLNHHIDSNAIMCATQNGCKNGSRGTKELLLIDMAISQQVRRSRKDLSTCWIDYKKAYDSVPHTWLMRVLELYKINATLRTFLMSCMGQWRTVLHYPGCRQIQGNGELIRIERGIFQGDSLSPLWFCLALNPLSTLLEGSGLGYRLRRGGQVISHLLYMDDLKLFAPNNLQLLELLKVTETFSNSIRMEFGVDKCAVMHVKRGRIMESVGTQLSDFIHLRSLSLTETYKYLGMSEALGINEADMKQSLRERFFGRLIKVLKSLLSGGNKVRAFNGWVMPVLMYSFGILRWTQTELDALDRRVRTLLTAYRMHHPRSSVMRLYIPRKCGGRSFLNAKTLHNREVCSLREYFSQADVGMHRDVVAVDKGLTPLSLAKENWRKPVILDTNGRRDVWRSKELHGRFYRALHGPDVDFLASVAWLRFGDLFGETEGFVCAIMDEVMMTNNYRKYIVKDGTVDICRACHCPGESIRHIVSGCSRLANGEYLHRHNLVARIIHQQLALKYNLVDTEVPYYRYVPDPVLENGHVTLYWDRSIITDRTIVANKPDIVVIDRLERRTVIVDITVPHDENLVKAENDKKIKYLDLAREVVDMWDVDSAVIVPIVVTANGLIAKSLDQHLMRLSLGSWIKGLIQKAVLLDTARIVRKFLSLEP

SEQ ID NO: 12283 - protein, 1203 aa, Amphipyra tragopoginis
MLTRSRAKTQGTRLPSSASSLSSASQPPEPASTVSDVTPAAAVASSSSDEYFSPPTSPPPRRRGRGRPPASLGPRGPPASDRVPAAGGSVQRMRWTQSMNENCMRAYFGATEGGTNLTAYRGRMLSLFQALEPAVNVSAQRLSDQVRVIQRDHRLDDAALDRLRSEVQSSHVISLQSQTAVQLQVPTVVPPRSIFADEESDDRVTNVSTQCSDQLRSALELAIREYRSTPPDLRPRLPRLPMNKKNRALMCALDSLLSSYFDGSEDLADAHSILYCAAVAACRVARVKFDNNDRATRPKPAVPAWQCRIERRIGEARALIGKLICFREGNTRPRVMRFVRRAFSGTDTSPRDYMSRVTERIDFLKQKVYAWANRIRRYKRRVERYTQNRMFQRDQRWVYRAWERSDQGVGDAHLPDDDAMNSFWRSIWSVPVSHTEGDWMRDVERVCEPILDMGAISISPQDVASAVRPLPNWKSPGPDGLHNFWLKWLRSSHARLASHFQSSLETGTLPQFLTTGVTHLLHKSGSTAEPKNYRPITCLPTVYKLLTSILRCKISCHIENNSIMSASQNGCRNGSRGTKELLLIDMAISQQVRRSRKDLSTCWIDYKKAYDSVPHTWLMRVLELYKVNTTLCTFLTSCMGQWRTVLRYPGCRQIQGIGEPIRIERGIFQGDSLSPLWFCLALNPLSTLLEGSGLGYRLRRGGQVISHLLYMDDLKLFAPNNLQLLELLKVTETFSNAISMEFGVDKCAVMHVKRGRIMESVGTQLSDSINLRSLSSTETYKYLGMSEALGINEADMKQSLRERFYGRLKKVLKSLLSGGNKVRAFNGWVMPVLMYSFGILKWTQTELDALDRRVRTLLTAYRMHHPRSSVMRLYIPRKCGGRGFLNAKTLHNREVCSLREYFSQADVGMHRDVVAVDKGFTPLSLAKENWRKPVVLDTNGRKEVWRSKELHGRFYRALHGPDVDFLASVAWLRFGDLFGETEGFVCAIMDEVMMTNNYRRYVVKDGTVDICRACHCPGESIRHIVSGCSRLANGEYLHRHNLVARIIHQQLALKYNLVDAEVPYYRYVPDPVLENGHVTLYWDRSIITDRTIVANKPDIVVIDRSERRAMIVDITVPHDENLVKAENEKKIKYLDLAREVVDMWEIDSAVIVPIVVTANGLIAKSLDQHLMRLSLGSWIKGLIQKAVLLDTARIVRKFLSLEP

SEQ ID NO: 12284 - protein, 1203 aa, Amphipyra tragopoginis
MLTRSRAKTQGTRLPSSASSLSSASQPPEPASTVSDVTPAAAVASSSSDEYFSPPTSPPPRRRGRGRPPASLGPRGPPASDRVPAAGGSVQRMRWTQSMNENCMRAYFGATEGGTNLTAYRGRMLSLFQALEPAVNVSAQRLSDQVRVIQRDHRLDDAALDRLRSEVQGSHVISLQSQTAVQLQVPTVVPPRSIFADEESDDRVTNVSTQCSDQLRSALELAIREYRSTPPDLRPRLPRLPMNKKNRALMCALDSLLSSYFDGSEDLADAHSILYCAAVAACRVARVKFDNNDRATRPKPAVPAWQCRIERRIGEARALIGKLICFREGNTRPRVMRFVRRAFSGTDTSPRDYMSRVTERIDFLKQKVYAWANRIRRYKRRVERYTQNRMFQRDQRWVYRAWERSDQGVGDAHLPDDDAMNSFWRSIWSVPVSHTEGDWMRDVERVCEPILDMGAISISPQDVASAVRPLPNWKSPGPDGLHNFWLKWLRSSHARLASHFQSSLETGTLPQFLTTGVTHLLHKSGSTAEPKNYRPITCLPTVYKLLTSILRCKISCHIENNSIMSASQNGCRNGSRGTKELLFIDMAISQQVRRSRKDLSTCWIDYKKAYDSVPHTWLMRVLELYKVNTTLCTFLTSCMGQWRTVLRYPGCRQIQGIGEPIRIERGIFQGDSLSPLWFCLALNPLSTLLEGSGLGYRLRRGGQVISHLLYMDDLKLFAPNNLQLLELLKVTETFSNAISMEFGVDKCAVMHVKRGGIMESVGTQLSDSINLRSLSSTETYKYLGMSEALGINEADMKQSLRERFYGRLKKVLKSLLSGGNKVRAFNGWVMPVLMYSFGILKWTQTELDALDRRVRTLLTAYRMHHPRSSVMRLYIPRKCGGRGFLNAKTLHNREVCSLREYFSQADVGMHRDVVAVDKGFTPLSLAKENWRKPVVLDTNGRKEVWRSKELHGRFYRALHGPDVDFLASVAWLRFGDLFGETEGFVCAIMDEVMMTNNYRKYVVKDGTVDICRACHCPGESIRHVVSGCSRLANGEYLHRHNLVARIIHQQLALKYNLVDAEVPYYKYVPDPVLENGHVTLYWDRSIITDRTIVANKPDIVVIDRSERRAMIVDITVPHDENLVKAENEKKIKYLDLAHEVVDMWEIDSAVIVPIVVTANGLIAKSLDQHLMRLSLGSWIKGLIQKAVLLDTARIVRKFFSLGP

SEQ ID NO: 12285 - protein, 1119 aa, Amphipyra tragopoginis
MSRDVQRDTNNNNNNINENVMRAYYGATEGGINLTAYRDRMLSLFQVLEPAINVSTQRLSDQVRVIQRNRRLDDAVLERLRSEEQDNRAVTPPVQAAEQPQLLAVSPRPIHVDGESDGVVINVSSQCSDELRSALEGAILEYRATPPELKPRLPRLPMHNKNRALVCALDSLLSNYFDGSEDLGDTHSILYCAAIAACRVAHVKLTQNERATRPKPAVPAWQCRIERRIDGARALIGKLICFREGNTRPRVMRFVRRAFSGTDISPRDYMSRVTERIDFLKQKVYAWANRIRRYKRRVERYTQNRTFQSDQRRVYRTWERPVPGVSDMRLPDDDAMSSFWRSIWSVPVAHTEGDWMRDIERACETIPEMGEIVISPQDVATAARPLPNWKSPGPDGLHNFWIKWLRSSHACLASQFQSSLESGSLPQFLTTGVTHLLYKSGSTAEPKNYRPITCLPTVYKLLTSILRVKISNHIDNNSILSPSQNGCRSGSRGTKELLLIDMAISQQVRRSRKDLSTCWIDYKKAYDSVPHTWLMRVMELYKINTTLRTLLMSCMRQWRTVLRYPGCREILGRGEPIRIERGIFQGDSLSPLWFCLALNPLSTLLEGTRLGYRLRREGQVISHLLYMDDLKLFAPTDLQLMELLKVTENFSNSIRMEFGVDKCAVMHVKRGEIVESEGIQLSNSIQLRSLSPTETYKYLGMSEAIGISEADMRQSLRERFFGRLNKVLKSVLSGGNKVRAFNGWVMPVLMYSFGILKWTQTDLDALDRRVRALLTVHRMHHPRSSVMRLYIPRKCGGRGFLNAKTLHNREVYSLREYFLQAEGEMHRDVVAVDRGLTPLALAKENWRKPVVLSTNDREEVWQSKELHGRFYRALHGPDVDFLASVSWLRFGDLFGETEGFVCVIMDEVMMTNNYRKYIVKDGTVDICRACHRPGESIRHIISGCSRLANGEYLHRHNLVARIIHQQLALKYNLVESEVPYYRYVPDPVLENGHATLYWDRSIITDRTIVANKPDIVVIDRSERRTMIVDITVPHDENLVKAEKDKQLKYLDLAHEVVAMWDVDSAVIVPIVVTANGLIAKSLDQHLKRLSLDGWIKGLIQKAVLLDTARIVRRFLSLEP

SEQ ID NO: 12286 - protein, 981 aa, Amphipyra tragopoginis
MREYRYTRSDLRPRIPRLPMNRKNRALVCALDSLLSNYFDGSEDLGDTHSILYCAAVAACRVAHVKFINNERATRPKNAVPAWQCRIERRIAEARALIGKLICFREGNIRPRVMRFVRRAFSGTDVSPREYMSRVTERIDFLKQKVCAWANRIRRYRRRVDRYTQNRLFQSDERWVYRTWERPDQRVSDTHLPDNDVMNAFWRNIWSVPVTHIEGDWMQEVQRACEPIQEMGDVIISPQDVASAVRPMSNWKSPGPDGLHNFWLKWLRSSHARLASQFQSSLESGSLPQFLTTGVTHLLHKSGSTAEPKNYRPITCLPTVYKVLTSILRAKINNHIDNNSIMSASQNGCRNGSRGTKELLLIDMAISQQVRRSRKDLSTCWIDYKKAYDSVPHAWLRRVLELYKVNTTLCAFLTSCMGQWRTVLHYPGCRQIQRMGEPIRIERGIFQGDSLSPLWFCLALNPLSTLLEGSGLGCRLRRGGQVISHLLYMDDLKLFAPNNLQLLELLKVTETFSNSISMEFGVDKCAVMHVKRGRIMESVGIQLSDSIHLRSLSSTETYKYLGMSEALGVNETDMKQSLKERFFGRLKKVFNSLLSGGNKVRAFNGWVMPVLMYSFGILKWTQTELDALDRRVRSLLTANRMHHPRSSVMRLYIPRKCGGRGFLNAKTLYNREVCSLREYFSQADVGMHRDVVAVDKGLTPLSLAKENWRKPVVLDTNDRREVWRSKELHGRFYRALHGPDVDFLASVAWLRFGDLFGETEGFVCAIMDEVMMTNNYRKYIVKDGTVDICRACHCPGESIRHIVSGCSRLANGEYLHRHNLVARIIHQQLALKYNLVDAEVPYYRYVPDPVLENGHVTLYWDRSIITDRTIVANKPDIVVIDRSERLTMIVDIAVPHDENLVKAEKDKEIKYQDLAHEVVAMWDVDSAIVVPIVVTANGLIAKSLNQHLKRLSLGGWIKGLIQKAVLLDTARIVRKFLSLRP

SEQ ID NO: 12287 - protein, 1204 aa, Noctua pronuba
MLTRLRAKQLAHPPSPGSSLSSASQPPGRATSVSTLSLVAAVASSSSDEFFSPPSTPPPPQRRRGRGRPPAGLGPRGQQAPNRVPAAGGNVSRMRWTQSINEQVMRAYYGATEGGSNLTAYRGRMLSLFQVLEPAVSVSAQRLSDQVRVIQRNHMLDDTVLDRLRSESRSNPVTPASPMIAVQLQSATSASPRSNHGGEEDDSEVISVSTQCNAQLRSALEGAFREYRSTPPELRPRLPRLPMHKKNKALMCALDSQLSNYFDSSQDLTDTHSILYCGAVAACRVAHVKFPNNDRATRPKLAVPAWQCRIERRIGEARALIGKLICFREGNTRPRVMRFVRRAFSGTGISFRDYLARVTERIDFLKQKICAWASRIRRYKRRVERYTQNRTFQSDERWVYRAWERPDQGVTDTHLPDDDAMCSFWRSIWSVPVSHIEGDWTREVERTCDPIPQMGAINISPQDVACAVRPLPNWKSPGPDGLHNFWIKWFQRSHVRLASQFQSALESGSLPQFLTTGITHLLHKSGSTAEPKNYRPITCLPTVYKVLTSILRAKINHHIDSNSIMSASQNGCRNGSRGTKELLLIDMAISQQVRRSRKNLSTCWIDYKKAYDSVPHTWLMRVLELYKVDATLRTFLMSCMGHWRTVLHYPGCRQIQGNSEPIRIERGIFQGDSLSPLWFCLALNPLSTLLEGSGLGYRLRRGGQVISHLLYMDDLKLFAPNNLQLMKLLKVTETFSSAIRMEFGVDKCAVMHVKRGEIMESVGTQLSDSIQLRSLSPTDTYKYLGMSEALGINTADMKQSLRERFFGRLNKVLSSLLSGGNKVRAFNGWVMPVLMYSFGILKWTQTELDALDRRVRALLTANRMHHPRSSVMRLYIPRKCGGRGFLNAKTLHNREVCSLREYFLEADVGMHRDVVSVDKGLTPLSLANENWRKPRVLDTNDRKEVWQGKELHGRFYRALHGPDVDFLASVSWLRFGDLFGETEGFVCAIMDEVMMTNNYRKYIVKDGTVDICRACHRPGESIRHIISGCSRLANGEYLHRHNLVARIIHQQLALKYNLVESEVPYYKYAPDPVLDNGNITLYWDRSIITDRTIVANKPDIVVIDRLERRAMIVDITVPHDENLVKAEKDKQFKYLDLAHEVVDMWDVNTAVIVPIVVSANGLIAKSLDQHLKRLALGSWIKGLIQKAVLLDTARIVRRFLSQEP

SEQ ID NO: 12288 - protein, 1204 aa, Noctua pronuba
MLTRRRAKLLETHPPSPGSSLSSASQPPGRATSVSAASPVAAVASSSSDEFFSPPSTPPSPRRRGRRPPAGLGPRGQQAPNRVPAAGGNVSRIRWTQSMNENVMRAYYGATEGGINLTAYRCRMLSLFQALEPAVNVSAQRLSDQVRVIQNNHRLDDATLDRLRSELRISPASNPLPSQNVTHVPAALPLRANQHAEEEDDRAVSADNLCNEELRSALEDAIREYRFTSPDLRPRLPRLPMNKKNRALVCALDALLPNFIENSANLCDTHSILYCTAIAACRVANVKFPNTDSATRPKSAVPVWQCRIERRINEARVLIGKLICFREGNTRPRVMRFVRRAFSGTDISPREYMSRVTERIDFLKQKVYAWANRIRRYRRRVDRYTQNRMFQSDERWVYRTWERPVTIQGVTDAHLPDNDAMSTFWRSIWSVPVSHTEGDWMRVVEQACDSIPEMEAISISPLDVARAVRPLPNWKSPGPDGLHNFWIKWLQRSHACLASQFQSSLETGSLPSFFTTGVTHLLHKSGSTAEPKNYRPITCLPTVYKVLTSILRAKIVRHIDSNSIMSVSQNGCRNGSRGTKELLLIDMAISQQVRRSRRDLSTCWIDYKKAYDSVPHTWLRRVLELYKIDATLRTFLVSCMGQWSTVLLYPGCRQVLGNDEPIRIERGIFQGDSLSPLWFCLALNPLSTLLEDSGLGYRLRRGGQVISHLLYMDDLKIFAPSNLQLMELLKVTETFSSAIRMEFGVDKCAVMHVKRGEIMESVGTQLSDSIYLRCLSSTETYKYLGMSEALGINSADMKQSLKERFFGRLNKVLKSLLSGGNKVRAFNGWVMPVLMYSYGILKWTQTELDALDRKVRTLLTANRMHHPRSSVMRLYIPRKCGGRGFLNAKTLHNREVCSLREYFLETDVGMHRDVVSVDKGLTPLSLANENWRKPVVLDTNDRKEVWQSKELHGRFFRALHGPDVDLLASVSWLRFGDLFGETEGFVCAIMDEVIMTNNYRKYIVKDGTVDICRACHRPGESIRHIVSGCSRLANGEYLHRHNLVARIIHQQLALQYNLVGTEVPYYKYVPDPVLENGHATLYWDRSIITDRTILANKPDIVVIDRRERRAMIVDITVPHDENLVKAENDKKIKYLDLAHEVVDMWDVDSAIIVPIVVTVNGLIAKSLDQHLRRLSLRGWVKGLIQKAVLLDTARIVRRFLSLEP

SEQ ID NO: 12289 - protein, 1111 aa, Noctua pronuba
MRWTQSINEQVMRAYYGATEGGSNLTAYRGRMLSLFQVLEPAVSVSAQRLSDQVRVIQRNHMLDDTVLDRLRSESRSNPVTPASPMIAVQLQSVTSTSPRSDHGGEEDDSEVISVSTQCNAQLRSTLEGAFREYRSTPPELRPRLPRLPMHKKNKALMCALDSQLSNCFDSSKDLADTHSILYCGAVAACRVAHVKFPNNDRATRPKLAVPAWQCRIERRIGEARALIGKLICFREGNTRPRVMRFVRRAFSGTDISFRDYLARVTERIDFLKQKICAWASRIRRYKRRVERYTQNRTFQSDERWVYRAWERPDQGVTDTRLPDDDAMCSFWRSIWSVPVSHTEGDWTREVERACDPIPQMGAINISPQDVACAVRPLPNWKSPGPDGLHNFWIKWFQRSHARLASQFQSALESGSLPQFLTTGITHLLHKSGSTTEPKNYRPITCLPTVYKVLTSILRAKINHHIDSNSIMSASQNGCRSGARGTKELLLIDMAISQQVRRSRRDLSTCWIDYKKAYDSVPHTWLMRVLELYKVDATLRTFLMSCMGHWRTVLRYPGCRQIQGNSEPIRIERGIFQGDSLSPLWFCLALNPLSTLLEGSGLGYRLRRGGQVISHLLYMDDLKLFAPNNLQLMKLLKVTETFSSAIRMEFGVDKCAVMHVKRGEIMESVGTQLSDSIQLRSLSSTDTYKYLGMSEALGINTADMKQSLRERFFGRLNKVLSSLLSGGNKVRAFNGWVMPVLMYSFGILKWTQTELDALDRRVRALLTANRMHHPRSSVMRLYIPRKCGGRGFLNAKTLHNREVCSLREYFLEADVGMHRDVVSVDKGLTPLSLANENWRKPRVLDTNDRKEVWQGKELHGRFYRALHGPDVDFLASVSWLRFGDLFGETEGFVCAIMDEVMMTNNYRKYIVKDGTVDICRACHRPGESIRHIISGCSRLANGEYLHRHNLVARIIHQQLALKYNLVESEVPYYKYAPDPVLDNGNITLYWDRSIITDRTIVANKPDIVVIDRLERRAMIVDITVPHDENLVKAEKDKQFKYLDLAHEVVDMWDVNTAVIVPIVVSANGLIAKSLDQHLKRLALGSWIKGLIQKAVLLDTARIVRRFLSQEP

SEQ ID NO: 12290 - protein, 1204 aa, Noctua pronuba
MLTRLRAKQLAHPPSPGSSLSSASQPPGRATSVSTLSPVAAVASSSSDEFFSPPSTPPPPQRRRGRGRPPAGLGPRGQQAPNRVPAAGGNVSRMRWTQSINEQVMRAYYGATEGGSNLTAYRGRMLSLFQVLEPAVSVSAQRLSDQVRVIQRNHMLDDTVLDRLRSESRSNPVTPASPMIAVQLQSVTSTSPRSDRGGEEDDSEVISVSTQCNAQLRSALEGAFREYRSTPPELRPRLPRLPMHKKNKALMCALDSQLSNCFDSSKDLADTHSILYCGAVAACRVAHVKFPNNDRATRPKLAVPAWQCRIERRIGEARALIGKLICFREGNTRPRVMRFVRRAFSGTNISFRDYLTRVTERIDFLKQKICAWASRIRRYKRRVDRCTQNRTFQSDERWVYRAWERPDQGVTDTRLPDDDAMCSFWRSIWSVPVSHTEGDWTREVERACDPIPQMGAINISPQDVACAVRPLPNWKSPGPDGLHNFWIKWFQRSYARLASQFQSALESGSLPQFLTTGITHLLHKSGSTAEPKNYRPITCLPTVYKVLTSILRAKINHHIDSNSIMSASQNGCRNGSRGTKELLLIDMAISQQVRRSRRDLSTCWIDYKKAYDSVPHTWLMRVLELYKVDATLRTFLMSCMGHWRTVLRYPGCRQIQGNSEPIKIERGIFQGDSLSPLWFCLALNPLSTLLEGSGLGYRLRRGGQVISHLLYMDDLKLFAPNNLQLMKLLKVTETFSSAIRMEFGVDKCAVMHVKRGEIMESVGTQLSDSIYLRSPSSTETYKYLGMSEALGINTADMKQSLRERFFGRLNKVLGSLLSGGNKVRAFNGWVMPVLMYSFGILKWTQTELDALDRRVRALLTANRMHHPRSSVMRLYIPRKCGGRGFLNAKTQHNREVCSLREYFLEADVGMHRDVVSVDKGLTPLSLANGNWRKPRVLDTNDRKEVWQGKELHGRFYRALHGPDVDFLASVSWLRFGDLFGETEGFVCAIMDEVMITNNYRKYIVKDGTVDICRACHRPGESIRHIISGCSRLANGEYLHRHNLVARIIHQQLALKYNLVESEVPYYKYAPDPVLDDGNITLYWDRSIITDRTIVANKPDIVVIDRLERRAMIVDITVPHDENLVKAEKDKQFKYLDLAREVVDMWDVNTAVIVPIVVSANGLIAKSLDQHLRRLALGSWIKGLIQKAVLLDTARIVRRFLSQEP

SEQ ID NO: 12291 - protein, 1196 aa, Spilosoma lubricipeda
MLTRARARALLPSSDSSLRSALPSSDARTEVPTVAEASSSSSSDEFFSPPTSPIPVRRQGRDRPPTSLGSRGPLTSNRAPAIGGDVRRMKWTQSINENVMRAYFRATELGTNLTAYRVRLVSLFQELEPAVNVSAQRLSDQVRAIQRCHLLDDTVLERICSDIRNSLTVPSSPHVVDVVTNSTPQNEDVSELVDSEIISVSTLYNDKIRSTLEDVIREYRCVNFNNRPRLPRLPIHKRNLALVSALDSLLPDYFGNSEDLSDTHSILYCAAIAVCRVAGIKFAENITTTRPENTVPAWQCRIERRIAGARTLIGKLISFRSGNTRPKVMRFVKQAFLGTTISPQQYMSCVTERIDFLKQKVYAWANRIRRYRKRIDRYNQNRMFQRNEKWVYRKWENLSPCMSDGQVPDENATNSFWRSIWSVPVAHTEGDWYRDVERSCESLLPMELINIDKEDVSCAVRSLPNWKAPGPDGLHNFWLKWFRSSHACLASQFQTALDSGSLPQFLTTGITHLLYKSGSAMDPKNFRPITCLPTLYKLLTSILRLKITTHINQNSILSVSQNGCRSGTRGTKELLIIDMTISQQVRRNRKSLATCWIDYKKAFDSVPHTWLLKVLELYKIDTTLCTFLKSCMRQWRTVLRYPGCRQTAVNDVPIKIERGIFQGDSLSPLWFCLALNPLSTLLEGSGLGYRLQKEAPVISHLFYMDDLKLFAPTKLQLTALLRVTENFSNSIKMEFGIDKCAVMHVKKGVIVESEGIELSDSTRLRSLSVTETYKYLGFSQSLGIPESDMKQSLRERFFGRLKKVLKSLLSGGNRVRAYNGWVMPVLMYSFGILRWTQTELDALDRRVRTLLTAFRMHHPRSSVMRLYIPRKFGGRGLLNVKTLHNREIYNLREYFLHTDVGVHRSVVAMDTGLTPLALAKENWRKPVVLGTNERREVWKGKELHGRFYRALNGPDIDFKASTSWLRYGDLFGETEGFVCAIMDEVIMTNNYRKYILKDGTVDICRACHRPGESIRHIISGCSRLANGEYLHRHNQVARIVHQQLALKYKLVNSEVPYYRYVPDPVLENGRATLYWDRSIITDRTIVANKPDIVVIDRSERRAMIIDIAVPHDENLVKVEKEKQIKYLDLSHEIVDMWDVDSVIIVPIVVSVHGLIAKSLDQHLKRLTLDGWIKGLMQKAVLLDTARIVRRFLSLEP

SEQ ID NO: 12292 - protein, 1198 aa, Spilosoma lubricipeda
MITRARVRAQLPSPDSSLRSALPSPEAIIEVPASAEASSSSSSDEFFSPPTSPTPVRRQGRGRPPSSLGSRGPLTSNRVPATGGAVRRMKWTHSINENVMRAYFRATELGTNLTAYRVRLVSLFQELEPAVNVSAQRLWDQVRAIQRCHLLDDVVLERIRSDVRSTLTVPSSSHSVDLVATTPQLPHNENVDEQVESEVMTVSTQCNDRIRRALEDAIQEYRHVDYNNRPRLPRLPIHKRNLALVSALNSLLPDYFGNSEDLSDTHSILYCAAIAVCRVAGVKFVEQITTTRPKNKVPAWQCRIERRIAETRTLIGKLITFQSGNTRPRVMRFVKQAFLGTTISPQQYMSSVTELIDFLKQKVYAWANRIRRYRKRVDRFIQNRMFQRNEKWVYRKWEEPSPRVGEGRFPDENFTNTFWRNIWSAPVTHTEGDWYRDVERSCESITSMEPITISKDDIGCAVRSLPNWKSPGPDGLHNFWLKWFRSSHACLASQYQAAVDSGSLPQFLTTGITHLLYKSGSAMDPKNFRPITCLPTMYKLLTSVLRLKLATHINNNLIMSVSQNGCRSGSRGTKELLIIDMTISQQVRRNRKSLATCWIDYKKAYDSVPHTWLLRVLELYKIDTTLCTFLKSCMGQWRTVLRYPGCRQTAVNDVLINIERGIFQGDSLSPLWFCLALNPLSALLEDSGLGYRLQKDDQVISHLFYMDDLKLLAPTKLQLTALLKVTENFSNSIKMEFGVDKCAVMYVKKGVIVESEGTELSDSTRLRSLSATETYKYLGFSQSLGIPEPDMKQALRERFFGRLKKVLKSLLSGGNKVRAYNGWVMPVLMYSFGILRWTQTELDAIDRRVRTLLTAFRMHHPRSSVMRLYIPRKLGGRGLLNAKTLHNREIYNLREYFIHTDVGVHRSVVTVDTGLTPLALAKENWRKPVVLSTNDRREVWKGKELHGRFYRALNGPDIDFKASTSWLRYGDLFGETEGFVCAIMDEVIMTNNYRKYILKDGTVDICRACHRPGESIRHIISGCSRLANGEYLHRHNQVARIVHQQLALKYHLVSSEVPYYRYVPDPVLENGRATLYWDRSIITDRTIVANKPDIVVIDRLERRAIIVDIAVPHDENLVKIEKEKQIKYLDLSHEIVDMWNVDSAIIVPIVVSAHGLIAKSLDQHLKRLTLEGWIKGLMQKAVLLDTARIVRRFLSLEP

SEQ ID NO: 12293 - protein, 1196 aa, Spilosoma lubricipeda
MLTRARSRALLPSSDSSLRSALPSSDARTEVPTVAEASSSSSSDEFFSPPTSPTPVRRQGRGRPPTSLGSRGPLTSNRAPAAGGDVRRMKWTQSINENVMRAYFRATELGTNLTAYRVRLVSLFQELEPAVNVSAQRLSDQVRAIQRCHLLDDTVLERICSDIRNSLTVPSSPHVVDVVTNSTPQNEDVSELVDSEIISVSTLYNDKIRSTLEDVIREYRCVNFNNRPRLPRLPIHKRNLALVSALDSLLPDYFGNSEDLSDTHSILYCAAIAVCRVAGIKFAENITTTRPENTVPAWQCRIERRIAGARTLIGKLISFRSGNTRPKVMRFVKQAFLGTTISPQQYMSCVTERIDFLKQKVYAWANRIRRYRKRIDRYNQNRMFQRNEKWVYRKWENLSPCMSDGQVPDENATNSFWRSIWSVPVAHTEGDWYRDVERSCESLLPMEVINIDKEDVSCAVRSLPNWKAPGPDGLHNFWLKWFRSSHACLASQFQTALDSGSLPQFLTTGITHLLYKSGSAMDPKNFRPITCLPTLYKLLTSILRLKITTHINQNSILSVSQNGCRSGTRGTKELLIIDMTISQQVRRNRKSLATCWIDYKKAYDSVPHTWLLKVLELYKIDTTLCTFLKSCMGQWRTVLRYPGCCQTAVNDVPIKIERGIFQGDSLSPLWFCLALNPLSTLLESSGLGYRLQKDAALISHLFYMDDLKLFAPTKLQLTALLRVTENFSNSIKMEFCVDKCAVMHVKKGVIVESEGIELSDSTKLRFLSATETYKYLGFSQSLGIPESDMKQSLRERFFGRLKKVLKSLLSGGNKVRAYNGWVMPVLMYSFGILRWTQTELDALDRRVRTLLTTFRMHHPRSSVMRLYIPRKFGGRGLLNIKTLHNREIYNLREYFLHTDVEMHRNVVAVDTGLTPLALAKENWRKPVVLSTNDRREVWKGKELHGRFYRALNGPDIDFKASTSWLRYGDLFGETEGFVCAIMDEVIMTNNYRKYILKDGTVDICRACHRPGESIRHIISGCSRLANGEYLHRHNQVARIVHQQLALKYHLVNSEVPYYRYVPDPVLENGRATLYWDRSIITDRTIVANKPDIVVIDRLERRAMIVDIAVPHDENLVKVEKEKQIKYLDLSHEIVDMWNVDSAIIVPIIVSAHGLIARSLDQHLKRLTLDGWIKGLMQKAVLLDTARIVRRFLSLEP

SEQ ID NO: 12294 - protein, 868 aa, Spilosoma lubricipeda
MRFVKQAFLGTTISPQQYMSCVTERIDFLKQKVYAWANRIRRYRKRIDRYNQNRMFQRNEKWVYRKWENLSPCMSDGQVPDENATNSFWRSIWSVPVAHTEGDWYRDVERSCESLLPMELINIDKEDVSCAVRSLPNWKAPGPDGLHNFWLKWFRSSHACLASQFQTALDSGSLPQFLTTGITHLLYKSGSAMDPKNFRPITCLPTLYKLLTSILRLKITTHINQNSILSVSQNGCRSGTRGTKELLIIDMTISQQVRRNRKNLATCWIDYKKAYDSVPHTWLLKVLELYKIDTTLCTFLKSCMGQWRTVLRYPGCRQTAVNDVPIKIERGIFQGDSLSPLWFCLALNPLSTLLESSGLGYRLQKDAALISHLFYMDDLKLFAPTKLQLTALLRVTENFSNSIKMEFCVDKCAVMHVKKGVIVESEGIELSDSTKLRFLSATETYKYLGFSQSLGIPEPDMKQSLRERFFGRLKKVLKSLLSGGNKVRAYNGWVMPVLMYSFGILRWTQTELDAIDRRVRTLLTAFRMHHPRSSVMRLYIPRKLGGRGLLNAKTLHNREIYNLREYFLHTDVGVHRSVVTVDTGLTPLALAKENWRKPVVLSTNDRREVWKGKELHGRFYRALNGPDIDFKASASWLRYGDLFGETEGFVCAIMDEVIMTNNYRKYILKDGTVDICRACHRPGESIRHIISGCSRLANGEYLHRHNQVARIVHQQLALKYHLVSSEVPYYRYVPDPVLENGRATLYWDRSIITDRTIVANKPDIVVIDRLERRAMIVDIAVPHDENLVKVEKEKQIKYLDLSHEIVDMWNVDSAIIVPIVVSAHGLIAKSLDQHLKRLTLEGWIKGLMQKAVLLDTARIVRRFLSLEP

SEQ ID NO: 12295 - protein, 1198 aa, Ochropleura plecta
MITRLAARQNARLPPPDSPLSSASPPPEPSLIVSAVTPAVAVASSSSDEYFSPPTTPPPACRRGGRRPPDGLGLRGPPASDRVPAPGGSVQRMRWTSSINENVMRSYYGATEGGNNLTAYRVRMLSLFQVLEPAVNVSAQRLSDQVRVIQRNRMLDDTVLDRLRTEMQSSQVITSSSQAVVPPQSHQLVSHADEVSNDMATNVSTQCNEEMRIALEGAIREYRYISPELRPRLPRLPMHNKNRALVAVLDSQLSNYFDNCENLTDAHSILYCAAVAACRVAHVKFPDDGATRPKPAVPFWQCRIERRIGVARALIGKLICFREGNTRPRVMRFVRRAFAGTDISPPDYMSHITERIDFLKQKVYAWANRIRRYKRRVERYTLNRTFQSDERWVYRAWERPDQGVSDTRLPDDDAMCLFWRNIWSVPVSHTEGEWTREVERACDPIPEMGALTISPQDVACAVRPLPNWKSPGPDGLHNFWLKWIQRSHARLATLFQTALESGSLPKFLTTGITHLLHKSGSTTEPKNYRPITCLPTIYKVLTSILRAKITKHIDDNSIMSASQNGCRNGSRGTKELLLIDMAISHQVRRSRRHLSTCWIDYKKAYDSVPHTWLMRVLELYKVDATLRTFLSSCMRQWNTVLRYPGCRQIQRNSEPIRIERGIFQGDSLSPLWFCLALNPLSTLLEDSGLGYRLRRGGRVISHLLYMDDLKLFAPNDSQLMELLKVTETFSSAISMEFGVDKCAVMHVKRGEIVESVGTQLSDSIHLRSLSANETYKYLGMSEALGINVADMKQSLKERFFGRLRKVFNSLLSGGNKVRAFNGWVMPVLMYSFGILKWTQTELDALDRKVRTLLTAYRMHHPRSSIMRLYIPRSCGGRGFLNAKTLHNREICSLREYFLEADVGMHRDVVTVDKGFTPLSLAKENWRKPVVLDTNDRREVWQSKELHGRFFRALHGPDVDQPASVAWLRSGDLFGETEGFVCAIMDEVMMTNNYRRFIVKHGTVDICRACHRPGESIRHIISGCSRLANGEYLHRHNLVARIIHQQLALKYSLVESEVPYYRYEPDPVLEHGNITLYWDRSIITDRTIVANKPDIVVVDRSERRAMIVDITVPHDENLVKAEKDKQIKYTDLAREVVDMWDVDSAIIVPIVVSANGLIAKSLDQHLRRLSLGSWIKGLIQKAVLLDTARIVRRFLSLEP

SEQ ID NO: 12296 - protein, 974 aa, Ochropleura plecta
MSPELRPRLPRLPMHNKNRALVAVLDSQLSNYFDNCENLTDAHSILYCAAVAACRVAHVKFPDDGATRPKPAVPFWQCRIERRIGVARALIGKLICFKEGNTRPRVMRFVRRAFAGTDISPPDYMSRITERIDFLKQKVYAWANRIRRYKRRVERYTLNRTFQSDERWVYRAWERPDQGVSDTHLPDDDAMCLFWRSIWSVPVSHTEGEWTREVERACDPIPEMGALTISPQDVACAIRPLPNWKSPGPDGLHNFWIKSIQRSHTCLATLFQTALESGSLPKFLTTGITHLLHKSGSTAEPKNYRPITCLPTLYKVLTSILRAKITKHIDDNSIMSASQNGCRNGSRGTKELLLIDMAISQQVRRSRRHLSTCWIDYKKAYDSVPHTWLMRVLEMYKVDATLRTFLISCMRQWSTVLRYPGCRQIQRNSEPIRIERGIFQGDSLSPLWFCLALNPLSTLLENSGLGYRLRRGGQVISHLLYMDDLKLFTPNDLQLMELLKVTETFSSAIRMEFGVDKCAVMHVKRGEIMESVGTQLSDSTNLRSLSATETYKYLGMSEALGINVADMKQSLKERFFGRLRKVFNSLLSGGNKVRAFNGWVMPVLMYSFGILKWTQTELDALDRKVRTLLTAFRMHHPRSSVMRLYIPRSCGGRGFLNAKTLHNREICSLREYFLETDVGMHRDVVAVDKGLTPLSLAKENWHKPVVLDTNDRKEVWQSKELHGRFFRALHGPDVDQSASVAWLRSGDLFGETEGFVCAIMDEVMMTNNYRRFIVKDGTVDICRACHRPGESIRHIISGCSRLANGEYLHRHNLVARIIHQQLALKYNLVESEVPYYRYEPDPVLEHGNITLYWDRSIITDRTIVANKPDIVVVDRSERRAMIVDITVPHDENLVKAEKDKQIKYIDLAREVVDMWDVDSAIIVPIVVSANGLIAKSLDQHLRRLSLGSWIKGLIQKAVLLDTARIVRRFLSLEP

SEQ ID NO: 12297 - protein, 1198 aa, Ochropleura plecta
MITRLAARQHARLPPPDSPLSSASPPPEPSLIVSAVTPAVAVASSSSDEYFSPPTTPPPACRRGGRRPPDGLGLRGPPASDRVPAPGGSVQRMRWTSSINENVMRSYYGATEGGNNLTAYRVRMLSLFQVLEPAVNVSAQRLSDQVRVIQRNRMLDDTVLDRLRTEMQSSQVITSSSQAVVPPQSHQLVSHDDEVSNDMATNVSTQCNEEMRIALEGAIREYRYISPELRPRLPRLPMHNKNRALVAVLDSQLSNYFDNCENLTDAHSILYCAAVAACRVAHVKFPDDGATRPKPAVPFWQCRIERRIGVARALIGKLICFREGNTRPRVMRFVRRAFAGTDISPPDYMSHITERIDFLKQKVYAWANRIRRYKRRVERYTLNRTFQSDERWVYRAWERPDQGVSDTHLPDDDAMCLFWRNIWSVSVSHTEGEWTREVERACDPIPKMGALTISPQDVACAVRPLPNWKSPGPDGLHNFWLKWIQRSHARLATLFQTALESGSLPKFLTTGITHLLHKSGSTTEPKNYRPITCLPTIYKVLTSILRAKITKHIDDNSIMSASQNGCRNGSRGTKELLLIDMAISQQVRRSRRHLSTCWIDYKKAYDSVPHTWLMRVLELYKVDATLRTFLSSCMRQWNTVLRYPGCRQIQRNSEPIRIERGIFQGDSLSPLWFCLALNPLSTLLEDSGLGYRLRRGGRVISHLLYMDDLKLFAPNDSQLMELLKVTETFSSAISMEFGVDKCAVMHVKRGEIVESVGTQLSDSIHLRSLSANETYKYLGMSEALGINVADMKQSLKERFFGRLRKVFNSLLSGGNKVRAFNGWVMPVLMYSFGILKWTQTELDALDRKVRTLLTAYRMHHPRSSVMRLYIPRSCGGRGFLNAKTLHNREICSFREYFLEADVGMHRDVVTVDKGFTPLSLAKENWRKPVVLDTNDRREVWQSKELHGRFFRALHGPDVDQPASVAWLRSGDLFGETEGFVCAIMDEVMMTNNYRRFIVKDGTVDICRACHRPGESIRHIISGCSRLANGEYLHRHNLVARIIHQQLALKYSLVESEVPYYRYEPDPVLEHGNITLYWDRSIITDRTIVANKPDIVVVDRSERRAMIVDITVPHDENLVKAEKDKQIKYIDLAREVVDMWDVDSAIIVPIVVSANGLIAKSLDQHLRRLSLGSWIKGLIQKAVLLDTARIVRRFLSLEP

SEQ ID NO: 12298 - protein, 1074 aa, Hecatera dysodea
MLSLFQVLEPAVNVSAQRLSDQVRVIQRNRMLDDSVLDRLRTEICSHVIVPSPQTVAPPQLTQIPCHADEENNDRVTNVSTQCNDELRSALESAIREYRYVSPELRPRIPRLPMHNKNRALVAALDSQLSNYFDNCEDLTDAHSIMYCAAVAACRVAHVKMPSDRVTRPKVAVPAWQCRIERRIGGARALIGKLICFREGNTRPRVMRFVRRAFSGTDISPSDYLSRVTERIDFLKQKVYAWANRIRRYKRRVERYTQNRTFRSNERWVYKAWERPDQDVTDMHPPDDDAMCSFWRNIWSVPVSHTEGDWIREVERACDPLPEMGAIIISPQDVARAVRPLPNWKSPGPDGLHNFWIKWFKGSHACLASRYQAALESGSLPEFFMTGVTHLLHKSGSTAEPKNYRPITCLPTVYKVLTSILRDKINQHINSNNIMSASQNGCRNGSRGTKELLLIDMVISQQVRRSRKDLSTCWIDYKKAYDSVPHSWLMRVLELYKIDTTLRTFLMSCMGQWRTVLRYPGCRNIQRNSEPVRIERGIFQGDSLSPLWFCLALNPLSTLLENSGLGYRLRRGGQVISHLLYMDDLKLFAPTNLQLMELLKVTETFSNAIRMEFGVDKCAVMHVKRGEIMESVGTQLSDSINLRSLSSTETYKYLGMSEALGINVTDMKQSLRERFFGRLKKVLNSLLSGGNKVRAFNGWVMPVLMYSFGVLKWTQTELDALDRRVRTLLTAYRMHHPRSSVMRLYIPRKCGGRGFLNAKTLHNREICSLREYFLAVDVGMHRDVVAVDKGLTPLSLANENWRKPAVLDTNDRRAVWQSKELHGRFFRALHGPDVDQLASVAWLRFGDLFGETEGFVCAIMDEVIMTRNYRRFIVKDGTVDICRACHRPGESIRHIVSGCSSLANGEYLHRHNLVARIIHQQLALKYSLVESEVPYYRYVPDPVLDNGNITLYWDRSIITDRTIVANKPDIVVVDRIVRRAMIVDITVPHDENLVKAEKDKQIKYLDLAREVVDMWDVDSAIIVPIVVSVNGLIAKSLDQHLRRLTLGGWIKGLIQKAVLLDTARIVRRFLSLEP

SEQ ID NO: 12299 - protein, 1089 aa, Hecatera dysodea
MLSLFSDFIQFRSHTKSNNNNNNNNVSAQRLSDQVRVIQRNRMLDDAVLDRLRLESRSSRVSPASPPAAVQIQPSISPRPDHVSEDVDDGAITMSTQCNERLRSALEDAFREYRSTPPELRPRLPRLPMHNKNRALVCALDSQLENCFNSSKDLADTHSILYCAAAAACRVAHVKFPNSDRATRPAVPAWQCRIERRIGEARALIGKLICFREGNTRRRVMRFVRRAFSGTDISPRDYLTRVTERIDFLKQKVYAWASRIRRYKRRVERYTQNRTFQSNERWVYRAWERPEQVVTDTHLPDDDAMCSFWRSIWSVPVSHTEGDWTREVERTCDPIPEMGAITISPQDVARAVRPLPNWKSPGPDGLHNFWIKWFTRSHVRLASQFQSALESRSLPQFLTTGITHLLHKSGSTAEPKNYRPITCLPTVYKVLTSILRAKINDHIESNSIMSTSQNGCRNGARGTKELLLIDVAISQQVRRSRKDLSTCWIDYKKAYDSVPHTWLMRVLELYKVDAVLRAFLMSCMGQWRTVLHYPGCRQTQANSEPIRIERGIFQGDSLSPLWFCLALNPLSTLLEGSGQGYRLRRGGQVISHLLYMDDLKLFAPNNLQLMKLLKVTETFSSDISMEFGVDKCAVMHVKRGEIMESVGTQLSDSIHLRSLCSTETYKYLGMSEALGINATSVKQSLKERFFGRLNKVLNSLLSGGNKVRAFNGWVMPVLMYSFGILKWTQTELDALDRRVRSLLTANRMHHPRSSVMRLYIPRKCGGRGFLNAKTLHNREVCSLREYFLEADVGMHRDVVAVDKGLTPLSLANENWRKPVVLDTNDRREVWQSKELHGRFYRVLHGPDVDFLASVAWLRFGDLFGETEGFICAITDEVMMTNNYRKYIVKDGTVDICRACHRPGESIRHIISGCSSLANGDYLHRHNLVARIIHQQLALTYNLVESEVPYYRYVPDPVLENGNCTLYWDRRSIITDRTIVANKPDIVVIDRLERRAMIVDIAVPHDENLVKAEKDKQSKYLDLAREVVDMWNVNTAVIVPIVVTANGIIAKSLDQHLKRLSLGSWIKGLIQKAVLLDTARIVRRFLSREP

SEQ ID NO: 12300 - protein, 1048 aa, Mythimna impura
MLDDTVLDRLRTEMGSHAIASSSQTAVPSQVLASNHLPNHADEESTDMVTHVSTQCSNELRSALECAIREYRNMPLELRPRLPRLPMCNKNKALVAALDSQLSNYFDDCEDLTDTHSIMYCAAVAACRVAHVKFPNSDVATRPKPAVPAWQCRIERRIGGARALIGKLICFREGNTRPRVMRFVRRAFSGTDISPRDYMSCVTERIDFLKQKVYAWANRIRRYKRRVERYTQNRTFRSNERWVYRAWEQPDQGVTDTRLPDDDAMSSFWRNIWSVPVSHTEGGWTREVERACEPIPEMGAITISPQDVARAVRPLPNWKSPGPDGLHNFWIKWLQRSHARLASQYQTALESGSLPEFLTTGVTHLLHKSGSTAEPKNYRPITCLPTVYKVLTSILRAKINHHVDNNAIMSASQNGCRNGSRGTKELLLIDMAISQQVRRSRKDLSTCWIDYKKAYDSVPHTWLMRVLELYKIDTTLRTFLMSCMRQWRTVLRYPGCRHIQRNSEPVRIERGIFQGDSLSPLWFCLALNPLSTLLENSGLGYRLKRGGQVISHLLYMDDLKLFAPNNLQLMELLKVTETFSSAIRMEFGVDKCAVMHVKRGEIVESVGTQLSDSINFRSLSPTETYKYLGMSEALGINATDMKQTLRERFFGRLKKVFNSLLSGGNKVRAFNGWVMPVLMYSFGVLKWTQTELDGLDRRVRTLLTAYRMHHPRSSVMRLYIPRKCGGRGFLNAKTLHNREVCSLREYFLTADVGMHRDVVAVDKGLTPLSLANESWRKPVLLDTNDRREVWQSKELHGRFFRALHGPDVDQLASVAWLRVGDLFGETEGFVCAIMDEVIMTNNYRRFIVKDGTVDICRACHRPGESIRHIISGCSRLANGEYLHRHNLVARIIHQQLALNYSLVESEVPYYRYVPDPVLDNGDITLYWDRSIITDRTIVANKPDIVVVDRRERRTMIVDISVPHDENLVKAEKDKQIKYIDLAREVVDMWDVDSAIIVPIVVSANGLIAKSLDQHLRRLALGGWIKGLIQKAVLLDTARIVRRFLSLEP

SEQ ID NO: 12301 - protein, 1200 aa, Mythimna impura
MLTRSRAQKLHTHPTSSGSSLSSASQPPGPAPTVSPEIPVAAVASSSSDEYFSPPTTPPPARRRGRGRPPASLGPRGPPASDRVPAAGGSVQRMRWTSSINENVMRSYFGATEGGINLTAYRGRMLSLFQVLEPAVNVSVQRLSDQVRVIQRNRMLDDAVLDRLRLESQSSRVSPATTPAAVQRLPTASPRPVQVGDADDDAAISVSTQCNDRLRGALEDAFWEYRSRPPGLRPRLPRLPMHKRNRALVCALDSQLSNCFDSSKDLTDTHSILYCAAVAACRVAHVKFPNCDRATRPAVPAWQCRIEHRIGKARALIGKLICFREGNTRPRVMRFVRRAFSGTDISPRDYLPCVTERIDFLKQKIYAWANCVRRYKRRVERYTRNRTFQSNERWVYRDWERSDQGVTDTRLPDDDAMCSFWRSIWSAPVSHTEGDWIREVERACDLLPEMGAITISPQDVARAVRPLPNWKSPGPDGLHNFWVKWFQRSHARLASQFQSALESGSLPQFLTTGITHLLHKSGSTAEPKNYRPITCLPTVYKVLTSILRAKINSHIETNSIMSASQNGCRNGSRGTKELLLIDIAISQQVRRSRKNLSTCWIDYKKAYDSVPHTWLMRVLELYKVDATLRTFLMSCMGQWRTVLHYPGCRQIQENNEPIRIERGIFQGDSLSPLWFCLALNPLSTLLEGSGLGYRLKRGGQVISHLLYMDDLKLFAPNNLQLVELLKVTETFSSAIRMEFGVDKCAVIHVKRGEIMESVGIQLSDSIHLRSLCSTETYKYLGMSESLGINTDDVKQSLKERFFGRLNKVLNSLLSGGNKVRAFNGWVMPVLMYSFGILKWTQTELDALDRRVRTLLTANRMHHPRSSVMRLYIPRKCGGRGFLNAKTLHNREVCSLREYFLKTDVGMHRDVVAVDKGLTPLSLANENWRKPIVLDTNDRREVWQSKELHGRFYRALHGPDVDLLASVSWLRFGDLFGETEGFVFAIMDEVMMTNNYRKYIVKDGTVDICRACHRPGESIRHIISGCSHLANGDYLHRHNLVARIIHQQLALKYNLVESEVPYYRYVPDPVLDNGNITLYWDRSIITDRTIVANKPDIVVIDRLERRTMIVDIAVPHDENLVKAEKDKQTKYLDLAREVVDMWEVDRAIIVPIVVTANGLIAKSLEQHLRRLSLGSWIKGLIQKAVLLDTARIVRRFLSQEP

SEQ ID NO: 12302 - protein, 1200 aa, Mythimna impura
MLTRSRAQKLHTHPTSSGSSLSSASQPPGPAPTVSPEIPVAAVASSSSDEYFSPPTTPPPARRRGRGRPPASLGPRGPPASDRVPAAGGSVQRMRWTSSINENVMRSYFGATEGGINLTAYRGRMLSLFQVLEPAVNVSVQRLSDQVRVIQRNRMLDDAVLDRLRLESQNSRVSPATTPAAVQRLPTASPRPVQVGDADDDAAISVSTQCNDRLRGALEDAFREYRSTPPGLRPRLPRLPMHKRNRALVCALDSQLSNCFDSSKDLTDTHSILYCAAVAACRVAHVKFPNCDRATRPAVPAWQCRIEHRIGEARALIGKLICFREGNTRPRVMRFVRRAFSGTDIGPRDYLPCVTERIDFLKQKIYAWANRIRRYKRRVERYTRNRTFQSNERWVYRDWERSDQGVTDTRLPDDDAMSSFWRSIWSAPVSHTEGDWIREVERACDLLPEMGAITISPQDVARAVRPLPNWKSPGPDGLHNFWVKWFQRSHARLASQFQSALESGSLPQFLTTGITHLLHKSGSTAEPKNYRPITCLPTVYKVLTSILRAKINSHIETNSIMSASQNGCRNGSRGTKELLLIDVAISQQVRRSRKNLSACWIDYKKAYDSVPHTWLMRVLELYKVDATLRTFLMSCMGQWRTVLHYPGCRQIQENNEPIRIERGIFQGDSLSPLWFCLALNPLSTLLEGSGLGYRLKRGGQVISHLLYMDDLKLFAPNNLQLVELLKVTETFSSAIRMEFGVDKCAVIHVKRGEIMESVGIQLSDSIHLRSLCSTETYRYLGMSESLGINTDDVKQSLKERFFGRLNKVLNSLLSGGNKVRAFNGWVMPVLMYSFGILKWTQTELDALDRRVRTLLTANRMHHPRSSVMRLYIPRKCGGRGFLNAKTLHNREVCSLREYFLKTDVGMHRDVVAVDKGLTPLSLANENWHKPIVLDTNDRREVWQSKELHGRFYRALHGPDVDLLASVSWLRFGDLFGETEGFVFAIMDEVMMTNNYRKYIVKDGTVDICRACHRPGESIRHIISGCSHLANGDYLHRHNLVARIIHQQLALKYNLVESEVPYYRYVPDPVLDNGNITLYWDRSIITDRTIVANKPDIVVIDRLERRTMIVDIAVPHDENLVKAEKDKQTKYLDLAREVVDMWEVDRAIIVPIVVTANGLIAKSLEQHLRRLSLGSWIKGLIQKAVLLDTARIVRRFLSQEP

SEQ ID NO: 12303 - protein, 1200 aa, Mythimna impura
MLTRSRARFQNAQPTSSGSSLSSASQPPGPAPTVSPEIPVAAVASSSSDEYFSPPTTPPPARRRGRGRPPASLGPRGPPASDRVPAAGGSVQRMRWTSSINENVMRSYFGATEGGINLTAYRGRMLSLFQVLEPAVNVSVQRLSDQVRVIQRNRMLDDAVLDRLRLESQSSRVSPATPPAAVQHLPTASPRPDYVGDADDDAAISVSTQCNDRLRGALEDAFREYRSTPPGLRPRLPRLPMHKRNRALVCALDSQLSNCFDSSEDLTDTHSILYCAAVAACRVAHVKFLNCDRATRPAVPAWQCRIEHRIGEARALIGKLICFREGNTRPRVMRFVRRAFSGTDISPRDYLPCVTERIDFRKQKIYAWANRIRRYKRRVERYTQNRTFQSNERWVYRDWERPDQGVTDTRLPDDDAMCSFWRSIWSTPVSHTEGDWIREVERACDILPEMGAITISPQDVTRAVRPLPNWKSPGPDGLHNFWLKWFQRSHARLASQFQSALEPGSLPQFLTTGITHLLHKSGSTAEPKNYRPITCLPTVYKVLISILRAKINSHIETNSIMSVSQNGCRNGSRGTKELLLIDVAINQQVRRSRKNLSACWIDYKKAYDSVPHTWLMRVLELYKVDATLRTFLMSCMGQWRIVLHYPGCRQIQENSEPIRIERGIFQGDSLSPLWFCLALNPLSTLLERSGLGYRLKRGGQVISHLLYMDDLKLFAPNNLQLVELLKVTETFSSAIRMEFGVDKCAVIHVKRGEIMESVGIQLSDSIHLRSLCSTETYKYLGMSESLGINTDDVKQSLKERFFGRLNKVLNSLLSGGNKVRAFNGWVMPVLMYSFGILKWTQTELDALDRRVRTLLTANRMHHPWSSVMRLYIPRKCGGRGFLNAKTLHNHEVCSLREYFLKTDVGMHRDVAAVDKGLTPLSLANENWRKPIVLDTNDRREVWQSKELHGRFYRALHGPDVDLLASVSWLRFGDLFGETEGFVFVIIDEVMMTNNYRKYIVKDGTVDICRACHRPGESIRHIISGCSHLANGDYLHRHNLVARIIHQQLALKYNLVESEVPYYRYVPDPVLDNGNITLYWDRSIITDRTIVANKPDIVVIDRLERRTMIVDIAVPHDENLVKAEKDKQTKYLDLAREVVDMWEVDRAIIVPIVVTANGLIAKSLEQHLRRLSLGSWIKGLIQKAVLLDTARIVRRFLSQEP

SEQ ID NO: 12304 - protein, 1200 aa, Mythimna impura
MLTRSRAQKLHTHPTSSGSSLSSASQPPGPAPTVSPEIPVAAVASSSSDEYFSPPTTPPPARRRGRGRPPASLGPRGPPASDRVPAAGGSVQRMRWTSSINENVMRSYFGATEGGINLTAYRSRMLSLFQVLEPAVNVSVQRLSDQVRVIQRNRMLDDAVLDRLRLESQSSRVSPATTPAAVQRLPTASPRPVQVGDADDDAAISVSTQCNDRLRGALEDAFREYRSTPPGLRPRLPRLPMHKRNRALVCALDSQLSNCFDSSKDLTDTHSILYCAAVAACRVAHVKFPNCDRATRPAVPAWQCRIEHRIGEARALIGKLICFREGNTRPRVMRFVRRAFSGTDISPRDYLPCVTERIDFLKQKIYAWANRIRRYKRRVERYTRNRTFQSNERWVYRDWERSDQGVTDTRLPDDDAMCSFWRSIWSAPVSHTEGDWIREVERACDLLPEMGAITISPQDVARAVRPLPNWKSPGPDGLHNFWVKWFQRSHARLASQFQSALESGSLPQFLTTGITHLLHKSGSTAEPKNYRPITCLPTVYKVLTSILRAKINSHIETNSIMSASQNGCRNGSRGTKELLLIDIAISQQVRRSRKNLSACWIDYKKAYDSVPHTWLMRVLELYKVDATLRTFLMSCMGQWRTVLHYPGCRQIQENNEPIRIERGIFQGDSLSPLWFCLALNPLSTLLEGSGLGYRLKRGGQVISHLLYMDDLKLFAPNNLQLVELLKVTETFSSAIRMEFGVDKCAVIHVKRGEIMESVGIQLSDSIHLRSLCSTETYKYLGMSESLGINTDDVKQSLKERFFGRLNKVLNSLLSGGNKVRAFNGWVMPVLMYSFGILKWTQTELDALDRRVRTLLTANRMHHPRSSVMRLYIPRKCGGRGFLNAKTLHNREVCSLREYFLKTDVGMHRDVVAVDKGLTPLSLANENWRKPIVLDTNDRREVWQSKELHGRFYRALHGPDVDLLASVSWLRFGDLFGETEGFVFAIMDEVMMTNNYRKYIVKDGTVDICRACHRPGESIRHIISGCSHLANGDYLHRHNLVARIIHQQLALKYNLVESEVPYYRYVPDPVLDNGNITLYWDRSIITDRTIVANKPDIVVIDRLERRTMIVDIAVPHDENLVKAEKDKQTKYLDLAREVVDMWEVDKAIIVPIVVTANGLIAKSLEQHLRRLSLGSWIKGLIQKAVLLDTARIVRRFLSQEP

SEQ ID NO: 12305 - protein, 1048 aa, Mythimna impura
MLDDTVLDRLRTEMSNHAIAPSSQSVVPVMVPPSYHLSDHADEAITDMVTHVSTQCNNELRSALECAIREYRSMPLELRPRLPRLPMHNKNKALVAALDLQLSIYFDDCKDLTDTHSIMYCAGVAACRVAHVKFPNCDVATRPKPAVPAWQCRIERRIGGARALIGKLICFREGNTRPRVMRFVRRAFSGTDISPRDYMSRVTERIDFLKQKVYAWANRIRRYKRRVERYTQNRTFRSNERWVYRAWERPDQGVTDECLPDDDAMSSFWRSIWSVPVSHTEGDWTREVERACDPIPQMGTINISPQDVARAVRPLPNWKSPGPDGLHNFWIKWFTRSHARLAYQFQSALESGSLPQFLTTGITHLLHKSGSTAEPKNYRPITCLPTVYKVLTSILRSKINSHIDKNLIMSPSQNGCRNGSRGTKELLLIDMTISQQVRRSRKDLSTCWIDYKKAYDSVPHTWLMRVLELYKIDTTLRTFLMSCMRQWSTVLRYPGCRHTQRNSEPVRIERGIFQGDSLSPLWFCLALNPLSTLLENSGLGYRLKRGGQVISHLLYMDDLKLFAPNNLQLMELLKVTETFSSAIRMEFGVDKCAVMHVKRGEVVESVGTQLTDSINLRSLSPTETYKYLGMSEALGINITDMKQSLKERFFGRLKKVFNSLLSGGNKVRAFNGWVMPVLMYSFGVLKWTQTELDALDRRVRTLLTAYRMHHPRSSVMRLYIPRKCGGRGFLNAKTLHNREVCSLREYFLAADVSMHRDVVAVDKGLTPLSLANENWRKPVVLDTNDRREVWQSKELHGRFFRALQGPDVDQLASVAWLRSGDLFGETEGFVCAIMDEVIMTNNYRRFIVKDGTVDICRACHRPGESIRHIISGCSRLANGEYLHRHNLVARIIHQQLALKYSLVESEVPYYRYEPDPVLDNGHITLYWDRSIITDRTIVANKPDIVVVDRSERRAMIVDISVPHDENLVKAEKDKQIKYIDLAREVVDMWDVDSAIIVPIVVSGNGLIAKSLDQHLRRLALGGWIKGLIQKAVLLDTARIVRRFLSLEP

SEQ ID NO: 12306 - protein, 1178 aa, Mythimna impura
MLTRSRAKKANTHPTPSGSSLSSASQPPGPAPTVSPEIPVAAVASSSSDEYFSPPTTPPPARRRGRGRPPASLGPRGPPASDRVLAAGGSVQRMRWTQSINENVMRSYFGATEGGSNLTAYRGRMLSLFQVLEPAVNVSAQRLSDQVRVIQRNRMLDDAVLDRLRLESRSSRVSPASPQAAVQLQSNVSLRPDHVGEDDDDGAISVSNQCNVRLRSALEDAFREYRFTPAELRPRLPRLPMHKKNRALVCALDSQLSNCFDSSEDLTDTHSILYCAAVAACRVARVKFPNSDRVTRPAVPAWQCRIERRIGEARALIGKLICFREGNTRPRVMRFVRRAFSGTNISPRDYLPHITERIDFLKQKVYAWANRIRRYKRRVERYTQNRTFQRNERWVYRAWERPDQGVIDTRLPDDDAMCSFWRSIWSVPVSHTEGDWTREIERTCDLIPEMEPITISPQDVARAVRPLPNWKSPGPDGLHNFWLKWFQRSHARLASQFQSALESGSLPQFLTTGITHLLHKSGSTAEPKNYRPITCLPTVYKVLTSILRAKINSHIETNSIMSASQNGCRNGSRGTKELLLIDVAISQQVRRSRRDLSTCWIDYKKAYDSVPHTWLMRVLELYKVDATLRTFLMSCMRQWRTALHYPGCRQIRESSEPIRIERGIFQGDSLSPLWFCLALNPLSTLLEGSGLGYRLKRGGQVISHLLYMDDLKLFASNNLQLMELLKVTETFSSAIRMEFGLDKCAVMHVKRGEIMESVGTQLSDSIYIRSLCSTETYKYLGMSEALGINAADMKQSLRERFFGRLNKVLNSLLSGGNKVRAFNGWVMPVLMYSFGILKWTQTELDALDRRVRSLLTANRMHHPRSSVMRLYIPRKCGGRGFLNAKTLHNREICSLREYFLKTDVGMHRDVVAVDKGLTPLSLVNENWRKPTVMDTNERRAVWQGKELHGRFYRALHGPDVDLLASVSWLRFGDLFGETEGFVFAIMDEVMMTNNYRKYIVKDGTVDICRACHRPGESIRHIISGCSHLANGDYLHRHNLVARIIHQQLALKYNLVESEVPYYRYVPDPVLENGSVTLYWDRSIITDRTIVANKPDIVVIDRLERRTMIVDIAVPHDENLVKAEKDKQTKYLDLAREVVDMWEVDRAVIVPIVVTVNGLISWTRRALLGDSSLRSPDHR

SEQ ID NO: 12307 - protein, 1044 aa, Mythimna impura
MMPYLIDFASNHGVAVSHLLRHRPRCNCNPMFHCRPDHVGEDDDDGAISVSNQCNVRLRSALEDAFREYRFTPAELRPRLPRLPMHKKNRALVCALDSQLSNCFDSSEDLTDTHSILYCAAVAACRVARVKFPNSDRVTRPAVPAWQCRIERRIGEARALIGKLICFREGNTRPRVMRFVRRAFSGTDISPRDYLPHITERIDFLKQKVYAWANRIRRYKRRVERYTQNRTFQRNERWVYRAWERPDQGVIDTRLPDDDAMCSFWRSIWSVPVSHTEGDWIREIERTCDLIPEMGAITISPQDVARAVRPLPNWKSPGPDGLHNFWLKWFQRSHARLASQFQSALESGSLPQFLTTGITHLLHKSGSTAEPKNYRPITCLPTVYKVLTSILRAKINSHIETNSIMSASQNGCRNGSRGTKELLLIDVAISQQVRRSRRDLSTCWIDYKKAYDSVPHTWLMRVLELYKVDATLRTFLMSCMRQWRTALHYPGCRQTRESSEPIRIERGIFQGDSLSPLWFCLALNPLSTLLEGSGLGYRLRRGGHVISHLLYMDDLKLFASNNLQLMELLKVTETFSSAIRMEFGLDKCAVMHVKRGEIMESVGTQLSDSIYIRSLCSTETYKYLGMSEALGINAADMKQSLRERFFGRLNKVLNSLLSGGNKVRAFNGWVMPVLMYSFGILKWTQTELDALDRRVRSLLTANRMHHPRSSVMRLYIPRKCGGRGFLNAKTLHNREICSLREYFLKTDVGMHRDVVAVDKGLTPLSLVNENWRKPTVMDTNERRAVWQGKELHGRFYRALHGPDVDLLASVSWLRFGDLFGETEGFVFAIMDEVMMTNNYRKYIVKDGTVDICRACHRPGESIRHIISGCSHLANGDYLHRHNLVARIIHQQLALKYNLVESEVPYYRYVPDPVLENGGVTLYWDRSIITDRTIVANKPDIVVIDRLERRTMIVDIAVPHDENLVKAEKDKQTKYLDLAREVVDMWEVDRAIIVPIVVTANGLIAKSLEQHLRRLSLGSWIKGLIQKAVLLDTARIVRRFLSQEP

SEQ ID NO: 12308 - protein, 1200 aa, Mythimna impura
MLTRAAARRARHPPPGSPLSSASPPPDLGSPVSPVAAVASSSSDEYFSPPTSPTPVRRPGRGRPPKSLGPGGQPAPSRVPAAGGCVQRMRWTQSMNENVMRAYYGSTEGGTSLTAYRDRMLSLFQDLEPTVNVSAQRLSDQVRFIQRNHRLDDAALDRLRSEVLSNQIVSTSIQTQTAATPTTNAISPRSILNNDDADERVVTVSSQCNDELRSALEDALREYRLTPTELRPRLPRLPMHKKNRALVCTLDSLLKNIFESSENLVDTHSILYCGAVAACRLANIKFPNTDGTIRPKPAVPAWQYRIGRRIDGARVLIGKLHSFREGNTRPRVMRFVRRAFLGTSISPQEYMSRVTERIDFLKQKVCAWASRIRRYKRRVDRYSQNRIFQSDERWVYRAWERPEQNVIDGLRPDDFATITFWRNIWSVPVSHTEGGWIREVERVCEAIPEMEKITISPADVAKAVRPLPNWKSPGPDGLQNFWLKWYRNSHAPLASQFQSTLESGSLPEYLTTGVTHLLHKTGNPAEPKNYRPITCLSTVYKLLTSILREKINRHIENNSIMSASQNGCRNGSRGTKELLLIDMAVSQQARRSRKDLSTCWIDYKKAYDSVPHTWLMRVLELYKIDTTLRTFLESCMRQWKTVLRYPGCRPIQGDDEPIRIKRGIFQGDSLSPLWFCLALNPLSTLLEDSGLGYRLRRGGQAISHLLYMDDLKLFAPSNLQLMELLKVTETFSSAIRMEFGVDKCAAMHVKQGEIMESEGIQLPDSIHLKSLSSTETYRYLGMSEALGINNADMKQSLKERFFGRLKKVLNSLLSGGNKVRAFNGWVMPVLMYSFGILKWTQTELDALDRRVRTLLTANRMHHPRSSVMRLYISRKCGGRGFLNAKTLHNREVCSLREYFLKTDVGMHRDVVAVDKGLTPLSMAKEDWRKPVVLTTDDRKEVWKGKELHGRFYRALHEPDVDFLASVAWLRFSDLFGETEGFVCAIMDEVILTNNYRKYIMKDGTVDVCRACHRPGESIRHIISGCSRLANGEYLHRHNQVARIIHQQLALKYNLVDSEVPYYKYVPDPVLENDHVTLYWDRSIITDRTIVANKPDIVVIDRLARRAIIVDVTIPHDENLVKAEKEKQIKYLDLAHEVVGMWNMDSVVIVPIVVTANGLIAKSFDDHLSKLSLRGWIKGLIQKAVLLDTARIVRRFLSLEP

SEQ ID NO: 12309 - protein, 1200 aa, Mythimna impura
MLTRAAPRRAHHPPPGSPLSSASPPPDLGSPVSPVAAVASSSSDEYFSPPTSPTPVRRPGRGRPPKSLGPGGQPAPSRVPAAGGCVQRMRWTQSMNENVMRAYYGSTEGGTNLTAYRDRMLSLFQDLEPTVNISAQRLSDQVRFIQRNHRLDDAALDRLRSEVLSNQIVSTSIQTQTTATPTINAISPRSIPNNVDADDRVVTVSSQCNDELRSALEDALREYRLTPTELRPRLPRLPMHKKNRALVCTLDSLLKNIFESSENLVDTHSILYCGAVAACRLANIKFPSTDGAIRPKPAVPAWQCRIERRIDGARVLIGKLHCFREGNTRPRVMRFVRRAFLATGISPQEYMSRVTERIDFLKQKVCAWASRIRRYKRRVDRYSQNRMFQSDERWVYRAWERPEQNVIDGLRPDNFATITFWRNIWSVPVSHTEGGWIREVKRVCEAIPEMDKITITPADVAKAVRPLPNWKSPGPDGLQNFWLKWYSNSHVPLASQFQSTLESGSLPEYLTTGVTHLLHKTGNPAEPKNYRPITCLSTVYKLLTSILREKINRHIENNSIMSASQNGSRNGSRGTKELLLIDMAVSQQARRSRKDLSTCWIDYKKAYDSVPHTWLMRVLELYKIDTTLRTFLESCMRQWKTVLRYPGCRPIQGNDEPIRIKRGIFQGDSLSPLWFCLALNPLSTLLENSGLGYRLRRGGQAISHLLYMDDLKLFAPSNLQLMELLKVTETSSSAIRMEFGVDKCAAMHVKQGEIMEFEGIQLPDSIHLKSLSSTETYRYLGMSEALGINNADMKQSLKERFFGRLKKVLNSLLSGGNKVRAFNSWVMPVLMYSFGILKWTQTELDALDRRVRTLLTANRMHHPRSSVMRLYISRKCGDRGFLNAKTLHNREVCSLREYFLKTDVGMHRDVVAVDKGLTPLSMAKEDWRKPVVLTTDDRKEVWKGKELHGRFYRALHEPDVDFLASVAWLRFSDLFGETEGFVCAIMDEVILTNNYRRYIMKDGTVDVCRACHRPGESIRHIISGCSRLANGEYLHRHNQVARIIHQQLALKYNLVDSEVPYYKYVPDPVLENDHVTLYWDRSIITNRTIVANKPDIVEIDRLARRAMIVDVTIPHDENLVKAEKEKQIKYLDLAHEVVDMWNVDSAVIVPIVVTANGLIAKSFDDHLSKLSLRGWIKGLIQKAVLLDTARIVRRFLSLEP

SEQ ID NO: 12310 - protein, 868 aa, Phlogophora meticulosa
MRFVRRAFSGTDISSRDYLTRVTERIDFLKQKICAWANRIRRYKRRVERYTQNRTFWSDERWVYRAWERSDQGVTDTCLPDDEAMCSFWRSIWSVPVSHTEGNWTREIERACEPLPEMGAINISPQDVASAVRPLPNWKSPGPDGLHNFWIKWLQSSHARLACQFQSALESGSLPQFLTTGITHLLHKSGSTAEPRNYRPITCLPTVYKVLTSILRSKINNHIDSNLIMSFSQNGCRNGSRGTKELLLIDTAISQQVRRSRKDLSTCWVDYKKAYDSVPHTWLMRVLELYKVDATLRTFLMSCMGQWRTVLRYPGCQQTRENSEPIRIERGIFQGDSLSPLWFCLALNPLSTLLEGSGLGYRLRTGGQVISHLLYMDDLKLFAPNNLQLMELLKVTETFSSAIRMDFGVDKCAVMHVKRGEIVESVGTQLSDSIYLRSLSSTETYKYLGMSEALGINATDMKQSLKERFFGRLNKVLNSLLSGGNKVRAFNGWVMPVLMYSFGILKWTQTELDALDRRVRTLLTANRMHHPRSSVMRLYIPRKCGGRGFLNAKTLHNREICSLREYFLKADVGMHRDVVAVDKTFTPHSLANKNWRKPIVLDTTDRMEIWKSKELHGRLYRVLHGPDVDLVASISWLRFGDLFGETEGFVCAIMDEVIMTNNYRKYIVKDGTVDICRACHRPGESIRHIISGCSRLANGDYLHRHNLVARIIHQQLALKYNLVDLEVPYYKYVPDPVLENGSITLYWDRSIITDRTIVANKPDIAVIDRSERRTMIIDITVPHDENLVKAEKEKQMKYLDLAREVVDMWDVNTAVIVPIVVTANGIIAKSLDQHLKRLSLGSWIKGLIQKAVLLDTARIVRRFLSQEP

SEQ ID NO: 12311 - protein, 1198 aa, Phlogophora meticulosa
MLTRSAARRARPPPPASSLSSASSPPKPSTIVSTVKPAVPVASSSSDEYFSPPTSPPPARRRRGRRPPDGLGPRGPPASDRVPAPGGSVQRMRWTQSINENVMRSYYGATEGGSNLTAYRVRMLSLFQVLEPAVNVSAQRLSDQVRVIQRNHMLDDVVLDRLRTEMQSSRVITSPSHTVVPPQYNIVLSSFADGEGSDKVTNVSTQYNEELRSALEGAIREYRFMLPALRPRLPRLPMHNKNRALVAALDSQLSNYFDNCDDLTDAHSILYCAAVAACRVAHVKFPYDIATRPKPAVPAWQCRIERRIAGARALIGKLVCYREGNTRPRVMRYVRRAFLGTDISPRDYMSRVTERIDFLKQKVYAWASRIRRYKRRVERYTQNRTFQSNERWVYRAWERPVQGVTDTHLPDDDVMCSFWRNIWSVPVSHTEGDWTREVERACDPIPQMGAITISPQDVARAVRPLPNWKSPGPDGLHNFWIKWLQKSHARLASQFQSALETGSLPQFLTTGITHLLHKSGSTAEPKNYRPITCLPTVYKVLTSILRVKINNHIDSNSIMSASQNGCRNGSRGTKELLLIDTAISQQVRRSRKDLSTCWIDYKKAYDSVPHTWLKRVLELYKVDATLRTFLTSCMGQWRTVLRYPGCRQIQRNSEPIRIERGIFQGDSLSPLWFCLALNPLSTLLEDSGLGYRLKRGGQVVSHLLYMDDLKLFAPSDLQLMELLTVTKTFSSAIRMEFGVDKCAVMHVKRGKIVESVGTQLPDFINFRALSPIETYKYLGMSEALGINSADMKQSLKERFFGRLKKVCNSLLSGGNKVRAFNGWVMPVLMYSFGILKWTQTELDALDRRVRTFLTASRMHHPRSSVMRLYIPRKCGGRGFLNAKTLHNREICSLRDYFLETDVGMHRDVVAVDQGLTPLSLAKENWRKPVVLDTNDRKEVWQSKELHGRFFQALHGPDVDQLASVSWLRFGDLFGETEGFVCAIMDEVIMTNNYRRFIVKDGTVDICRACHRPGESIRHIISGCSRLANEEYLHRHNLVARIIHQQLALKYSLVESEVPYYKYVPDPVLENGSVTLYWDRSIITDRTIVANKPDIVVMDRIERRATIIDVTVPHDGNLVKAEKDKQIKYLDLAREVVDMWDVDSAIVVPIVVSANGLIAKSLDQHLRRLALGSWIKGLIQKAVLLDTARIVRRFLSLEP

SEQ ID NO: 12312 - protein, 1198 aa, Phlogophora meticulosa
MLTRSAARRARPPPPASSLSSASSPPKPSTIVSTVKPAVPVASSSSDEYFSPPTSPPPARRRRGRRPPDGLGPRGPPASDRVPAPGGSVQRMRWTQSINENVMRSYYGATEGGSNLTAYRVRMLSLFQVLEPAVNVSAQRLSDQVRVIQRNHMLDDVVLDRLRTEMQSSRVITSPSHTVVPPQYNIVLSSFADGEGSDKVTNVSTQYNEELRSALEGAIREYRFMLPALRPRLPRLPMHNKNRALVAALDSQLSNYFDNCDDLTDAHSILYCAAVAACRVAHVKFPYDIATRPKPAVPAWQCRIERRIAGARALIGKLVCYREGNTRPRVMRYVRRAFLGTDISPRDYMSRVTERIDFLKQKVYAWASRIRRYKRRVERYTQNRTFQSNERWVYRAWERPVQGVTDTHLPDDDVMCSFWRNIWSVPVSHTEGDWTREVERACDPIPQMGAITISPQDVARAVRPLPNWKSPGPDGLHNFWIKWLQKSHARLASQFQSALETGSLPQFLTTGITHLLHKSGSTAEPKNYRPITCLPTVYKVLTSILRVKINNHIDSNSIMSASQNGCRNGSRGTKELLLIDSAISQQVRRSRKDLSTCWIDYKKAYDSVPHTWLKRVLELYKVDATLRTFLTSCMGQWRTVLRYPGCRQIQRNSEPIRIERGIFQGDSLSPLWFCLALNPLSTLLEDSGLGYRLKRGGQVVSHLLYMDDLKLFAPSDLQLMELLTVTKTFSSAIRMEFGVDKCAVMHVKRGKIVESVGTQLPDFINFRALSPIETYKYLGMSEALGINAADMKQSLKERFFGRLKKVCNSLLSGGNKVRAFNGWVMPVLMYSFGILKWTQTELDALDRRVRTFLTASRMHHPRSSVMRLYIPRKCGGRGFLNAKTLHNREICSLRDYFLETDVGMHRDVVAVDQGLTPLSLAKENWRKPVVLDTNDRKEVWQSKELHGRFFQALHGPDVDQLASVSWLRFGDLFGETEGFVCAIMDEVIMTNNYRRFIVKDGTVDICRACHRPGESIRHIISGCSRLANEEYLHRHNLVARIIHQQLALKYSLVESEVPYYKYVPDPVLENGSVTLYWDRSIITDRTIVANKPDIVVMDRIERRATIIDVTVPHDGNLVKAEKDKQIKYLDLAREVVDMWDVDSAIVVPIVVSANGLIAKSLDQHLRRLALGSWIKGLIQKAVLLDTARIVRRFLSLEP

SEQ ID NO: 12313 - protein, 1200 aa, Phlogophora meticulosa
MLTRSAARRARPPPLASSLSSASPPPESSPIVSTVTPAVAIASSSSDEYFSPPTSPPPARRRRGRRPPDSLGPRGPPASDRVPASGGSVQRMRWTQSINENVMRSYYGATEGGTNLTAYRGRMLSLFQMLEPAVNVSAQRLSDQVRVIQRNHMLDDVVLDRLRLNSRIYHVTPALPPVAVQLQSLPSVSPRPDYVGEEDDDAAISVSSQCNVRLRSALEDAFREYRSTPPELRSRLPRLPMHKKNKALMSALDSLLTKSFDNSKDLTDTHSILYCAAAAACRVANVKFPNTERATRPTVPAWQCRIQRRIDEARALIGKLICFREGNTRPRVMRFVRRAFSGTDISSRDYLTRVTERIDFLKQKICAWANRIRRYKRRVERYTQNRTFRSDERWVYRAWERPDQGVTDTCLPDDEAMCSFWRSIWSVPVSHTEGNWTREIERACEPLPEMGAINISPQDVASAVRPLPNWKSPGPDGLHNFWIKWLQSSHARLACQFQSALESGSLPQFLTTGITHLLHKSGSTAEPRNYRPITCLPTVYKVLTSILRSKINNHIDSNLIMSFSQNGCRNGSRGTKELLLIDTAISQQVRRSRKDLSTCWVDYKKAYDSVPHTWLMRVLELYKVDATLRTFLMSCMGQWRTVLRYPGCQQTRENSEPIRIERGIFQGDSLSPLWFCLALNPLSTLLEGSGLGYRLRTGGQVISHLLYMDDLKLFAPNNLQLMELLKVTETFSSAIRMDFGVDKCAVMHVKRGEIVESVGTQLSDSIYLRSLSSTETYKYLGMSEALGINATDMKQSLKERFFGRLNKVLNSLLSGGNKVRAFNGWVMPVLMYSFGILKWTQTELDALDRRVRTLLTANRMHHPRSSVMRLYIPRKYGGRGFLNAKTLHNREICSLREYFLKADVGMHRDVVAVDKTFTPLSLANKNWRKPIVLDTADRMEIWKSKELHGRFYRVLHGPDVDLVASISWLRFGDLFGETEGFVCAIMDEVIMTNNYRKYIVKDGTVDICRACHRPGESIRHIISGCSRLANGDYLHRHNLVARIIHQQLALKYNLVDLEVPYYKYVPDPVLENGSITLYWDRSIITDRTIVANKPDIVVIDRSERRTMIIDITVPHDENLVKAEKEKQMKYLDLAREVVDMWDVNTAVIVPIVVTANGIIAKSLDQHLKRLSLGSWIKGLIQKAVLLDTARIVRRFLSQEP

SEQ ID NO: 12314 - protein, 1110 aa, Laspeyria flexula
MRWSSSVNENVMRAYFAATEGGINLTAYRSRMLALFQDLEPTTKVTAQRLSDQVRAIQRCRMLDDTVLDRLRLECLQNNPTVPLQVNNLNNIISNAITIQADHNLEEVDGISSVDTQCNEEVRVALERALREYRFTSLQFRPRLPRLPMHKKNLALVITLDSLLSDYFDNSENLGDTHSILYCAAVAACRLAGVKFLGIEPPSHERPSTPAWQCRIERRIAGARILIGKLISFRAGNTRPRVMRFVNQAFSGTDVSPNEYLSRVTERIDFLKQKVYAWANRIRRFKKRVDRYTVNRLFQRDQRRVYRNWERPTQEVSDERLPNATATNEFWSSIWSEPVLHSEGEWIWDVERACERIPLMESVVISAEDIASAVRPMANWKSPGPDGLHNFWLRWLRSSHGRLASQFQSALESGSLPEFLTTGCTHLLHKSGSVTEPGNYRPITCLPSVYKLLTSVLRAKITKHIDDTRTMSISQNGCRRGSRGTKELLLVDMTISQQVRRSRKDLATCWIDYKKAFDSVPHSWLLRVLELYKVDITLRTFLESCMRQWRTVLTYPGCRLICGNGEPVRIKRGIFQGDSLSPLWFCLALNPLSTLLESSGLGYRLRRGGHVISHLLYMDDLKLIAPTDLQLKGLLKATEDFSKSIKMDFGVDKCAIMHVKRGEIVESDGIQLSDSINFRSLLVTDTYKYLGMSQALGIKETDMKQSLQERFFGRLKKVLNSLLSGGNKVRACNGWVMPLLMYSFGILKWTQTELDTLDRRVRTMLTAYRMHHPRSSVMRLYIPRKCGGRGFLNAKTLHNREVYNLREYFMGKVEGMHRDVVAVDSGLTPLSLAKDNWRRPIVLSTDDRRQVWQSKELHGRFYKALHGPDVDRVASVAWLRFGDLFGETEGFACAIADEVIKTNNYRKYILRDGTVDICRACHRPGESLRHIVSGCSRLANGEYLHRHNQVARIIHQQLALRYKLVDVEVPYYRYAPEPVLENSHTTLYWDRSIITDRTVIANKPDIVVLDRSKRLAVIVDITVPHDENLVKAEKDKQTKYLDLAHEIVDMWDVDSAIIVPIVVTVNGLVAKSLDQHLKRLGLGSWLKGLIQKAVLLGTARIVRRFLSLEP

SEQ ID NO: 12315 - protein, 974 aa, Laspeyria flexula
MCKSYARNNNNNNNKKNLALVITLDSLLSDYLDNSENLGDTHSILYCAAVAACRLAGVKFLGIEPPFHEWPSTPAWQCRIERRIAGARILIGKLISFRTGNTRPRVMRFVNQAFSGTDVSPNEYLSRVTERIDFLKQKVYAWANRIRRFKKRVDRYTVNRLFQRDQRWVYRNWERPTQEVSDARLPDATATNEFWSSIWSEPVLHSEGTWIWDVERACERIPHMESVVISAEDIASAVRPMANWKSPGPDGLHNFWLRWLRSSHSRLASQFQSALESGSLPEFLTTGCTHLLHKSGSVTEPGNYRPITCLPSVYKLLTSVLRAKITKHIDDNRTMSISQNGCRRGSRGTKELLLVDMTISQQVRRSRKDLATCWIDYKKAFDSVPHSWLLRVLELYKVDITLRTFLESCMRQWRTVLTYPGCRLIRGNGEPVRIKRGIFQGDSLSPLWFCLALNPLSTLLESSGLGYRLRRGGHVISHLLYMDDLKLIAPTDLQLKYLLKVTEDFSKSIKMDFGVDKCAIMHVKRGEIVESEGIQLSDSINFRSLLVTDTYKYLGMSQALGIKEMDMKQSLQERFFGRLKKVLNSLLSGGNKVRACNGWVMPLLMYSFGILKWTQTELDALDRRVRTMLTAYRMHHPRSSVMRLYIPRKCGGRGFLNTKTLHNREVYNLREYFMGKVEGMHRDVVAVDSGLTPLSLAKDNWRRPIVLSTDDRRQVWQSKELHGRFYKALHGPDVDRVASVAWLRFGDLFGETEGFVCAIADEVIKTNNYRKYILRDGTVDICRACHRPGESLRHIVSGCSRLANGEYLHRHNQVARIIHQQLALRYKLVDVEVPYYRYAPEPVLENSHATLYWDRSIITDRTVIANKPDIVILDRSKRLAVIVDITVPHDENLVKAEKDKQTKYLDLAHEIVDMWDVNSAIIVPIVVTVNGLVAKSLDQHLKRLELGSWIKGLMQKAVLLDTARIVRRFLSLEP
